(19) United States
(12) Patent Application Publication
(10) Pub. No.: US 2002/0061521 A1
(43) Pub. Date: May 23, 2002

(54) Nucleic acids, proteins, and antibodies

(76) Inventors: Craig A. Rosen, Laytonsville, MD (US); Steven M. Ruben, Olney, MD (US); Steven C. Barash, Rockville, MD (US)

Correspondence Address: HUMAN GENOME SCIENCES INC, 9410 KEY WEST AVENUE, ROCKVILLE, MD, 20850

(21) Appl. No.: 09/764,869

(22) Filed: Jan. 17, 2001

Related U.S. Application Data
(60) Provisional application No. 60/179,065, filed on Jan. 31, 2000.

(51) Int. Cl. C12Q 1/68; C12P 21/06; A01N 37/18; C07H 21/00; A61K 38/00

(52) U.S. Cl. 435/6; 435/69.1; 514/2; 536/23.1; 530/300

(57) ABSTRACT

The present invention relates to novel cardiovascular system related polynucleotides and the polypeptides encoded by these polynucleotides herein collectively known as “cardiovascular system antigens,” and the use of such cardiovascular system antigens for detecting disorders of the cardiovascular system, particularly the presence of cancer of cardiovascular system tissues and cancer metastases. More specifically, isolated cardiovascular system associated nucleic acid molecules are provided encoding novel cardiovascular system associated polypeptides. Novel cardiovascular system polypeptides and antibodies that bind to these polypeptides are provided. Also provided are vectors, host cells, and recombinant and synthetic methods for producing human cardiovascular system associated polynucleotides and/or polypeptides. The invention further relates to diagnostic and therapeutic methods useful for diagnosing, treating, preventing and/or prognosing disorders related to the cardiovascular system, including cancer of cardiovascular system tissues, and therapeutic methods for treating such disorders. The invention further relates to screening methods for identifying agonists and antagonists of polynucleotides and polypeptides of the invention. The present invention further relates to methods and/or compositions for inhibiting the production and function of the polypeptides of the present invention.

### Statement under 37 C.F.R. §1.77(b)(4)

[0001] This application refers to a “Sequence Listing” listed below, which is provided as an electronic document on two identical compact discs (CD-R), labeled “Copy 1” and “Copy 2.” These compact discs each contain the following files, which are hereby incorporated in their entirety herein:

| | | | Date of |
|---|---|---|---|
| Document | File Name | Size in bytes | Creation |
| Sequence Listing | PC007_seqList.txt | 4,799,089 | 01/15/2001 |
| V Viewer Setup File | SetupDLL.exe | 695,808 | 12/19/2000 |
| V Viewer Help File | v.cnt | 7,984 | 01/05/2001 |
| Controller | | | |
| V Viewer Program | v.exe | 753,664 | 12/19/2000 |
| File | | | |
| V Viewer Help File | v.hlp | 447,766 | 01/05/2001 |

[0002] The Sequence Listing may be viewed on an IBM-PC machine running the MS-Windows operating system by using the V viewer software, licensed by HGS, Inc., included on the compact discs (see World Wide Web URL: http://www.fileviewer.com).

### FIELD OF THE INVENTION

[0003] The present invention relates to novel cardiovascular system related polynucleotides, the polypeptides encoded by these polynucleotides herein collectively referred to as “cardiovascular system antigens,” and antibodies that immunospecifically bind these polypeptides, and the use of such cardiovascular system polynucleotides, antigens, and antibodies for detecting, treating, preventing and/or prognosing disorders of the cardiovascular system, including, but not limited to, the presence of cancer of the cardiovascular system tissues and cancer metastases. More specifically, isolated cardiovascular system nucleic acid molecules are provided encoding novel cardiovascular system polypeptides. Novel cardiovascular system polypeptides and antibodies that bind to these polypeptides are provided. Also provided are vectors, host cells, and recombinant and synthetic methods for producing human cardiovascular system polynucleotides, polypeptides, and/or antibodies. The invention further relates to diagnostic and therapeutic methods useful for diagnosing, treating, preventing and/or prognosing disorders related to the cardiovascular system, including of cancer of the cardiovascular system tissues, and therapeutic methods for treating such disorders. The invention further relates to screening methods for identifying agonists and antagonists of polynucleotides and polypeptides of the invention. The invention further relates to methods and/or compositions for inhibiting or promoting the production and/or function of the polypeptides of the invention.

### BACKGROUND OF THE INVENTION

[0004] The Human Cardiovascular, or circulatory, system is responsible for the delivery of oxygen, nutrient molecules, and hormones, in addition to the removal of carbon dioxide via blood. The system is comprised of the heart and a complex system of arteries, arterioles, capillaries, venules, and veins that innervate and affect the entire body. The circulatory system provides the primary mechanism of transport of materials between the organs and tissues of the body.

[0005] The central organ of the circulatory system is the heart, a muscular pump responsible for the propulsion of blood throughout the body. The heart is a two-sided, four chambered structure with muscular walls, contracting and relaxing in a cyclical pattern, or cardiac cycle. The cardiac cycle consists of two parts: systole (e.g., the contraction of the heart muscle) and diastole (e.g., relaxation of the heart muscle). Blood from the body flows through the vena cava into the right atrium (or upper chamber) while oxygenated blood from the lungs flows from the pulmonary vein into the left atrium. Atrial systole occurs as the muscles of both atria contract, forcing blood downward through each atrioventricular (AV) valve into the corresponding ventricle. Diastole occurs as the ventricles are filling with blood. Ventricular systole opens the semilunar, or arterial, valve, forcing the blood out of the ventricles through the pulmonary artery or aorta, depending on the oxygenated state of the blood. The pulmonary artery carries deoxygenated blood to the lungs for gas exchange. The aorta, the main artery leaving the heart, is responsible for transporting the oxygenated blood from the heart to the network of arteries and capillaries in the body.

[0006] Blood vessels that carry blood away from the heart (e.g., arteries) are composed of thick smooth muscle fibers that allows them to expand and contract which enables blood to be carried under high blood pressure. Arterioles are small arteries that connect larger arteries with collections of capillaries (e.g., capillary beds). Capillaries are tiny, extremely thin-walled vessels that act as bridges between arteries and the surrounding tissues. Nutrients, wastes, and hormones are exchanged across the thin walls of capillaries by passing through or between the cells that line the capillary. Some capillaries have small pores between the cells of the capillary walls that allow material exchange as well as the passage of white blood cells.

[0007] Blood leaving the capillary beds flows into a progressively larger series of venules that eventually will join to form veins. Because veins carry blood from the capillaries to the heart, most veins carry oxygen-poor blood. The exceptions, pulmonary veins, carry oxygenated blood from the lungs back to the heart via the vena cava. Unlike arteries, pressure in the veins is low; therefore, veins depend on muscular contractions to move the blood through them.

[0008] Cardiovascular disease can affect all aspects of the circulatory system, from the heart muscles and valves to the arteries and veins. These diseases can range in severity from mild to severe and acute to chronic. Cardiovascular diseases can be grouped according to the area of the circulatory afflicted, the cause of the affliction, or the result of the affliction.

[0009] Disorders and Diseases of the Heart

[0010] The most common heart disease is Heart Failure in which the cardiac output of the heart is insufficient to meet the body's normal requirements for oxygen and nutrients. Any disease can lead to heart failure if (a) it increases the heart muscle's workload (e.g., myocarditis, diabetes, coronary artery disease) which eventually weakens the force of contractions, or (b) affects the heart's electrical conduction system (e.g., hyperkalemia) which results in slow, fast, or irregular heartbeats. The body has several mechanisms to initially compensate for heart failure; however, these mechanisms eventually will malfunction and cause edema, making the heart failure worse.

[0011] Several treatment regimens are available for chronic and acute heart failure including dietary adjustments and exercise regimens. Diurectics are used to reduce fluid retention. Other drugs are used to increase the power of a heartbeat and slows a rapid heart rate (e.g., digoxin) and to dilate the blood vessels (e.g., vasodilators, including angiotensin converting enzyme, nitroglycerin, and hydralazine). Heart transplantation may be also recommended if there is no response to any other regimen.

[0012] Cardiomyopathy is group of disorders characterized by an alteration of the structure or an impairment of the function of the muscular wall of the ventricles. The most common form is dilated congestive cardiomyopathy in which the ventricle cavities enlarge, are unable to produce enough cardiac output, and eventually result in congestive heart failure. Viral cardiomyopathy is a form of dilated congestive cardiomyopathy resulting from a viral infection (e.g., coxsackievirus B). Treatments for dilated congestive cardiomyopathy involve managing angina with a nitrate, beta-blocker, or calcium channel blocker. Anticoagulant drugs are also used to prevent embolus. Hypertrophic cardiomyopathy is an inherited genetic defect resulting in thickening of the ventricle walls and possibly blockage of the blood flow into the ventricle. Treatment regimens for hypertrophic cardiomyopathy are aimed primarily at reducing the heart's resistance to filling with blood between heartbeats by the use of beta-blockers and calcium channel blockers. Surgery can also be used to relieve symptoms. Restrictive cardiomyopathy is a rare disorder in which the walls of the ventricles become stiff without thickening and resist normal filling with blood between heartbeats. There are two basic types of restrictive cardiomyopathy: one in which the heart muscle is gradually replaced by scar tissue, and the other in which the heart muscle is infiltrated by abnormal material (e.g., white blood cells, hemochromatosis, amyloidoisis, sarcoidosis, or tumor invading the heart tissue). No current therapy for restrictive cardiomyopathy is satisfactory. The therapies for other forms of cardiomyopathy and heart failure worsen this disorder instead of improving it.

[0013] Primary tumors of the heart are generally rare, and their symptoms imitate other heart diseases. Half of all primary heart tumors are myxomas, with most occurring in the left atrium. Myxomas are noncancerous tumors, irregular in shape and jellylike in consistency. The tumor may block or damage the mitral valve or another valve if pieces of the tumor break off. Symptoms depend on which vessel is blocked. Less common noncancerous heart tumors include fibromas and rhabdomyomas. Single noncancerous primary tumors are generally removed by surgery. Multiple noncancerous and any cancerous heart tumor can not be removed surgically; only their symptoms are treated.

[0014] Disorders and Diseases of the Pericardium

[0015] The pericardium is a flexible, two-layered sac that surrounds the heart and is responsible for keeping the heart in position, preventing the heart from overfilling with blood, and protecting the heart from chest infections. Although the pericardium is not essential to the heart's performance, inflammation of the pericardium (e.g., pericarditis), can be painful and result in heart damage. Acute pericarditis occurs when inflammation of the pericardium begins suddenly, resulting in fluid and blood products (e.g., fibrin, red blood cells, and white blood cells) pouring into the pericardial space and compressing the heart. Acute pericarditis has many causes ranging from viral infections to diseases such as AIDS, systemic lupus erythematoses, rheumatoid disease, and kidney failure. Treatment includes analgesics or anti-inflammatory drugs to relieve pain, and in the cases of viral or bacterial infections, antibiotics are also administered.

[0016] Chronic pericarditis is inflammation that results in gradual fluid accumulation and thickening of the pericardium. One form, chronic effusive pericarditis, occurs when fluid slowly accumulates in the pericardium. A rare form, chronic constrictive pericarditis, results when fibrous tissue forms around the heart, compressing the heart, and making the heart smaller. The compression increases the venous pressure resulting in the leaking out and accumulation of fluid in the body. Current protocols for treatment involve diuretics to remove excess fluid or surgery to remove the pericardium.

[0017] Disorders and Diseases of the Endocardium and Heart Valves

[0018] Bacterial Endocarditis is an inflammation of the smooth interior lining of the heart (e.g., endocardium) or heart valve occurring most often in people with a heart defect or damaged valves. This disease can appear suddenly and become life-threatening within days (e.g., acute bacterial endocarditis) or can develop gradually over a period of weeks to several months (e.g., subacute bacterial endocarditis). As a preventive measure, people with heart valve abnormalities, artificial valves, or congenital defects are given antibiotics prior to any dental or surgical procedure. Current treatment for bacterial endocarditis consists of a series of high-dose intravenous antibiotics. Heart surgery may also be required to repair or replace damaged valves and remove accumulations of bacteria and blood clots on the valves (e.g., vegetations).

[0019] Regurgitation describes the leakage back through a valve upon ventricular contraction. The mitral valve opens from the left atrium into the left ventricle. When this valve develops regurgitation, some blood leaks back into the left atrium, increasing the volume and blood pressure, and resulting in lung congestion. The aortic valve opens from the left ventricle into the aorta. Regurgitation of the aortic valve results in a characteristic heart murmur, in mild cases, and enlargement of the ventricle and eventually heart failure in severe cases. The tricuspid valve opens from the right atrium into the right ventricle. Leakage of this valve results in blood pumped forward to the lungs and back into the right atrium and pressure increased in the right atrium and veins, creating resistance to the flow of blood from the body to the heart. Treatment for regurgitation depends on the valve that is leaking. Mitral valve regurgitation is generally treated with surgery, or if atrial fibrillation is also present, with drugs such as beta-blockers, digoxin, and verapamil to slow the heart rate and control the fibrillation. Treatment for aortic valve regurgitation involves reducing the risk for infection of the valve by antibiotics. Currently, there is no treatment for tricuspid valve regurgitation.

[0020] Stenosis is the narrowing of a valve opening that increases resistance to blood flow across the valve. Mitral valve stenosis occurs due to a congenital defect or rheumatic fever and, in the severe cases, results in heart failure and pulmonary edema. Drug therapy (e.g., beta-blockers and digoxin to control fibrillation and diuretics to reduce blood volume and pressure in the lungs) and valve replacement surgery is the current treatment for this stenosis. In addition to the scarring and calcium accumulation in the leaflets of the aortic valve, a congenital defect or rheumatic fever can also cause aortic stenosis. The ventricle wall thickens, requiring an increasing blood supply from the coronary arteries, and resulting in angina, coronary artery disease, and eventually, heart failure. Stenosis can also occur in the tricuspid valve and pulmonary valve; however, it is rarely severe enough to require surgery.

[0021] Diseases and Disorders of the Arteries

[0022] Arteriosclerosis is a general term for arterial diseases in which the wall of an artery becomes thicker and less elastic, resulting in an obstruction of the blood flow. Arteriosclerosis, primarily caused by high blood pressure, is a less common form of arteriosclerosis that affects the inner and middle layer of the walls of arterioles. The most common, atherosclerosis, occurs when fatty material accumulates under the inner lining of the arterial wall. Artherosclerosis can affect the arteries of the brain, heart, kidneys, and other vital organs of the body and results in a severe narrowing of the vessel or a rupture in the vessel, triggering the formation of thrombi. The thrombus may further narrow or occlude the artery, or it may detach and cause an embolism. Treatment for artherosclerosis involves preventing by controlling the risk factors (e.g., high blood pressure, high blood cholesterol levels, cigarette smoking, diabetes) associated with the disease.

[0023] The major cause of cardiovascular disease, coronary artery disease, is arteriosclerosis of the coronary arteries encircling the heart. As coronary artery disease progresses, several major complications can occur, including myocardial ischemia, angina, and myocardial infarction. Ischemia is an inadequate supply of oxygenated blood to the heart that results in heart damage. Angina, or angina pectoris, is the chest pain or pressure sensation that occurs when the heart muscle does not receive enough oxygen. Although ischemia is usually accompanied by an episode of angina, it can occur alone (e.g., silent ischemia).

[0024] Angina pectoris generally occurs upon exertion when the heart's needs increase and the blood flow is no longer enough to meet those needs. However, variant angina, or Prinzmetal's angina, occurs at rest from a spasm of the large coronary arteries on the surface of the heart. Unstable angina occurs when the pattern of symptoms changes, usually reflecting a rapid progression of coronary artery disease. Unstable angina corresponds to a high risk for heart attack and usually translates into a medical emergency. Treatment for both angina pectoris and Prinzmetal's angina is designed to prevent or reduce ischemia and minimize symptoms through drug therapy. Four types of drugs are available: beta-blockers to reduce the resting heart rate and demand for oxygen, nitrates to dilate the blood vessel walls, calcium antagonists to prevent vessel constrictions, and antiplatelet drugs to prevent clot formation. Unstable angina is currently treated with anticoagulants (e.g., heparin), glycoprotein IIb/IIIa inhibitor (e.g, abciximab) beta-blockers, and intravenous nitroglycerin. If drugs are not effective, coronary anteriography or bypass surgery may be required.

[0025] Diseases and Disorders of the Veins

[0026] The main disorders of the veins involve inflammation, clotting, and defects that lead to distention and varicose veins. Varicose veins are enlarged superficial veins most commonly found in the legs. The veins become weak, elongate, and widen, causing the valve cusps to separate, and the veins rapidly fill with blood when the person stands. Varicose veins commonly ache. Although there is no cure, treatment relieves symptoms, improves appearance, and prevents complication. Surgery may also to able to remove the veins.

[0027] Disorders Associated with Blood Pressure

[0028] Blood pressure varies naturally over a lifetime. Adjustments in blood pressure are governed by changes in kidney function and in the autonomic nervous system. The most common disorder associated with blood pressure is hypertension or high blood pressure. Hypertension is defined as an average at-rest systolic pressure of 140 mm Hg or more and an average at-rest diastolic pressure of 90 mm Hg or more. Generally, both the systolic and diastolic pressures are elevated. However, in isolated systolic hypertension, only the systolic pressure is elevated. Hypertension probably has more than one cause. Several changes in the heart and blood pressure may combine to elevate blood pressure. Other causes may be kidney disease, hormonal disorders, and drugs. Hypertension increases the risk of developing heart disease, kidney failure, and especially, stroke. Hypertension can not be cured. Treatment involves drug therapy to prevent complications. Current drug regimens include thiazide diuretics to help eliminate salt and water from the kidneys and lower fluid volume, adrenergic blockers (e.g., alpha-blockers, beta-blockers, and alpha-beta blockers) to block the effects of the sympathetic nervous system, angiotensin converting enzyme inhibitors and angiotensin II blockers to dilate arteries, calcium antagonists to dilate blood vessels, and direct vasodialators.

[0029] Low blood pressure can also cause problems. For example, shock results when a low blood volume, an inadequate pumping of the heart, or excessive dilation of the blood vessels causes severe low blood pressure. An inadequate supply of blood reaches the cells, which can be quickly and irreversibly damaged. Low blood volume can occur with excessive loss of body fluids associated with such conditions as pancreatitis, perforation of the intestinal wall, severe diarrhea, excessive use of diuretics, or kidney disease. If untreated, shock is usually fatal. Treatment regimens are at aimed at increasing the rate and rhythm of the heartbeat, increasing blood volume, and improve heart muscle contraction.

[0030] Disorders Associated with Electrolyte Imbalance

[0031] Changes in the total amount of sodium are closely linked to changes in the volume of water in the blood. Normal kidneys adjust the amount of sodium excreted in the urine so that sodium levels remain relatively constant. Hyponatremia, or low sodium blood level, occurs when the blood sodium concentration falls below 136 milliequivalents (mEq) per liter of blood. A reduction in the blood sodium concentration results in a reduction in blood volume and blood pressure. The heart rate rises and light-headedness and shock can occur. Treatment involves the restriction of fluid intake and a slow increase in the blood sodium levels with intravenous fluids. Hypernatremia, high sodium blood level, occurs when the blood sodium concentration reaches above 145 mEq per liter of blood. This causes an increase in blood volume, resulting in edema. Treatment involves replacing the body's water concentration.

[0032] Changes in potassium concentration can have serious consequences, such as an abnormal heart rhythm or cardiac arrest. Therefore, potassium levels in the blood must be maintained within a narrow range. If the kidneys are not functioning properly or potassium has been lost through the gastrointestinal tract, potassium levels in the blood can drastically drop. Hypokalemia occurs when the blood potassium level falls below 3.8 mEq per liter of blood. Severe hypokalemia can result in muscle weakness, twitches, paralysis, or abnormal heart rhythms. Administration of potassium supplements is generally sufficient to correct this disorder. Hyperkalemia, or high potassium blood level, results when kidneys don't excrete enough potassium or when a rapid influx of potassium is released from the reservoir in cells. Mild hyperkalemia causes few, if any, symptoms. However, if potassium concentrations rise above 5.5 mEq per liter of blood, the heart's electrical conducting system is affected, resulting in abnormal heart rhythms and, possibly, cardiac arrest. Potassium can be removed from the body by dialysis, by induction of diarrhea, or by administering a potassium-absorbing resin. An intravenous solution of calcium, glucose, or insulin can also be given to protect the heart from the high levels of potassium and to drive the potassium from the blood into the cells, respectively.

[0033] The discovery of new human cardiovascular system associated polynucleotides, the polypeptides encoded by them, and antibodies that immunospecifically bind these polypeptides, satisfies a need in the art by providing new compositions which are useful in the diagnosis, treatment, prevention and/or prognosis of disorders of cardiovascular system, particularly disorders of the cardiovascular system, including, but not limited to, cardiovascular abnormalities (e.g., congenital heart defects, cerebral arteriovenous malformations, and septal defects), heart disease (e.g., heart failure, cardiomyopathy, pericarditis, and endocarditis), arrhythmias, heart valve disease (e.g., stenosis, regurgitation, and prolapse), vascular diseases (e.g., arteriosclerosis, coronary artery disease, angina, varicose veins, hypertension, and shock), electrolyte imbalance disorders (e.g., hypo- and hypernatremia, and hypo- and hyperkalemia), and/or as described under “Cardiovascular Disorders” below.

### SUMMARY OF THE INVENTION

[0034] The present invention relates to novel cardiovascular system related polynucleotides, the polypeptides encoded by these polynucleotides herein collectively referred to as “cardiovascular system antigens,” and antibodies that immunospecifically bind these polypeptides, and the use of such cardiovascular system polynucleotides, antigens, and antibodies for detecting, treating, preventing and/or prognosing disorders of the cardiovascular system, including, but not limited to, the presence of cancer and cancer metastases. More specifically, isolated cardiovascular system nucleic acid molecules are provided encoding novel cardiovascular system polypeptides. Novel cardiovascular system polypeptides and antibodies that bind to these polypeptides are provided. Also provided are vectors, host cells, and recombinant and synthetic methods for producing human cardiovascular system polynucleotides, polypeptides, and/or antibodies. The invention further relates to diagnostic and therapeutic methods useful for diagnosing, treating, preventing and/or prognosing disorders related to the cardiovascular system, including of cancer of the cardiovascular system tissues, and therapeutic methods for treating such disorders. The invention further relates to screening methods for identifying agonists and antagonists of polynucleotides and polypeptides of the invention. The invention further relates to methods and/or compositions for inhibiting or promoting the production and/or function of the polypeptides of the invention.

### DETAILED DESCRIPTION

[0035] Tables

[0036] Table 1A summarizes some of the polynucleotides encompassed by the invention (including cDNA clones related to the sequences (Clone ID NO:Z), contig sequences (contig identifier (Contig ID:) and contig nucleotide sequence identifier (SEQ ID NO:X)) and further summarizes certain characteristics of these polynucleotides and the polypeptides encoded thereby. The first column provides a unique clone identifier, “Clone ID NO:Z”, for a cDNA plasmid related to each cardiovascular system associated contig sequence disclosed in Table 1A. The second column provides a unique contig identifier, “Contig ID:” for each of the contig sequences disclosed in Table 1A. The third column provides the sequence identifier, “SEQ ID NO:X”, for each of the contig polynucleotide sequences disclosed in Table 1A. The fourth column, “ORF (From-To)”, provides the location (i.e., nucleotide position numbers) within the polynucleotide sequence of SEQ ID NO:X that delineate the preferred open reading frame (ORF) shown in the sequence listing and referenced in Table 1A as SEQ ID NO:Y (column 5). Column 6 lists residues comprising predicted epitopes contained in the polypeptides encoded by each of the preferred ORFs (SEQ ID NO:Y). Identification of potential immunogenic regions was performed according to the method of Jameson and Wolf (CABIOS, 4:181-186 (1988)); specifically, the Genetics Computer Group (GCG) implementation of this algorithm, embodied in the program PEPTIDESTRUCTURE (Wisconsin Package v10.0, Genetics Computer Group (GCG), Madison, Wisc.). This method returns a measure of the probability that a given residue is found on the surface of the protein. Regions where the antigenic index score is greater than 0.9 over at least 6 amino acids are indicated in Table 1A as “Predicted Epitopes.” In particular embodiments, cardiovascular system associated polypeptides of the invention comprise, or alternatively consist of, one, two, three, four, five or more of the predicted epitopes described in Table 1A. It will be appreciated that depending on the analytical criteria used to predict antigenic determinants, the exact address of the determinant may vary slightly. Column 7, “Tissue Distribution” shows the expression profile of tissue, cells, and/or cell line libraries which express the polynucleotides of the invention. The first number in column 7 (preceding the colon), represents the tissue/cell source identifier code corresponding to the code and description provided in Table 4. Expression of these polynucleotides was not observed in the other tissues and/or cell libraries tested. For those identifier codes in which the first two letters are not “AR”, the second number in column 7 (following the colon), represents the number of times a sequence corresponding to the reference polynucleotide sequence (e.g., SEQ ID NO:X) was identified in the tissue/cell source. Those tissue/cell source identifier codes in which the first two letters are “AR” designate information generated using DNA array technology. Utilizing this technology, cDNAs were amplified by PCR and then transferred, in duplicate, onto the array. Gene expression was assayed through hybridization of first strand cDNA probes to the DNA array. cDNA probes were generated from total RNA extracted from a variety of different tissues and cell lines. Probe synthesis was performed in the presence of ³³P dCTP, using oligo(dT) to prime reverse transcription. After hybridization, high stringency washing conditions were employed to remove non-specific hybrids from the array. The remaining signal, emanating from each gene target, was measured using a Phosphorimager. Gene expression was reported as Phosphor Stimulating Luminescence (PSL) which reflects the level of phosphor signal generated from the probe hybridized to each of the gene targets represented on the array. A local background signal subtraction was performed before the total signal generated from each array was used to normalize gene expression between the different hybridizations. The value presented after “[array code]:” represents the mean of the duplicate values, following background subtraction and probe normalization. One of skill in the art could routinely use this information to identify normal and/or diseased tissue(s) which show a predominant expression pattern of the corresponding polynucleotide of the invention or to identify polynucleotides which show predominant and/or specific tissue and/or cell expression. Column 8, “Cytologic Band,” provides the chromosomal location of polynucleotides corresponding to SEQ ID NO:X. Chromosomal location was determined by finding exact matches to EST and cDNA sequences contained in the NCBI (National Center for Biotechnology Information) UniGene database. Given a presumptive chromosomal location, disease locus association was determined by comparison with the Morbid Map, derived from Online Mendelian Inheritance in Man (Online Mendelian Inheritance in Man, OMIM™. McKusick-Nathans Institute for Genetic Medicine, Johns Hopkins University (Baltimore, Md.) and National Center for Biotechnology Information, National Library of Medicine (Bethesda, Md.) 2000. World Wide Web URL: http://www.ncbi.nlm.nih.gov/omim/). If the putative chromosomal location of the Query overlapped with the chromosomal location of a Morbid Map entry, an OMIM identification number is provided in Table 1 A, column 9 labeled “OMIM Disease Reference(s)”. A key to the OMIM reference identification numbers is provided in Table 5.

[0037] Table 1B summarizes additional polynucleotides encompassed by the invention (including cDNA clones related to the sequences (Clone ID NO:Z), contig sequences (contig identifier (Contig ID:) contig nucleotide sequence identifiers (SEQ ID NO:X)), and genomic sequences (SEQ ID NO:B). The first column provides a unique clone identifier, “Clone ID NO:Z”, for a cDNA clone related to each contig sequence. The second column provides the sequence identifier, “SEQ ID NO:X”, for each contig sequence. The third column provides a unique contig identifier, “Contig ID:” for each contig sequence. The fourth column, provides a BAC identifier “BAC ID NO:A” for the BAC clone referenced in the corresponding row of the table. The fifth column provides the nucleotide sequence identifier, “SEQ ID NO:B” for a fragment of the BAC clone identified in column four of the corresponding row of the table. The sixth column, “Exon From-To”, provides the location (i.e., nucleotide position numbers) within the polynucleotide sequence of SEQ ID NO:B which delineate certain polynucleotides of the invention that are also exemplary members of polynucleotide sequences that encode polypeptides of the invention (e.g., polypeptides containing amino acid sequences encoded by the polynucleotide sequences delineated in column six, and fragments and variants thereof).

[0038] Table 2 summarizes homology and features of some of the polypeptides of the invention. The first column provides a unique clone identifier, “Clone ID NO:Z”, corresponding to a cDNA disclosed in Table 1A. The second column provides the unique contig identifier, “Contig ID:” corresponding to contigs in Table 1A and allowing for correlation with the information in Table 1A. The third column provides the sequence identifier, “SEQ ID NO:X”, for the contig polynucleotide sequences. The fourth column provides the analysis method by which the homology/identity disclosed in the row was determined. Comparisons were made between polypeptides encoded by the polynucleotides of the invention and either a non-redundant protein database (herein referred to as “NR”), or a database of protein families (herein referred to as “PFAM”) as further described below. The fifth column provides a description of PFAM/NR hits having significant matches to a polypeptide of the invention. Column six provides the accession number of the PFAM/NR hit disclosed in the fifth column. Column seven, “Score/Percent Identity”, provides a quality score or the percent identity, of the hit disclosed in column five. Columns 8 and 9, “NT From” and “NT To” respectively, delineate the polynucleotides in “SEQ ID NO:X” that encode a polypeptide having a significant match to the PFAM/NR database as disclosed in the fifth column. In specific embodiments, polypeptides of the invention comprise, or alternatively consist of, an amino acid sequence encoded by the polynucleotides in SEQ ID NO:X as delineated in columns 8 and 9, or fragments or variants thereof.

[0039] Table 3 provides polynucleotide sequences that may be disclaimed according to certain embodiments of the invention. The first column provides a unique clone identifier, “Clone ID NO:Z”, for a cDNA clone related to cardiovascular system associated contig sequences disclosed in Table 1A. The second column provides the sequence identifier, “SEQ ID NO:X”, for contig polynucleotide sequences disclosed in Table 1A. The third column provides the unique contig identifier, “Contig ID”, for contigs disclosed in Table 1A. The fourth column provides a unique integer ‘a’ where ‘a’ is any integer between 1 and the final nucleotide minus 15 of SEQ ID NO:X, represented as “Range of a”, and the fifth column provides a unique integer ‘b’ where ‘b’ is any integer between 15 and the final nucleotide of SEQ ID NO:X, represented as “Range of b”, where both a and b correspond to the positions of nucleotide residues shown in SEQ ID NO:X, and where b is greater than or equal to a+14. For each of the polynucleotides shown as SEQ ID NO:X, the uniquely defined integers can be substituted into the general formula of a-b, and used to describe polynucleotides which may be preferably excluded from the invention. In certain embodiments, preferably excluded from the polynucleotides of the invention (including polynucleotide fragments and variants as described herein and diagnostic and/or therapeutic uses based on these polynucleotides) are at least one, two, three, four, five, ten, or more of the polynucleotide sequence(s) having the accession number(s) disclosed in the sixth column of this Table (including for example, published sequence in connection with a particular BAC clone). In further embodiments, preferably excluded from the invention are the specific polynucleotide sequence(s) contained in the clones corresponding to at least one, two, three, four, five, ten, or more of the available material having the accession numbers identified in the sixth column of this Table (including for example, the actual sequence contained in an identified BAC clone).

[0040] Table 4 provides a key to the tissue/cell source identifier code disclosed in Table 1A, column 7. Column 1 provides the key to the tissue/cell source identifier code disclosed in Table 1A, Column 7. Columns 2-5 provide a description of the tissue or cell source. Codes corresponding to diseased tissues are indicated in column 6 with the word “disease”. The use of the word “disease” in column 6 is non-limiting. The tissue or cell source may be specific (e.g. a neoplasm), or may be disease-associated (e.g., a tissue sample from a normal portion of a diseased organ). Furthermore, tissues and/or cells lacking the “disease” designation may still be derived from sources directly or indirectly involved in a disease state or disorder, and therefore may have a further utility in that disease state or disorder. In numerous cases where the tissue/cell source is a library, column 7 identifies the vector used to generate the library.

[0041] Table 5 provides a key to the OMIMTM reference identification numbers disclosed in Table 1A, column 9. OMIM reference identification numbers (Column 1) were derived from Online Mendelian Inheritance in Man (Online Mendelian Inheritance in Man, OMIM™. McKusick-Nathans Institute for Genetic Medicine, Johns Hopkins University (Baltimore, Md.) and National Center for Biotechnology Information, National Library of Medicine, (Bethesda, Md.) 2000. World Wide Web URL: http://www.ncbi.nlm.nih.gov/omim/). Column 2 provides diseases associated with the cytologic band disclosed in Table 1A, column 8, as determined from the Morbid Map database.

[0042] Table 6 summarizes ATCC Deposits, Deposit dates, and ATCC designation numbers of deposits made with the ATCC in connection with the present application.

[0043] Table 7 shows the cDNA libraries sequenced, tissue source description, vector information and ATCC designation numbers relating to these cDNA libraries.

[0044] Table 8 provides a physical characterization of clones encompassed by the invention. The first column provides the unique clone identifier, “Clone ID NO:Z”, for certain cDNA clones of the invention, as described in Table 1A. The second column provides the size of the cDNA insert contained in the corresponding cDNA clone.

[0045] Definitions

[0046] The following definitions are provided to facilitate understanding of certain terms used throughout this specification.

[0047] In the present invention, “isolated” refers to material removed from its original environment (e.g., the natural environment if it is naturally occurring), and thus is altered “by the hand of man” from its natural state. For example, an isolated polynucleotide could be part of a vector or a composition of matter, or could be contained within a cell, and still be “isolated” because that vector, composition of matter, or particular cell is not the original environment of the polynucleotide. The term “isolated” does not refer to genomic or cDNA libraries, whole cell total or mRNA preparations, genomic DNA preparations (including those separated by electrophoresis and transferred onto blots), sheared whole cell genomic DNA preparations or other compositions where the art demonstrates no distinguishing features of the polynucleotide sequences of the present invention.

[0048] As used herein, a “polynucleotide” refers to a molecule having a nucleic acid sequence encoding SEQ ID NO:Y or a fragment or variant thereof, a nucleic acid sequence contained in SEQ ID NO:X (as described in column 3 of Table 1A) or the complement thereof, a cDNA sequence contained in Clone ID NO:Z (as described in column 1 of Table 1A and contained within a library deposited with the ATCC); a nucleotide sequence encoding the polypeptide encoded by a nucleotide sequence in SEQ ID NO:B as defined in column 6 of Table 1B or a fragment or variant thereof; or a nucleotide coding sequence in SEQ ID NO:B as defined in column 6 of Table 1B or the complement thereof. For example, the polynucleotide can contain the nucleotide sequence of the full length cDNA sequence, including the 5′ and 3′ untranslated sequences, the coding region, as well as fragments, epitopes, domains, and variants of the nucleic acid sequence. Moreover, as used herein, a “polypeptide” refers to a molecule having an amino acid sequence encoded by a polynucleotide of the invention as broadly defined (obviously excluding poly-Phenylalanine or poly-Lysine peptide sequences which result from translation of a polyA tail of a sequence corresponding to a cDNA).

[0049] As used herein, a “cardiovascular system antigen” refers collectively to any polynucleotide disclosed herein (e.g., a nucleic acid sequence contained in SEQ ID NO:X or the complement thereof, or cDNA sequence contained in Clone ID NO:Z, or a nucleotide sequence encoding the polypeptide encoded by a nucleotide sequence in SEQ ID NO:B as defined in column 6 of Table 1B, or a nucleotide coding sequence in SEQ ID NO:B as defined in column 6 of Table 1B or the complement thereof and fragments or variants thereof as described herein) or any polypeptide disclosed herein (e.g., an amino acid sequence contained in SEQ ID NO:Y, an amino acid sequence encoded by SEQ ID NO:X, or the complement thereof, an amino acid sequence encoded by the cDNA sequence contained in Clone ID NO:Z, an amino acid sequence encoded by SEQ ID NO:B, or the complement thereof, and fragments or variants thereof as described herein). These cardiovascular system antigens have been determined to be predominantly expressed in cardiovascular system tissues, including normal or diseased tissues (as shown in Table 1A column 7 and Table 4).

[0050] In the present invention, “SEQ ID NO:X” was often generated by overlapping sequences contained in multiple clones (contig analysis). A representative clone containing all or most of the sequence for SEQ ID NO:X is deposited at Human Genome Sciences, Inc. (HGS) in a catalogued and archived library. As shown, for example, in column 1 of Table 1A, each clone is identified by a cDNA Clone ID (identifier generally referred to herein as Clone ID NO:Z). Each Clone ID is unique to an individual clone and the Clone ID is all the information needed to retrieve a given clone from the HGS library. Furthermore, certain clones disclosed in this application have been deposited with the ATCC on Oct. 5, 2000, having the ATCC designation numbers PTA 2574 and PTA 2575; and on Jan. 5, 2001, having the depositor reference numbers TS-1, TS-2, AC-1, and AC-2. In addition to the individual cDNA clone deposits, most of the cDNA libraries from which the clones were derived were deposited at the American Type Culture Collection (hereinafter “ATCC”). Table 7 provides a list of the deposited cDNA libraries. One can use the Clone ID NO:Z to determine the library source by reference to Tables 6 and 7. Table 7 lists the deposited cDNA libraries by name and links each library to an ATCC Deposit. Library names contain four characters, for example, “HTWE.” The name of a cDNA clone (Clone ID NO:Z) isolated from that library begins with the same four characters, for example “HTWEP07”. As mentioned below, Table 1A correlates the Clone ID NO:Z names with SEQ ID NO:X. Thus, starting with an SEQ ID NO:X, one can use Tables 1A, 6 and 7 to determine the corresponding Clone ID NO:Z, which library it came from and which ATCC deposit the library is contained in. Furthermore, it is possible to retrieve a given cDNA clone from the source library by techniques known in the art and described elsewhere herein. The ATCC is located at 10801 University Boulevard, Manassas, Va. 20110-2209, USA. The ATCC deposits were made pursuant to the terms of the Budapest Treaty on the international recognition of the deposit of microorganisms for the purposes of patent procedure.

[0051] In specific embodiments, the polynucleotides of the invention are at least 15, at least 30, at least 50, at least 100, at least 125, at least 500, or at least 1000 continuous nucleotides but are less than or equal to 300 kb, 200 kb, 100 kb, 50 kb, 15 kb, 10 kb, 7.5 kb, 5 kb, 2.5 kb, 2.0 kb, or 1 kb, in length. In a further embodiment, polynucleotides of the invention comprise a portion of the coding sequences, as disclosed herein, but do not comprise all or a portion of any intron. In another embodiment, the polynucleotides comprising coding sequences do not contain coding sequences of a genomic flanking gene (i.e., 5′ or 3′ to the gene of interest in the genome). In other embodiments, the polynucleotides of the invention do not contain the coding sequence of more than 1000, 500, 250, 100, 50, 25, 20, 15, 10, 5, 4, 3, 2, or 1 genomic flanking gene(s).

[0052] A “polynucleotide” of the present invention also includes those polynucleotides capable of hybridizing, under stringent hybridization conditions, to sequences contained in SEQ ID NO:X, or the complement thereof (e.g., the complement of any one, two, three, four, or more of the polynucleotide fragments described herein), the polynucleotide sequence delineated in columns 8 and 9 of Table 2 or the complement thereof, and/or cDNA sequences contained in Clone ID NO:Z (e.g., the complement of any one, two, three, four, or more of the polynucleotide fragments, or the cDNA clone within the pool of cDNA clones deposited with the ATCC, described herein) and/or the polynucleotide sequence delineated in column 6 of Table 1B or the complement thereof. “Stringent hybridization conditions” refers to an overnight incubation at 42 degree C in a solution comprising 50% formamide, 5×SSC (750 mM NaCl, 75 mM trisodium citrate), 50 mM sodium phosphate (pH 7.6), 5×Denhardt's solution, 10% dextran sulfate, and 20 μg/ml denatured, sheared salmon sperm DNA, followed by washing the filters in 0.1×SSC at about 65 degree C.

[0053] Also contemplated are nucleic acid molecules that hybridize to the polynucleotides of the present invention at lower stringency hybridization conditions. Changes in the stringency of hybridization and signal detection are primarily accomplished through the manipulation of formamide concentration (lower percentages of formamide result in lowered stringency), salt conditions, or temperature. For example, lower stringency conditions include an overnight incubation at 37 degree C in a solution comprising 6×SSPE (20×SSPE =3M NaCl; 0.2 M NaH₂PO₄; 0.02 M EDTA, pH 7.4), 0.5% SDS, 30% formamide, 100 μg/ml salmon sperm blocking DNA; followed by washes at 50 degree C with 1×SSPE, 0.1% SDS. In addition, to achieve even lower stringency, washes performed following stringent hybridization can be done at higher salt concentrations (e.g. 5×SSC).

[0054] Note that variations in the above conditions may be accomplished through the inclusion and/or substitution of alternate blocking reagents used to suppress background in hybridization experiments. Typical blocking reagents include Denhardt's reagent, BLOTTO, heparin, denatured salmon sperm DNA, and commercially available proprietary formulations. The inclusion of specific blocking reagents may require modification of the hybridization conditions described above, due to problems with compatibility.

[0055] Of course, a polynucleotide which hybridizes only to polyA+ sequences (such as any 3′ terminal polyA+ tract of a cDNA shown in the sequence listing), or to a complementary stretch of T (or U) residues, would not be included in the definition of “polynucleotide,” since such a polynucleotide would hybridize to any nucleic acid molecule containing a poly (A) stretch or the complement thereof (e.g., practically any double-stranded cDNA clone generated using oligo dT as a primer).

[0056] The polynucleotide of the present invention can be composed of any polyribonucleotide or polydeoxribonucleotide, which may be unmodified RNA or DNA or modified RNA or DNA. For example, polynucleotides can be composed of single- and double-stranded DNA, DNA that is a mixture of single- and double-stranded regions, single- and double-stranded RNA, and RNA that is mixture of single- and double-stranded regions, hybrid molecules comprising DNA and RNA that may be single-stranded or, more typically, double-stranded or a mixture of single-and double-stranded regions. In addition, the polynucleotide can be composed of triple-stranded regions comprising RNA or DNA or both RNA and DNA. A polynucleotide may also contain one or more modified bases or DNA or RNA backbones modified for stability or for other reasons. “Modified” bases include, for example, tritylated bases and unusual bases such as inosine. A variety of modifications can be made to DNA and RNA; thus, “polynucleotide” embraces chemically, enzymatically, or metabolically modified forms.

[0057] The polypeptide of the present invention can be composed of amino acids joined to each other by peptide bonds or modified peptide bonds, i.e., peptide isosteres, and may contain amino acids other than the 20 gene-encoded amino acids. The polypeptides may be modified by either natural processes, such as posttranslational processing, or by chemical modification techniques which are well known in the art. Such modifications are well described in basic texts and in more detailed monographs, as well as in a voluminous research literature. Modifications can occur anywhere in a polypeptide, including the peptide backbone, the amino acid side-chains and the amino or carboxyl termini. It will be appreciated that the same type of modification may be present in the same or varying degrees at several sites in a given polypeptide. Also, a given polypeptide may contain many types of modifications. Polypeptides may be branched, for example, as a result of ubiquitination, and they may be cyclic, with or without branching. Cyclic, branched, and branched cyclic polypeptides may result from posttranslation natural processes or may be made by synthetic methods. Modifications include acetylation, acylation, ADP-ribosylation, amidaton, covalent attachment of flavin, covalent attachment of a heme moiety, covalent attachment of a nucleotide or nucleotide derivative, covalent attachment of a lipid or lipid derivative, covalent attachment of phosphotidylinositol, cross-linking, cyclization, disulfide bond formation, demethylation, formation of covalent cross-links, formation of cysteine, formation of pyroglutamate, formylation, gamma-carboxylation, glycosylation, GPI anchor formation, hydroxylation, iodination, methylation, myristoylation, oxidation, pegylation, proteolytic processing, phosphorylation, prenylation, racemization, selenoylation, sulfation, transfer-RNA mediated addition of amino acids to proteins such as arginylation, and ubiquitination. (See, for instance, PROTEINS—STRUCTURE AND MOLECULAR PROPERTIES, 2nd Ed., T. E. Creighton, W. H. Freeman and Company, New York (1993); POSTTRANSLATIONAL COVALENT MODIFICATION OF PROTEINS, B. C. Johnson, Ed., Academic Press, New York, pgs. 1-12 (1983); Seifter et al., Meth. Enzymol. 182:626-646 (1990); Rattan et al., Ann. N.Y. Acad. Sci. 663:48-62 (1992).)

[0058] “SEQ ID NO:X” refers to a polynucleotide sequence described, for example, in Tables 1A or 2, while “SEQ ID NO:Y” refers to a polypeptide sequence described in column 5 of Table 1A. SEQ ID NO:X is identified by an integer specified in column 3 of Table 1A. The polypeptide sequence SEQ ID NO:Y is a translated open reading frame (ORF) encoded by polynucleotide SEQ ID NO:X. “Clone ID NO:Z” refers to a cDNA clone described in column 1 of Table 1A.

[0059] “A polypeptide having biological activity” refers to a polypeptide exhibiting activity similar to, but not necessarily identical to, an activity of a polypeptide of the present invention, including mature forms, as measured in a particular biological assay, with or without dose dependency. In the case where dose dependency does exist, it need not be identical to that of the polypeptide, but rather substantially similar to the dose-dependence in a given activity as compared to the polypeptide of the present invention (i.e., the candidate polypeptide will exhibit greater activity or not more than about 25-fold less and, preferably, not more than about tenfold less activity, and most preferably, not more than about three-fold less activity relative to the polypeptide of the present invention).

[0060] Table 1A summarizes some of the polynucleotides encompassed by the invention (including contig sequences (SEQ ID NO:X) and clones (Clone ID NO:Z) and further summarizes certain characteristics of these polynucleotides and the polypeptides encoded thereby.

[0061] Polynucleotides and Polypeptides

TABLE 1A

| | | | | AA | | Tissue Distribution | | |
|---|---|---|---|---|---|---|---|---|
| | | | | SEQ | | Library code: count | | OMIM |
| Clone ID | Contig | SEQ ID | ORF | ID | | (see Table IV for | Cytologic | Disease |
| NO: Z | ID: | NO: X | (From-To) | NO: Y | Predicted Epitopes | Library Codes) | Band | Reference(s): |
| HAHCL07 | 952661 | 11 | 489-136 | 626 | Phe-16 to Cys-24, | L0471: 3, L0759: 2, | | |
| | | | | | Thr-49 to Asp-60. | L0459: 1, L0622. 1, | | |
| | | | | | | H0599: 1, H0196: 1, | | |
| | | | | | | L0662: 1, L0747: 1 and | | |
| | | | | | | L0604: 1. | | |
| HAHCP26 | 681258 | 12 | 2-403 | 627 | Val-18 to Glu-26, | H0599: 2 | | |
| | | | | | Val-43 to Gln-48, | | | |
| | | | | | Pro-576 to Asp-63. | | | |
| HAHCP41 | 712086 | 13 | 81-239 | 628 | Gly-13 to Glu-18. | H0599: 2 | | |
| HAHCP49 | 722659 | 14 | 1-234 | 629 | Tyr-24 to His-32, | H0599: 2 | | |
| | | | | | Asp-43 to Thr-48, | | | |
| | | | | | Ala-54 to Lys-59. | | | |
| HAHCP55 | 865095 | 15 | 62-250 | 630 | | H0599: 2 | | |
| HAHCP67 | 756916 | 16 | 2-262 | 631 | | H0599: 2 | 3p21.1 | 150250, |
| | | | | | | | | 164500, |
| | | | | | | | | 168468, |
| | | | | | | | | 182280, |
| | | | | | | | | 238310, |
| | | | | | | | | 600163, |
| | | | | | | | | 601226, |
| | | | | | | | | 601916 |
| HAHCP91 | 789998 | 17 | 163-288 | 632 | Ser-29 to Ala-38. | H0599: 2 | | |
| HAHCR57 | 865096 | 18 | 1-387 | 633 | Ala-6 to Ser-17, | H0599: 2 | | |
| | | | | | Ser-19 to Trp-24. | | | |
| HAHEE04 | 922257 | 19 | 2-346 | 634 | | H0599: 2 | | |
| HAHEE05 | 928673 | 20 | 3-422 | 635 | Asp-1 to Pro-10, | H0599: 2 and L0777: | | |
| | | | | | Thr-13 to Asn-20, | 1. | | |
| | | | | | His-28 to Gln-45, | | | |
| | | | | | Phe-56 to Ser-61, | | | |
| | | | | | Glu-63 to Pro-70, | | | |
| | | | | | Ser-98 to Ser-110, | | | |
| | | | | | Thr-115 to Ser-122, | | | |
| | | | | | Arg-130 to Gln-140. | | | |
| HAHE046 | 718772 | 21 | 85-222 | 636 | Arg-9 to Phe-14, | H0599: 3 | | |
| | | | | | Val-28 to Gln-35. | | | |
| HAHES10 | 961594 | 22 | 2-241 | 637 | Gly-1 to Asn-14, | H0599: 2 | | |
| | | | | | Val-20 to Ser-25, | | | |
| | | | | | Thr-46 to Gly-54. | | | |
| HAHFX20 | 925753 | 23 | 53-139 | 638 | Glu-1 to Ala-7. | H0599: 2 | | |
| HAHHE12 | 969107 | 24 | 88-804 | 639 | | H0373: 5, L0604: 4, | | |
| | | | | | | H0599: 2 and L0485: 1. | | |
| HAHHO04 | 925814 | 25 | 41-313 | 640 | Asp-18 to Asp-24, | H0599: 2 | | |
| | | | | | Pro-47 to Ser-53. | | | |
| HAHHS01 | 913863 | 26 | 44-181 | 641 | Ser-18 to Leu-28. | H0599: 2 | | |
| HAHIK10 | 961425 | 27 | 1-171 | 642 | Glu-3l to Leu-47. | H0599: 2 | | |
| HAHIW08 | 955803 | 28 | 16-312 | 643 | Tyr-4 to His-14, | H0599: 2 | | |
| | | | | | Thr-32 to Ala-38, | | | |
| | | | | | Pro-46 to Pro-51. | | | |
| HAHSC42 | 695111 | 29 | 3-440 | 644 | Pro-7 to Gly-21. | H0097: 1 and H0373: | | |
| | | | | | | 1. | | |
| HCMBA95 | 508774 | 30 | 138-293 | 645 | Ile-1 to Ala-12. | H0173: 1 and H0196: | | |
| | | | | | | 1. | | |
| HCMSC52 | 522615 | 31 | 32-88 | 646 | Glu-12 to Lys-17. | H0196: 2 | | |
| HCMSE09 | 530511 | 32 | 119-358 | 647 | Phe-10 to His-18. | H0196: 2 | | |
| HCMSQ77 | 862373 | 33 | 1-216 | 648 | Arg-1 to Pro-7. | H0196: 2 | | |
| HCMSS72 | 526183 | 34 | 1-174 | 649 | | H0196: 2 | | |
| HCMSU37 | 706337 | 35 | 1-312 | 650 | Ser-1 to Leu-6, | H0599: 1, H0196: 1 | | |
| | | | | | Lys-16 to Arg-23, | and L0485: 1. | | |
| | | | | | Gln-26 to Asn-42, | | | |
| | | | | | Ser-54 to Pro-66. | | | |
| HCMSX59 | 522598 | 36 | 3-173 | 651 | | H0230: 1 and H0196: | | |
| | | | | | | 1. | | |
| HELAF85 | 507230 | 37 | 63-266 | 652 | Cys-1 to Gly-7. | S0045: 2 | | |
| HELAI26 | 920922 | 38 | 79-216 | 653 | | S0045: 2 | | |
| HELAL34 | 527994 | 39 | 1-210 | 654 | Asn-3 to Gly-29. | S0045: 2 | | |
| HELAV61 | 507205 | 40 | 87-305 | 655 | Phe-2 to Thr-12, | S0045: 2 | | |
| | | | | | His-49 to Arg-62. | | | |
| HELBD08 | 960106 | 41 | 69-203 | 656 | | S0045: 2 | | |
| HELBD70 | 527677 | 42 | 5-166 | 657 | Pro-4 to Cys-10. | S0045: 2 | | |
| HELBK27 | 527669 | 43 | 35-163 | 658 | | S0045: 2 | | |
| HELBN45 | 527666 | 44 | 1-195 | 659 | Tyr-7 to Tyr-12, | S0045: 2 | | |
| | | | | | Asp-55 to Glu-61. | | | |
| HELBP62 | 527533 | 45 | 168-335 | 660 | Ser-1 to Cys-12. | S0045: 2 | | |
| HELDG77 | 750478 | 46 | 2-112 | 661 | Pro-6 to Ser-12. | S0045: 2 | | |
| HELDK12 | 766209 | 47 | 99-233 | 662 | | S0045: 2 | | |
| HELD056 | 531576 | 48 | 110-229 | 663 | Tyr-24 to Ile-30. | S0045: 2 | | |
| HELEA45 | 954371 | 49 | 3-143 | 664 | | S0045: 1 and H0196: 1. | | |
| HELEE09 | 531415 | 50 | 180-290 | 665 | Met-6 to Tyr-11. | S0045: 2 | | |
| HELEF52 | 506677 | 51 | 68-268 | 666 | | S0045: 2 | | |
| HELEQ47 | 577187 | 52 | 31-246 | 667 | | S0045: 2 | | |
| HELER30 | 574038 | 53 | 38-289 | 668 | Arg-22 to Leu-28. | S0045: 2 | | |
| HELEU12 | 574023 | 54 | 130-387 | 669 | | S0045: 2, L0748: 1 and | | |
| | | | | | | L0749: 1. | | |
| HELEU37 | 522407 | 55 | 38-145 | 670 | | S0045: 2 | | |
| HELEU73 | 574016 | 56 | 235-378 | 671 | | S0045: 2 | | |
| HELEU91 | 851160 | 57 | 101-337 | 672 | Leu-2 to Ser-8, | S0045: 2 | | |
| | | | | | Asn-34 to Phe-39, | | | |
| | | | | | Pro-41 to Tyr-46. | | | |
| HELEW62 | 574025 | 58 | 200-304 | 673 | | S0045: 2 | | |
| HELFF40 | 574058 | 59 | 66-152 | 674 | | S0045: 2 | | |
| HELFH33 | 576530 | 60 | 3-224 | 675 | | S0045: 1 and S0046: 1. | | |
| HELFJ03 | 921943 | 61 | 42-320 | 676 | Tyr-6 to Gln-14, | S0045: 2 | | |
| | | | | | Pro-17 to Ala-24. | | | |
| HBLFQ54 | 728888 | 62 | 3-440 | 677 | Gly-17 to Lys-32, | S0045: 2 | | |
| | | | | | Gly-38 to Tyr-43, | | | |
| | | | | | Pro-77 to His-82. | | | |
| HELFQ79 | 577248 | 63 | 126-371 | 678 | Asp-22 to Gly-27, | S0045: 3 | | |
| | | | | | Ala-36 to Leu-43, | | | |
| | | | | | Phe-58 to Trp-73. | | | |
| HELGA54 | 576374 | 64 | 12-440 | 679 | Pro-7 to Trp-15, | S0045: 2 | | |
| | | | | | Leu-17 to Cys-32. | | | |
| HELGC24 | 576377 | 65 | 56-247 | 680 | Arg-15 to Arg-24, | S0045: 2 | | |
| | | | | | Ser-39 to Val-47. | | | |
| HELGC32 | 699375 | 66 | 2-238 | 681 | Pro-10 to Ser-17, | L0455: 2, S0045: 1 and | | |
| | | | | | Ala-21 to Thr-26, | H0050: 1. | | |
| | | | | | Pro-60 to Leu-72. | | | |
| HELGC77 | 577317 | 67 | 72-242 | 682 | Ser-2 to Asp-14. | S0045: 2 | | |
| HELGG77 | 825795 | 68 | 312-527 | 683 | Lys-27 to Asn-45, | S0045: 1 and H0413: 1. | | |
| | | | | | Pro-62 to His-68. | | | |
| HELGH89 | 545009 | 69 | 338-3 | 684 | Arg-41 to Tyr-46, | AR050: 1, AR054: 1, | | |
| | | | | | Ile-92 to Asn-97. | AR051: 0 | | |
| | | | | | | S0045: 2 | | |
| | 553652 | 606 | 338-3 | 1221 | Arg-41 to Tyr-46, | | | |
| | | | | | Ile-92 to Asn-97. | | | |
| HELGN53 | 963160 | 70 | 180-368 | 685 | Arg-1 to Gly-6. | S0045: 1 and H0619: 1. | | |
| HELGP50 | 576339 | 71 | 27-197 | 686 | Arg-1 to Gly-7. | S0045: 2 | | |
| HELGQ48 | 851178 | 72 | 97-222 | 687 | | S0045: 2 | | |
| HELGT48 | 879483 | 73 | 312-647 | 688 | Arg-41 to Tyr-46, | S0045: 2 | | |
| | | | | | Ile-92 to Asn-97. | | | |
| HELGZ48 | 721742 | 74 | 1-348 | 689 | Pro-20 to Thr-26, | S0045: 1 and S0046: 1. | | |
| | | | | | Gln-62 to Thr-68, | | | |
| | | | | | Val-75 to Gln-83. | | | |
| HELHB12 | 970863 | 75 | 86-184 | 690 | | S0045: 1 and S0046: 1. | | |
| HELHC49 | 576292 | 76 | 40-228 | 691 | | S0045: 2 | | |
| HELHD46 | 719129 | 77 | 1-279 | 692 | | S0045: 1 and S0046: 1. | | |
| HELHF07 | 949067 | 78 | 65-340 | 693 | Thr-16 to Pro-21. | AR061: 5, AR089: 4 | | |
| | | | | | | S0045: 2 | | |
| HELHM29 | 883505 | 79 | 1-303 | 694 | | S0045: 2 | | |
| HEMBC56 | 577797 | 80 | 148-381 | 695 | Gly-33 to Ser-38. | S0046: 2 | | |
| HEMBI16 | 507220 | 81 | 23-169 | 696 | | S0046: 2 | | |
| HEMBZ84 | 527989 | 82 | 33-125 | 697 | | S0046: 2 | | |
| HEMCA89 | 527985 | 83 | 9-131 | 698 | | S0046: 2 | | |
| HEMCM25 | 948738 | 84 | 84-212 | 699 | | AR051: 22, AR054: | | |
| | | | | | | 20, AR050: 17 | | |
| | | | | | | S0046: 4 | | |
| HEMDG56 | 715834 | 85 | 1-120 | 700 | | S0046: 2 | | |
| HEMDG83 | 576508 | 86 | 231-452 | 701 | | S0046: 4 and L0754: 1. | | |
| HEMDK92 | 574278 | 87 | 124-303 | 702 | | S0046: 2, L0748: 1 and | | |
| | | | | | | L0755: 1. | | |
| HEMDM56 | 577251 | 88 | 94-252 | 703 | | S0045: 1 and S0046: 1. | | |
| HEMDO24 | 577297 | 89 | 101-391 | 704 | Asp-10 to Gln-20, | S0046: 2 | | |
| | | | | | Trp-27 to Ser-38, | | | |
| | | | | | Glu-54 to Lys-69. | | | |
| HEMEA72 | 527804 | 90 | 2-184 | 705 | Lys-16 to Phe-21. | S0046: 1 and H0268: 1. | | |
| HEMEH76 | 574345 | 91 | 2-211 | 706 | Pro-6 to Ser-16, | S0046: 2 | | |
| | | | | | Ala-33 to Ser-38. | | | |
| HEMEK19 | 574209 | 92 | 78-263 | 707 | Phe-48 to Gly-57. | AR089: 9, AR061: 3 | | |
| | | | | | | S0046: 2 | | |
| HEMEN63 | 578717 | 93 | 1-321 | 708 | Gly-1 to Lys-6, | S0046: 3 | | |
| | | | | | Arg-16 to Gly-27, | | | |
| | | | | | Pro-47 to Gly-67. | | | |
| HEMEU54 | 947801 | 94 | 3-371 | 709 | Ala-10 to Arg-17, | AR054: 126, AR050: | | |
| | | | | | Pro-74 to Val-79, | 108, AR051: 103 | | |
| | | | | | Gly-85 to Tyr-92, | S0046: 1 and H0619: 1. | | |
| | | | | | Pro-94 to Lys-100. | | | |
| HEMFL58 | 576505 | 95 | 3-221 | 710 | Gln-25 to Leu-30. | S0046: 2 | | |
| HEMFN33 | 702564 | 96 | 2-169 | 711 | Ala-A to Ser-10. | S0046: 2 | | |
| HEMFX20 | 840164 | 97 | 41-160 | 712 | Glu-1 to Lys-7. | S0045: 1 and S0046: 1. | | |
| HEMGL57 | 971118 | 98 | 3-182 | 713 | Pro-13 to Arg-19. | S0046: 2 | | |
| HEMGL58 | 578091 | 99 | 1-195 | 714 | | S0046: 1, H0050: 1 and 3 | | |
| | | | | | | L0743: 1. | | |
| HHBBA47 | 720472 | 100 | 30-179 | 715 | Arg-9 to Arg-22. | H0373: 2 | | |
| HHBBI11 | 959756 | 101 | 1-201 | 716 | Cys-11 to Thr-20, | H0373: 2 | | |
| | | | | | Ala-22 to Thr-30. | | | |
| HHBBK65 | 588062 | 102 | 242-343 | 717 | | H0373: 2 | | |
| HHBBL40 | 588066 | 103 | 98-274 | 718 | Asn-43 to Gly-51. | H0373: 2 | | |
| HHBBL53 | 588067 | 104 | 2-199 | 719 | Pro-1 to Leu-15, | H0373: 2 | | |
| | | | | | Lys-18 to Ala-25, | | | |
| | | | | | Glu-32 to Asp-49, | | | |
| | | | | | Ser-55 to Thr-66. | | | |
| HHBEA32 | 927399 | 105 | 1-159 | 720 | Pro-8 to Gly-17. | H0373: 2 | | |
| HHBEE70 | 697541 | 106 | 269-424 | 721 | | H0373: 2 | | |
| HHBEM70 | 756949 | 107 | 45-242 | 722 | | AR089: 3, AR061: 1 | | |
| | | | | | | H0373: 3 | | |
| HHBEN34 | 703745 | 108 | 278-382 | 723 | Ser-11 to Lys-21. | H0373: 2 | | |
| HHBFL31 | 800035 | 109 | 41-223 | 724 | | AR050: 51, AR054: | | |
| | | | | | | 43, AR051: 35 | | |
| | | | | | | H0373: 2 | | |
| HHBFW44 | 716283 | 110 | 49-117 | 725 | | H0373: 2 | | |
| HHBFW75 | 958692 | 111 | 100-423 | 726 | Thr-24 to Lys-30, | H0373: 2 | | |
| | | | | | Gln-33 to Glu-41. | | | |
| HHBGN42 | 698774 | 112 | 124-2 | 727 | Arg-12 to Asn-19. | H0373: 2 | | |
| HHBGN52 | 726391 | 113 | 2-229 | 728 | Pro-1 to Lys-6. | H0373: 3 | | |
| HHBGN68 | 752745 | 114 | 3-53 | 729 | Glu-10 to Gly-17. | H0373: 2 | | |
| HHBGR37 | 708457 | 115 | 139-306 | 730 | | H0373: 2 | | |
| HHBGT39 | 940578 | 116 | 2-67 | 731 | Lys-11 to Gly-18. | H0373: 2 | | |
| HHBGY59 | 792027 | 117 | 3-452 | 732 | | H0373: 2 | | |
| HHBHE83 | 780875 | 118 | 2-76 | 733 | Ala-3 to Arg-8. | H0373: 3 | | |
| HHBHK08 | 958649 | 119 | 146-301 | 734 | Gly-16 to Pro-24. | H0373: 2 | | |
| HHBHK84 | 858431 | 120 | 3-350 | 735 | Leu-16 to Gly-26, | H0373: 3 | | |
| | | | | | Pro-67 to Arg-78. | | | |
| HHBHO63 | 906947 | 121 | 179-310 | 736 | | H0373: 2 | | |
| HHBHP27 | 676601 | 122 | 79-414 | 737 | Ile-12 to Gln-30, | H0373: 2 | 10p12 | |
| | | | | | Tyr-57 to Ser-64. | | | |
| HHFBD39 | 826307 | 123 | 1-231 | 738 | Cys-51 to Arg-60. | H0050: 2 | | |
| HHFBD50 | 724763 | 124 | 301-146 | 739 | Asp-36 to Pro-48. | H0619: 1, H0050: 1, | | |
| | | | | | | L0748: 1 and L0759: 1. | | |
| | 858082 | 607 | 209-3 | 1222 | Gln-1 to Thr-35. | | | |
| HHFBF32 | 502872 | 125 | 69-179 | 740 | Glu-1 to Glu-8. | H0619: 1, H0050: 1 | | |
| | | | | | | and H0105: 1. | | |
| HHFBH26 | 502843 | 126 | 46-213 | 741 | Cys-34 to Ser-48. | H0050: 3 | | |
| HHFBI05 | 932961 | 127 | 3-188 | 742 | Gly-2 to Ser-9. | H0050: 3 | | |
| HHFBJ81 | 502954 | 128 | 56-196 | 743 | | H0050: 2 | | |
| HHFBL16 | 509237 | 129 | 147-362 | 744 | Gln-30 to Gly-49, | H0050: 2 | | |
| | | | | | Pro-52 to Arg-63. | | | |
| HHFBL30 | 509238 | 130 | 1-222 | 745 | Arg-18 to Pro-37. | H0050: 2 | | |
| HHFBL32 | 509233 | 131 | 82-228 | 746 | Ser-1 to Phe-12, | H0050: 2 | | |
| | | | | | Gly-37 to Lys-49. | | | |
| HHFBL36 | 707930 | 132 | 169-249 | 747 | | H0050: 3 | | |
| HHFBL39 | 509637 | 133 | 3-185 | 748 | Cys-1 to Arg-8, | H0050: 2 | | |
| | | | | | Pro-13 to Tyr-22. | | | |
| HHFBL60 | 739670 | 134 | 115-270 | 749 | | H0050: 2 | | |
| HHFBP60 | 503453 | 135 | 1-183 | 750 | Phe-31 to Tyr-51. | H0050: 2 | | |
| HHFBX77 | 959805 | 136 | 1-369 | 751 | Thr-19 to His-25, | H0050: 4 and H0619: | | |
| | | | | | Glu-58 to Lys-66, | 1. | | |
| | | | | | Ala-74 to Glu-84, | | | |
| | | | | | Asn-116 to Glu-123. | | | |
| HHFCA64 | 720849 | 137 | 287-207 | 752 | | H0050: 3 and H0619: | | |
| | | | | | | 1. | | |
| | 926760 | 608 | 69-260 | 1223 | | | | |
| HHFCF70 | 518435 | 138 | 2-379 | 753 | Glu-4 to Ser-16, | H0050: 2 | | |
| | | | | | Pro-41 to Gln-48, | | | |
| | | | | | Lys-55 to Ser-63, | | | |
| | | | | | Lys-109 to Leu-115. | | | |
| HHFCH59 | 526389 | 139 | 174-350 | 754 | Lys-35 to Arg-42. | H0050: 2 | | |
| HHFCI73 | 518427 | 140 | 150-1 | 755 | Lys-6 to Leu-12, | H0050: 2 | | |
| | | | | | Arg-24 to Gly-29, | | | |
| | | | | | Pro-32 to Cys-38, | | | |
| | | | | | Thr-42 to Asn-50. | | | |
| HHFCK71 | 781725 | 141 | 98-214 | 756 | H0050: 2 | | | |
| HHFCL91 | 509628 | 142 | 3-221 | 757 | | Asn-32 to Val-41, | H0050. 2 | |
| | | | | | Pro-52 to Ala-65. | | | |
| HHFCP67 | 536062 | 143 | 110-295 | 758 | | H0050: 2 | | |
| HHFCZ01 | 509163 | 144 | 165-287 | 759 | | H0050: 2 | | |
| HHFDA67 | 509387 | 145 | 16-294 | 760 | | H0050: 2 and H0645: | | |
| | | | | | | 1. | | |
| HHFDG32 | 502957 | 146 | 118-300 | 761 | Ser-4 to Ser-9, | H0050: 2 | | |
| | | | | | Phe-13 to Tyr-19. | | | |
| HHFDH02 | 921297 | 147 | 1-168 | 762 | Asn-1 to Asn-15. | H0050: 2 | | |
| HHFDH38 | 536551 | 148 | 3-293 | 763 | Thr-3 to Glu-9. | H0050: 2 | | |
| HHFDI07 | 954404 | 149 | 47-214 | 764 | Pro-24 to Asn-29. | H0050: 2 | | |
| HHFDI42 | 500877 | 150 | 3-152 | 765 | Arg-11 to Gly-16. | H0050: 2 | | |
| HHFDI62 | 745569 | 151 | 169-309 | 766 | | H0050: 2 | | |
| HHFDI66 | 573283 | 152 | 210-401 | 767 | | H0050: 2 | | |
| HHFDJ27 | 534909 | 153 | 166-378 | 768 | | H0242: 4 and H0050: | | |
| | | | | | | 1. | | |
| HHFDJ87 | 575105 | 154 | 60-293 | 769 | Val-13 to Arg-25, | H0050: 2 | | |
| | | | | | Ile-51 to Pro-56. | | | |
| HHFDM05 | 932863 | 155 | 218-427 | 770 | Thr-10 to Glu-27. | H0050: 2 | | |
| HHFEJ18 | 525616 | 156 | 30-134 | 771 | Gly-29 to Glu-35. | H0619: 1, H0050: 1 | | |
| | | | | | | and H0242: 1. | | |
| HHFEO24 | 525611 | 157 | 132-308 | 772 | Asn-10 to Ser-16. | H0050: 2 | | |
| HHFES51 | 525609 | 158 | 1-180 | 773 | Asn-1 to Gly-7, | H0050: 2 | | |
| | | | | | Lys-15 to Ser-20. | | | |
| HHFFG41 | 575009 | 159 | 2-121 | 774 | | H0050: 2 | | |
| HHFFO64 | 523769 | 160 | 191-316 | 775 | | H0050: 2 | | |
| HHFFO66 | 500910 | 161 | 77-217 | 776 | Ser-31 to Gly-41. | H0050: 3 | | |
| HHFFO96 | 894076 | 162 | 186-76 | 777 | Ser-1 to Ile-12. | H0619: 1 and H0050: | | |
| | | | | | | 1. | | |
| HHFFT69 | 662462 | 163 | 230-511 | 778 | Ser-72 to Val-81. | L0779: 2, L0731: 2, | | |
| | | | | | | H0002: 1, H0050: 1, | | |
| | | | | | | L0769: 1, L0637: 1, | | |
| | | | | | | L0809: 1 and L0745: 1. | | |
| HHFFX20 | 525617 | 164 | 45-116 | 779 | | H0050: 2 | | |
| HHFFX75 | 507394 | 165 | 115-261 | 780 | Gln-28 to Gln-34. | H0050: 1 and H0242: | | |
| | | | | | | 1. | | |
| HHFFY80 | 732614 | 166 | 124-399 | 781 | Asn-1 to Asn-9. | H0050: 2 | | |
| HHFFZ04 | 927869 | 167 | 269-514 | 782 | Asp-1 to Glu-6. | L0777: 3, H0050: 2 | 14q24-q32 | 107970, |
| | | | | | | and H0619: 1. | | 115650, |
| | | | | | | | | 123270, |
| | | | | | | | | 182600, |
| | | | | | | | | 245200, |
| | | | | | | | | 251600, |
| | | | | | | | | 270100, |
| | | | | | | | | 276900, |
| | | | | | | | | 602091 |
| HHFFZ19 | 509630 | 168 | 320-466 | 783 | Thr-25 to Gln-31. | H0050: 2 and H0266: | | |
| | | | | | | 1. | | |
| HHFGA21 | 573584 | 169 | 114-299 | 784 | | H0050: 2 | | |
| HHFGC14 | 741650 | 170 | 38-370 | 785 | Gln-1 to Asn-10. | AR089: 9, AR061: 5 | | |
| | | | | | | H0050: 2 | | |
| HHFGC69 | 573491 | 171 | 81-275 | 786 | | H0050: 2 | | |
| HHFGC93 | 576487 | 172 | 90-311 | 787 | | H0050: 2 | | |
| HHFGC95 | 795968 | 173 | 24-389 | 788 | Asn-34 to Glu-39. | H0050: 2 | | |
| HHFGE01 | 917137 | 174 | 2-406 | 789 | | H0050: 1 and H0105: | | |
| | | | | | | 1. | | |
| HHFGJ85 | 524890 | 175 | 183-293 | 790 | | H0050: 2 | | |
| HHFGM50 | 506635 | 176 | 111-311 | 791 | Gln-10 to Val-15, | H0050: 2 | | |
| | | | | | Arg-21 to Gly-29. | | | |
| HHFGN31 | 908508 | 177 | 93-230 | 792 | | AR089: 43, AR061: 5 | | |
| | | | | | | H0619: 1 and H0050: | | |
| | | | | | | 1. | | |
| HHFGN67 | 573509 | 178 | 68-184 | 793 | | H0050: 2 | | |
| HHFGP71 | 573860 | 179 | 120-263 | 794 | Val-18 to Glu-25. | H0050: 3 and H0619: | | |
| | | | | | | 1. | | |
| HHFGR35 | 573510 | 180 | 125-229 | 795 | | H0050: 2 and H0619: | | |
| | | | | | | 1. | | |
| HHFGS09 | 526331 | 181 | 3-257 | 796 | Leu-43 to Leu-53. | H0050: 2 | | |
| HHFGS40 | 888332 | 182 | 35-313 | 797 | Val-1 to His-9, | AR051: 2, AR054: 2, | | |
| | | | | | Gly-43 to Leu-49. | AR050: 2 | | |
| | | | | | | H0050: 3 | | |
| HHFGS92 | 871899 | 183 | 54-332 | 798 | | H0050: 2 | | |
| HHFGT10 | 968109 | 184 | 172-411 | 799 | | H0619: 1, H0645: 1 | | |
| | | | | | | and H0050: 1. | | |
| HHFGY13 | 573473 | 185 | 1-234 | 800 | Gly-1 to Gly-9, | H0050: 2 | | |
| | | | | | Gly-24 to Arg-33, | | | |
| | | | | | Thr-42 to Asp-47, | | | |
| | | | | | Asn-63 to Lys-68. | | | |
| HHFGY37 | 711364 | 186 | 133-414 | 801 | Gly-3 to Trp-25. | H0050: 2 | | |
| HHFGY75 | 573483 | 187 | 196-450 | 802 | | H0050: 2 | | |
| HHFGZ54 | 573477 | 188 | 33-143 | 803 | Pro-1 to Gly-9. | H0050: 2 | | |
| HHFGZ63 | 661248 | 189 | 132-281 | 804 | Glu-27 to Lys-38. | H0050: 2 | | |
| | 744984 | 609 | 470-228 | 1224 | | | | |
| HHFGZ69 | 918322 | 190 | 226-417 | 805 | Gly-7 to Pro-12. | H0619: 2 and H0050: | | |
| | | | | | | 1. | | |
| HHFHA44 | 573498 | 191 | 138-275 | 806 | Pro-31 to Lys-40. | H0050: 2 | | |
| HHFHC02 | 920510 | 192 | 1-216 | 807 | | H0050: 2 | | |
| HHFHC44 | 716763 | 193 | 3-227 | 808 | | H0050: 2 and L0748: | | |
| | | | | | | 1. | | |
| HHFHC57 | 573506 | 194 | 3-161 | 809 | | H0050: 2 | | |
| HHFHC72 | 766128 | 195 | 152-265 | 810 | Arg-8 to Gly-25. | H0050: 2 | | |
| HHFHE28 | 506630 | 196 | 139-327 | 811 | | H0050: 2 | | |
| HHFHE58 | 526391 | 197 | 316-525 | 812 | | H0050: 2 and L0748: | | |
| | | | | | | 1. | | |
| HHFHE76 | 506578 | 198 | 281-436 | 813 | | H0050: 2 and H0619: | | |
| | | | | | | 1. | | |
| HHFHF91 | 526396 | 199 | 1-366 | 814 | Gly-13 to Lys-32, | H0050: 2 | | |
| | | | | | Lys-47 to Glu-54, | | | |
| | | | | | Thr-90 to Arg-98. | | | |
| HHFHJ46 | 576949 | 200 | 1-513 | 815 | | S0045: 1, H0050: 1 and | | |
| | | | | | | L0749: 1. | | |
| HHFHJ72 | 575030 | 201 | 1-78 | 816 | | H0050: 1 and H0242: | | |
| | | | | | | 1. | | |
| HHFHM77 | 934027 | 202 | 2-187 | 817 | | H0619: 1 and H0050: | | |
| | | | | | | 1. | | |
| HHFHN54 | 506624 | 203 | 1-225 | 818 | Ser-12 to Leu-17. | H0050.2 | | |
| HHFHQ86 | 572923 | 204 | 231-353 | 819 | | H0050: 2 | | |
| HHFHU63 | 572871 | 205 | 52-300 | 820 | Ser-40 to Lys-45. | H0050: 2 | | |
| HHFHX11 | 967321 | 206 | 3-83 | 821 | | H0050: 2 | | |
| HHFHY47 | 720473 | 207 | 151-351 | 822 | | H0050: 2 and H0242: | | |
| | | | | | | 1. | | |
| HHFHY66 | 573294 | 208 | 155-319 | 823 | | H0050: 2 | | |
| HHFJC02 | 918318 | 209 | 78-296 | 824 | Arg-1 to Gly-10, | H0619: 2 | | |
| | | | | | Pro-44 to Trp-49, | | | |
| | | | | | Ser-58 to Val-64. | | | |
| HHFJI11 | 883731 | 210 | 2-298 | 825 | Leu-2 to Gln-11. | H0619: 2 | | |
| HHFJL11 | 965931 | 211 | 56-202 | 826 | | H0619: 3 | | |
| HHFJM56 | 857990 | 212 | 26-268 | 827 | | H0619: 2 | | |
| HHFJN01 | 913798 | 213 | 1-312 | 828 | Asn-28 to Gln-33. | H0619: 1 and H0050: | | |
| | | | | | | 1. | | |
| HHFJN02 | 918358 | 214 | 23-226 | 829 | | H0619: 1 and H0050: | | |
| | | | | | | 1. | | |
| HHFJO06 | 934168 | 215 | 271-453 | 830 | | H0619: 2 and H0050: | | |
| | | | | | | 1. | | |
| HHFJO12 | 969624 | 216 | 46-162 | 831 | | H0619: 1 and H0645: | | |
| | | | | | | 1. | | |
| HHFJR06 | 934093 | 217 | 25-243 | 832 | Gly-66 to Asp-73. | H0619: 2 | | |
| HHFJX18 | 907658 | 218 | 154-342 | 833 | Pro-S to Lys-15. | H0619: 2 | | |
| HHFKB03 | 922803 | 219 | 58-318 | 834 | Gly-66 to Gly-71, | H0619: 2 | | |
| | | | | | Ser-79 to Pro-87. | | | |
| HHFKC28 | 857948 | 220 | 44-271 | 835 | | H0619: 1 and H0050: | | |
| | | | | | | 1. | | |
| HHFKC43 | 906903 | 221 | 171-404 | 836 | Cys-26 to Thr-31. | H0619: 3, L0749: 3 | | |
| | | | | | | and L0748: 1. | | |
| HHFKE05 | 920550 | 222 | 335-472 | 837 | Gln-4 to Trp-12. | H0619: 1 and H0050: | | |
| | | | | | | 1. | | |
| HHFKH82 | 857810 | 223 | 91-336 | 838 | | H0619: 1 and H0645: | | |
| | | | | | | 1. | | |
| HHFKI02 | 918288 | 224 | 83-268 | 839 | | H0619: 3 | | |
| HHFKJ68 | 934045 | 225 | 22-321 | 840 | Pro-3 to Thr-9, | H0619: 3 | | |
| | | | | | Cys-34 to Leu-41, | | | |
| | | | | | Pro-49 to Arg-56. | | | |
| HHFKK95 | 952082 | 226 | 340-510 | 841 | | H0619: 3 | | |
| HHFKM10 | 963184 | 227 | 55-324 | 842 | Ser-15 to Arg-20, | H0619: 3 | | |
| | | | | | Gly-31 to Ala-47, | | | |
| | | | | | Arg-69 to Gly-77. | | | |
| HHFKU12 | 887244 | 228 | 2-229 | 843 | Arg-16 to Gly-21, | L0748: 3 and H0619: | | |
| | | | | | Gly-33 to Met-39, | 2. | | |
| | | | | | Glu-71 to His-76. | | | |
| HHFKU44 | 857923 | 229 | 239-529 | 844 | Glu-15 to Gly-24. | H0619: 3 | | |
| HHFKX11 | 965874 | 230 | 155-331 | 845 | Thr-53 to Phe-58. | H0619: 2 | | |
| HHFKY11 | 965876 | 231 | 121-315 | 846 | Ser-10 to Trp-18, | H0619: 2 | | |
| | | | | | Arg-20 to Cys-27. | | | |
| HHFLA69 | 933869 | 232 | 47-211 | 847 | | H0619: 1 and H0645: | | |
| | | | | | | 1. | | |
| HHFLH34 | 857907 | 233 | 2-334 | 848 | Glu-45 to Gln-52, | H0619: 1 and H0645: | | |
| | | | | | Asp-78 to Leu-85. | 1. | | |
| HHFLM06 | 933868 | 234 | 147-359 | 849 | Asn-37 to Gln-46, | H0619: 1 and H0645: | | |
| | | | | | Asp-50 to Gly-65. | 1. | | |
| HHFLP28 | 857888 | 235 | 1-204 | 850 | His-8 to Ser-19. | H0619: 2 | | |
| HHFLU04 | 870085 | 236 | 127-366 | 851 | Asn-1 to Glu-7, | H0619: 2 and H0050: | | |
| | | | | | Glu-13 to Cys-18. | 1. | | |
| HHFMA58 | 853959 | 237 | 2-202 | 852 | | H0619: 2 | | |
| HHFMB01 | 914951 | 238 | 3-179 | 853 | Asp-1 to Glu-7, | H0619: 2 | | |
| | | | | | Leu-32 to Trp-37. | | | |
| HHFME70 | 926497 | 239 | 128-265 | 854 | Gln-6 to Arg-22. | H0619: 2 | | |
| HHFMH85 | 872838 | 240 | 2-256 | 855 | Pro-5 to Pro-12. | H0619: 2 | | |
| HHFMI58 | 857856 | 241 | 1-372 | 856 | Thr-1 to Gly-14, | H0619: 2 and L0534: | | |
| | | | | | Pro-40 to His-48, | 1. | | |
| | | | | | Thr-50 to Gly-72, | | | |
| | | | | | His-74 to Glu-87. | | | |
| HHFMO03 | 922708 | 242 | 319-426 | 857 | Arg-29 to Lys-36. | H0619: 3, L0766: 3, | | |
| | | | | | | H0645: 1, H0050: 1 and | | |
| | | | | | | L0439: 1. | | |
| HHFM094 | 957955 | 243 | 52-204 | 858 | Leu-11 to Cys-17. | H0645: 3 and H0619: | | |
| | | | | | | 1. | | |
| HHFMQ70 | 840039 | 244 | 97-177 | 859 | Asn-16 to Pro-27. | H0619: 2 | | |
| HHFMZ40 | 974299 | 245 | 269-475 | 860 | Gln-44 to Pro-49, | H0619: 2 | | |
| | | | | | Asn-51 to Ser-57. | | | |
| HHFNA49 | 914838 | 246 | 120-263 | 861 | | H0619: 2 | | |
| HHEND10 | 963140 | 247 | 188-451 | 862 | Leu-16 to Leu-32. | H0619: 2 | | |
| HHFNF41 | 857825 | 248 | 1-357 | 863 | | H0619: 2 | | |
| HHFNI49 | 857850 | 249 | 1-192 | 864 | Ser-17 to Ser-24. | H0619: 2 and H0050: | | |
| | | | | | | 1. | | |
| HHFOC27 | 857816 | 250 | 216-404 | 865 | | H0645: 1 and H0050: | | |
| | | | | | | 1. | | |
| HHFOC66 | 857955 | 251 | 1-240 | 866 | Pro-19 to His-27, | H0619: 1 and H0645: | 11q13 | 102200, |
| | | | | | Pro-41 to Gln-54. | 1. | | 106100, |
| | | | | | | | | 131100, |
| | | | | | | | | 131100, |
| | | | | | | | | 131100, |
| | | | | | | | | 133780, |
| | | | | | | | | 147050, |
| | | | | | | | | 153700, |
| | | | | | | | | 161015, |
| | | | | | | | | 164009, |
| | | | | | | | | 168461, |
| | | | | | | | | 168461, |
| | | | | | | | | 168461, |
| | | | | | | | | 180721, |
| | | | | | | | | 180840, |
| | | | | | | | | 191181, |
| | | | | | | | | 193235, |
| | | | | | | | | 209901, |
| | | | | | | | | 232600, |
| | | | | | | | | 259700, |
| | | | | | | | | 259770, |
| | | | | | | | | 600045, |
| | | | | | | | | 600319, |
| | | | | | | | | 600528, |
| | | | | | | | | 601884 |
| HHFOF07 | 952062 | 252 | 83-160 | 867 | | H0645: 1 and H0050: | | |
| | | | | | | 1. | | |
| HHFOF40 | 930839 | 253 | 106-327 | 868 | | H0645: 3 | | |
| HHFOJ05 | 930856 | 254 | 93-239 | 869 | Cys-5 to Val-11. | H0645: 1 and H0050: | | |
| | | | | | | 1. | | |
| HHFON08 | 957974 | 255 | 2-154 | 870 | | H0645: 2 | | |
| HHFON15 | 857792 | 256 | 68-259 | 871 | | H0645: 2 | | |
| HHFON19 | 910891 | 257 | 250-825 | 872 | Thr-136 to Cys-141. | AR089: 19, AR061: 17 | | |
| | | | | | | H0645: 2 and H0050: | | |
| | | | | | | 1. | | |
| HHFON32 | 858034 | 258 | 111-398 | 873 | Lys-39 to Ser-49. | H0645: 3, H0050: 1 | | |
| | | | | | | and H0105: 1. | | |
| HHFON87 | 857783 | 259 | 1-273 | 874 | Pro-8 to Arg-15. | H0645: 2 and L0529: | | |
| | | | | | | 1. | | |
| HHFOW08 | 857772 | 260 | 351-202 | 875 | | H0645: 1 and H0050: | | |
| | | | | | | 1. | | |
| HHFSB02 | 921364 | 261 | 3-191 | 876 | Pro-43 to Tyr-49. | H0050: 2 and H0105: | | |
| | | | | | | 1. | | |
| HHFTC88 | 500903 | 262 | 357-190 | 877 | | H0050: 1 and H0233: | | |
| | | | | | | 1. | | |
| HHFUB15 | 534520 | 263 | 81-314 | 878 | Ala-32 to Asp-39. | H0242: 4 | | |
| HHFUB23 | 928063 | 264 | 101-250 | 879 | Leu-3 to Phe-11. | H0242: 2 | | |
| HHFUB77 | 772691 | 265 | 76-195 | 880 | | H0242: 2 | | |
| HHFUC24 | 524840 | 266 | 81-317 | 881 | | H0242: 2 | | |
| HHFUC26 | 960331 | 267 | 136-381 | 882 | Lys-48 to Ser-53. | H0242: 2 and H0645: | | |
| | | | | | | 1. | | |
| HHFUC42 | 525603 | 268 | 221-325 | 883 | | H0242: 2, L0789: 2, | | |
| | | | | | | L0805: 1, L0776: 1 and | | |
| | | | | | | L0530: 1. | | |
| HHFUC45 | 525600 | 269 | 1-162 | 884 | Thr-1 to Gly-9. | H0242: 2 | | |
| HHFUC47 | 525599 | 270 | 194-75 | 885 | | H0242: 2 | | |
| HHFUC83 | 507459 | 271 | 1-174 | 886 | Arg-13 to Cys-20. | H0242: 2 | | |
| HHFUC92 | 507018 | 272 | 48-245 | 887 | | H0242: 2 and H0050: | | |
| | | | | | | 1. | | |
| HHFUK58 | 525604 | 273 | 43-168 | 888 | Gly-2 to Cys-8, | H0242: 2 | | |
| | | | | | Pro-17 to Lys-27. | | | |
| HHFUL75 | 675569 | 274 | 1-237 | 889 | Thr-4 to Ala-9, | H0050: 1, H0242: 1 | | |
| | | | | | His-40 to Ala-51, | and H0373: 1. | | |
| | | | | | Glu-53 to Leu-58. | | | |
| HHFUN56 | 530953 | 275 | 1-222 | 890 | | H0050: 1 and H0242: | | |
| | | | | | | 1. | | |
| HMEBA75 | 530303 | 276 | 1-159 | 891 | Arg-1 to Gln-10. | S0045: 1 and H0267: 1. | | |
| HMEBY61 | 947868 | 277 | 29-193 | 892 | | T0049: 1 and H0267: | | |
| | | | | | | 1. | | |
| HMEDF58 | 738427 | 278 | 284-493 | 893 | | S0045: 1 and H0266. 1. | | |
| HMEDR48 | 529173 | 279 | 3-134 | 894 | | H0266: 2 | | |
| HMEEF64 | 918746 | 280 | 2-229 | 895 | Ser-8 to Arg-13, | S0045: 1 and H0266: 1. | | |
| | | | | | Gln-19 to Gln-30. | | | |
| HMEEX61 | 742085 | 281 | 44-361 | 896 | Lys-6l to Leu-68. | H0050: 1, H0266: 1 | | |
| | | | | | | and L0362: 1. | | |
| HMEFR17 | 664438 | 282 | 3-473 | 897 | Asp-11 to Thr-35. | H0266: 2 and L0742: | | |
| | | | | | | 2. | | |
| HMEFX12 | 661951 | 283 | 16-186 | 898 | Pro-1 to Pro-11, | H0266: 2 | | |
| | | | | | Ala-15 to Pro-21, | | | |
| | | | | | Pro-29 to Asp-34. | | | |
| HMEGB93 | 573814 | 284 | 3-365 | 899 | His-1 to Asn-10, | H0266: 2 | 1p35-p134 | 118210, |
| | | | | | Ile-25 to Asn-38, | | | 120550, |
| | | | | | Gly-60 to Ile-66. | | | 120570, |
| | | | | | | | | 120575, |
| | | | | | | | | 121800, |
| | | | | | | | | 130500, |
| | | | | | | | | 133200, |
| | | | | | | | | 138140, |
| | | | | | | | | 138971, |
| | | | | | | | | 168360, |
| | | | | | | | | 171760, |
| | | | | | | | | 171760, |
| | | | | | | | | 172411, |
| | | | | | | | | 176100, |
| | | | | | | | | 176100, |
| | | | | | | | | 178300, |
| | | | | | | | | 185470, |
| | | | | | | | | 230000, |
| | | | | | | | | 230350, |
| | | | | | | | | 255800, |
| | | | | | | | | 602771 |
| HMEGF48 | 573821 | 285 | 74-256 | 900 | | H0266: 2 | | |
| HMEGG44 | 796421 | 286 | 15-176 | 901 | Cys-12 to Trp-18. | H0266: 2 and L0740: | | |
| | | | | | | 1. | | |
| HMEGH46 | 887791 | 287 | 1-315 | 902 | Asp-13 to Asp-19, | AR054: 29, AR051: | | |
| | | | | | Lys-76 to Asn-83. | 12, AR061: 6, AR089: | | |
| | | | | | | 3, AR050: 2 | | |
| | | | | | | H0196: 1 and H0266: | | |
| | | | | | | 1. | | |
| HMEGI07 | 953815 | 288 | 9-272 | 903 | | H0266: 2, S0046: 1, | | |
| | | | | | | L0776: 1 and L0754: 1. | | |
| HMEIG42 | 931114 | 289 | 35-406 | 904 | Ala-8 to Arg-17, | H0266: 2 | | |
| | | | | | Val-43 to Gln-56, | | | |
| | | | | | Ser-73 to Met-89. | | | |
| HMEIM40 | 523589 | 290 | 61-219 | 905 | Lys-5 to Ser-14. | H0266: 2 | | |
| HMEIU49 | 722988 | 291 | 99-284 | 906 | | H0266: 2 | | |
| HMEIW23 | 682863 | 292 | 1-276 | 907 | Gly-36 to Ser-45, | H0266: 2 | | |
| | | | | | Pro-87 to Ser-92. | | | |
| HMEJD13 | 657231 | 293 | 2-271 | 908 | Ala-1 to Pro-11. | S0046: 1 and H0266: 1. | | |
| HMEJJ84 | 781983 | 294 | 8-136 | 909 | Ile-1 to Gly-13, | H0266: 2 | | |
| | | | | | Asn-18 to Ser-29. | | | |
| HMEJU60 | 740392 | 295 | 33-191 | 910 | Glu-21 to Leu-29. | H0266: 2 | | |
| HMEKA53 | 711664 | 296 | 76-183 | 911 | | H0266: 3 | | |
| HMEKJ43 | 715893 | 297 | 136-381 | 912 | Leu-1 to Leu-13, | H0266: 2 and L0744: | | |
| | | | | | Gln-55 to Pro-60. | 1. | | |
| HMEKS76 | 767517 | 298 | 3-221 | 913 | His-1 to Arg-9, | H0266: 2 | | |
| | | | | | Arg-23 to Ser-32, | | | |
| | | | | | Gln-39 to Lys-46, | | | |
| | | | | | Gly-53 to Gly-58, | | | |
| | | | | | Glu-64 to Asn-73. | | | |
| HMEKX51 | 727154 | 299 | 198-314 | 914 | | H0266: 2 | | |
| HMEKX89 | 786055 | 300 | 1-75 | 915 | Ala-7 to Arg-15. | S0045: 1 and H0266: 1. | | |
| HMELC56 | 745773 | 301 | 2-319 | 916 | Ala-1 to Lys-6, | H0266: 2. | | |
| | | | | | Lys-75 to His-84. | | | |
| HMELQ62 | 719681 | 302 | 40-372 | 917 | | H0266: 2 | | |
| HMELR10 | 964629 | 303 | 208-336 | 918 | | H0266: 2 | | |
| HMELS59 | 720341 | 304 | 135-305 | 919 | | H0266: 2 | | |
| HMELV19 | 668665 | 305 | 13-279 | 920 | Ser-1 to Gly-8, | H0266: 2 | | |
| | | | | | Asn-39 to Ala-45. | | | |
| HULAF89 | 791261 | 306 | 1-99 | 921 | | H0530: 2 | | |
| HULAI37 | 708923 | 307 | 72-173 | 922 | Leu-9 to Lys-34. | AR061: 0, AR089: 0 | | |
| | | | | | | H0530: 6 | | |
| HULAX31 | 868930 | 308 | 1-219 | 923 | | H0530: 2 | | |
| HULBU59 | 636253 | 309 | 1-234 | 924 | | H0530: 2 | | |
| HULBY15 | 659557 | 310 | 211-387 | 925 | Glu-4 to Gly-10, | H0530: 3 | | |
| | | | | | Leu-47 to Lys-54. | | | |
| HULDF69 | 754381 | 311 | 123-257 | 926 | Lys-14 to Lys-20, | H0530: 2 | | |
| | | | | | Lys-25 to Gly-42. | | | |
| HULFA03 | 918691 | 312 | 92-379 | 927 | Leu-36 to Phe-55, | H0530: 2 | | |
| | | | | | Lys-61 to Phe-68. | | | |
| HULFB76 | 767873 | 313 | 37-150 | 928 | | AR089: 1, AR061: 1 | | |
| | | | | | | H0530: 3 | | |
| HUMBE61 | 838469 | 314 | 1-414 | 929 | | H0531: 2 and H0530: | | |
| | | | | | | 2. | | |
| HUSAY26 | 527909 | 315 | 263-373 | 930 | | H0268: 2 and L0666: | | |
| | | | | | | 1. | | |
| HUSCA57 | 527800 | 316 | 142-264 | 931 | | H0268: 2 | | |
| HUSCD26 | 527799 | 317 | 127-255 | 932 | | H0268: 2 | | |
| HUSCH45 | 507197 | 318 | 121-273 | 933 | | H0268: 2 | | |
| HUSCH77 | 527801 | 319 | 1-129 | 934 | | H0268: 2 | | |
| HUSGH88 | 871776 | 320 | 41-298 | 935 | Asn-30 to Trp-36, | L0740: 3, H0413: 2, | | |
| | | | | | Ser-63 to Ser-69. | L0777: 2, T0048: 1, | | |
| | | | | | | H0412: 1 and L0757: 1. | | |
| HUSGK23 | 675951 | 321 | 102-239 | 936 | | S0045: 1, H0268: 1 and | 15q15 | 177070, |
| | | | | | | H0412: 1. | | 177070, |
| | | | | | | | | 182500, |
| | | | | | | | | 218000, |
| | | | | | | | | 227220, |
| | | | | | | | | 243500, |
| | | | | | | | | 600839, |
| | | | | | | | | 601800 |
| HUSGL13 | 575798 | 322 | 2-169 | 937 | Ala-3 to Ser-10, | H0412: 2 | | |
| | | | | | Arg-24 to Trp-33. | | | |
| HUSHH64 | 576459 | 323 | 1-126 | 938 | Trp-25 to Trp-42. | H0437: 3 | | |
| HUSHJ55 | 576381 | 324 | 2-337 | 939 | | H0437: 2 | 1p36 | 118210, |
| | | | | | | | | 120550, |
| | | | | | | | | 120570, |
| | | | | | | | | 120575, |
| | | | | | | | | 121800, |
| | | | | | | | | 130500, |
| | | | | | | | | 133200, |
| | | | | | | | | 155600, |
| | | | | | | | | 171760, |
| | | | | | | | | 171760, |
| | | | | | | | | 185470, |
| | | | | | | | | 211420, |
| | | | | | | | | 230350, |
| | | | | | | | | 255800, |
| | | | | | | | | 601990, |
| | | | | | | | | 602023, |
| | | | | | | | | 602771 |
| HUSHL83 | 868883 | 325 | 181-348 | 940 | Glu-42 to Val-47. | H0437: 1 and H0268: | | |
| | | | | | | 1. | | |
| HUSIA38 | 709472 | 326 | 79-282 | 941 | Ala-49 to Gln-56. | H0412: 2 | | |
| HUSIA43 | 575768 | 327 | 28-249 | 942 | Asn-28 to Asp-33. | H0412: 2 | | |
| HUSIF23 | 862494 | 328 | 169-447 | 943 | Lys-1 to Thr-10, | S0005: 1 and H0412: 1. | 2q13.2- | 188826, |
| | | | | | Ala-20 to Val-25. | | q13.31 | 250100, |
| | | | | | | | | 250800, |
| | | | | | | | | 250800 |
| HUSIS60 | 727153 | 329 | 2-235 | 944 | Ala-47 to Trp-54. | H0266: 1 and H0412: | | |
| | | | | | | 1. | | |
| HUSIW10 | 963324 | 330 | 59-322 | 945 | | H0412: 2 | | |
| HUSJW78 | 772956 | 331 | 3-188 | 946 | Asn-6 to Arg-14. | H0412: 2 | | |
| HUSKI76 | 914084 | 332 | 3-230 | 947 | Pro-65 to Gly-73. | H0412: 2 | | |
| HUSXK92 | 848959 | 333 | 221-487 | 948 | Trp-1 to Asp-13, | H0413: 2, L0754: 1, | | |
| | | | | | Ser-23 to Arg-28, | L0747: 1 and L0588: 1. | | |
| | | | | | Pro-44 to Arg-60, | | | |
| | | | | | Leu-79 to Lys-89. | | | |
| HUSX030 | 973266 | 334 | 203-463 | 949 | Met-9 to Ser-16, | H0412: 1, H0413: 1 | | |
| | | | | | Pro-24 to Asn-29. | and L0749: 1. | | |
| HUSYA63 | 928021 | 335 | 158-442 | 950 | | H0412: 1 and H0413: | | |
| | | | | | | 1. | | |
| HUSYB16 | 868843 | 336 | 3-308 | 951 | Ser-24 to Thr-29, | H0413: 2 | | |
| | | | | | Asn-58 to Arg-63. | | | |
| HUSYD15 | 699195 | 337 | 106-279 | 952 | Trp-16 to Leu-21. | H0266: 1 and H0413: | | |
| | | | | | | 1. | | |
| HUSYO46 | 868827 | 338 | 190-447 | 953 | Lys-1 to Leu-10, | H0413: 2 | | |
| | | | | | Pro-43 to Gln-48, | | | |
| | | | | | Thr-63 to Gly-69, | | | |
| | | | | | Asn-76 to Arg-86. | | | |
| HUSYP67 | 575787 | 339 | 2-118 | 954 | Arg-1 to Ser-7, | H0413: 2 | | |
| | | | | | Glu-32 to Glu-37. | | | |
| HUSZV72 | 851170 | 340 | 142-399 | 955 | | S0045: 1, H0413: 1, | | |
| | | | | | | L0756: 1 and L0588: 1. | | |
| HUSZH03 | 922852 | 341 | 13-714 | 956 | | L0754: 3 and H0413: | | |
| | | | | | | 1. | | |
| HUSYX03 | 922840 | 342 | 272-397 | 957 | Leu-16 to Gln-21. | H0413: 1, L0438: 1 | | |
| | | | | | | and L0439: 1. | | |
| HUSYO86 | 784691 | 343 | 189-362 | 958 | Glu-50 to Pro-58. | H0413: 1 and L0747: | | |
| | | | | | | 1. | | |
| HUSYN33 | 651293 | 344 | 189-371 | 959 | Cys-34 to Gly-41. | H0413: 1 and L0439: | | |
| | | | | | | 1. | | |
| HUSYN11 | 943237 | 345 | 133-360 | 960 | Pro-2l to Lys-63. | AR089: 11, AR061: 9 | | |
| | | | | | | H0413: 1 | | |
| HUSYM49 | 723015 | 346 | 1-159 | 961 | | H0413: 1 | | |
| HUSYM37 | 464221 | 347 | 2-211 | 962 | | H0413: 1 | | |
| HUSYI13 | 657288 | 348 | 524-670 | 963 | | L0439: 7, L0759: 4, | | |
| | | | | | | L0803: 2, L0438: 2, | | |
| | | | | | | L0740: 2, L0751: 2, | | |
| | | | | | | L0758: 2, H0413: 1, | | |
| | | | | | | L0776: 1, L0367: 1, | | |
| | | | | | | L0790: 1, L0666: 1, | | |
| | | | | | | L0747: 1 and L0777: 1. | | |
| HUSYG24 | 677258 | 349 | 53-277 | 964 | | L0439: 2, L0756: 2 and | | |
| | | | | | | H0413: 1. | | |
| HUSYF74 | 554723 | 350 | 92-328 | 965 | | L0439: 2, L0752: 2 and | | |
| | | | | | | H0413: 1. | | |
| HUSYA27 | 934423 | 351 | 459-638 | 966 | Lys-47 to Lys-58. | L0717: 1, H0413: 1, | | |
| | | | | | | L0748: 1, L0749: 1, | | |
| | | | | | | L0779: 1, L0759: 1, | | |
| | | | | | | L0608: 1, L0593: 1 and | | |
| | | | | | | L0595: 1. | | |
| HUSXW61 | 741856 | 352 | 386-559 | 967 | | L0740: 2 and H04l3: | | |
| | | | | | | 1. | | |
| HUSXM28 | 703326 | 353 | 1-372 | 968 | Pro-9 to Gln-22. | L0748: 2 and H0413: | | |
| | | | | | | 1. | | |
| HUSXI71 | 760415 | 354 | 3-83 | 969 | | H0413: 1 and L0748: | | |
| | | | | | | 1. | | |
| HUSXH57 | 859907 | 355 | 3-347 | 970 | | H0413: 1 and L0747: | | |
| | | | | | | 1. | | |
| HUSKA86 | 784887 | 356 | 2-229 | 971 | | L0748: 2 and H0412: | 8q22.3-q23.1 | 216550 |
| | | | | | | 1. | | |
| HUSKA65 | 868860 | 357 | 3-329 | 972 | Gly-53 to Ile-59. | H0412: 1 and L0367: | | |
| | | | | | | 1. | | |
| HUSJW03 | 923035 | 358 | 121-270 | 973 | Gly-20 to Gly-25. | L0748: 2, L0749: 2 and | | |
| | | | | | | H0412: 1. | | |
| HUSJN66 | 886987 | 359 | 3-455 | 974 | Arg-22 to Pro-31, | AR050: 86, AR054: | | |
| | | | | | Pro-39 to Arg-50, | 82, AR051: 63, AR089: | | |
| | | | | | Asp-86 to Gly-91, | 14, AR061: 11 | | |
| | | | | | Phe-96 to Ser-105, | H0412: 1 and L0759: | | |
| | | | | | Gly-114 to Gly-120, | 1. | | |
| | | | | | Asp-132 to Ser-139. | | | |
| HUSIT75 | 679416 | 360 | 227-466 | 975 | Arg-45 to Trp-50. | H0412: 1 and L0747: | | |
| | | | | | | 1. | | |
| HUSIS59 | 739327 | 361 | 1-231 | 976 | Pro-10 to Gly-22, | H0412: 1 | | |
| | | | | | Gly-29 to Lys-47. | | | |
| HUSIS54 | 730734 | 362 | 60-158 | 977 | Val-22 to Leu-30. | H0412: 1 | | |
| HUSIS08 | 959536 | 363 | 93-425 | 978 | | H0412: 1 and L0593: | | |
| | | | | | | 1. | | |
| HUSIR04 | 709228 | 364 | 178-330 | 979 | Ser-3l to Val-39. | L0748: 2 and H0412: | | |
| | | | | | | 1. | | |
| HUSIN12 | 970759 | 365 | 1-474 | 980 | Leu-1 to Glu-10. | H0412: 1 and L0665: | | |
| | | | | | | 1. | | |
| HUSIE95 | 967176 | 366 | 2-445 | 981 | | H0412: 1 and L0747: | | |
| | | | | | | 1. | | |
| HUSIE18 | 666523 | 367 | 104-280 | 982 | Gly-1 to Lys-7, | H0412: 1 and L0742: | | |
| | | | | | Arg-11 to Asn-23. | 1. | | |
| HUSIE08 | 908574 | 368 | 335-661 | 983 | Arg-19 to Ser-26. | L0157: 2, L0758: 2, | | |
| | | | | | | H0412: 1, L0803: 1, | | |
| | | | | | | L0744: 1, L0777: 1 and | | |
| | | | | | | L0753: 1. | | |
| HUSHL86 | 960355 | 369 | 779-1003 | 984 | Ser-12 to Gly-17. | L0662: 2, H0437: 1 | | |
| | | | | | | and L0731: 1. | | |
| HUSHE34 | 703409 | 370 | 276-425 | 985 | | H0437: 1 and L0777: | | |
| | | | | | | 1. | | |
| HUSHB71 | 766060 | 371 | 1-267 | 986 | Gly-1 to Arg-11, | H0437: 1 and L0748: | | |
| | | | | | Asn-29 to Arg-35, | 1. | | |
| | | | | | Phe-37 to Tyr-48, | | | |
| | | | | | His-74 to Cys-81. | | | |
| HUSHB60 | 746560 | 372 | 2-421 | 987 | Glu-10 to Met-17, | H0437: 1 and L0596: | | |
| | | | | | Thr-23 to Asp-32, | 1. | | |
| | | | | | Pro-37 to Gln-43, | | | |
| | | | | | Val-67 to Asp-75. | | | |
| HUSGW06 | 935574 | 373 | 296-574 | 988 | Gln-17 to Ser-29. | H0412: 1, L0754: 1 | | |
| | | | | | | and L0752: 1. | | |
| HUSGV84 | 813557 | 374 | 3-113 | 989 | Asp-1 to Ser-8, | H0412: 1 and L0598: | 13q12-q14 | 109543, |
| | | | | | Ser-22 to Asn-30. | 1. | | 121011, |
| | | | | | | | | 121011, |
| | | | | | | | | 129500, |
| | | | | | | | | 253700, |
| | | | | | | | | 600631, |
| | | | | | | | | 601499, |
| | | | | | | | | 601885, |
| | | | | | | | | 602221 |
| HUSGU08 | 959540 | 375 | 105-281 | 990 | Trp-25 to Ile-30. | H0412: 1 and L0657: | | |
| | | | | | | 1. | | |
| HUSGT01 | 916620 | 376 | 3-215 | 991 | Glu-61 to Ile-67. | H0412: 1 and L0532: | | |
| | | | | | | 1. | | |
| HUSGS35 | 707777 | 377 | 97-507 | 992 | Thr-11 to Gly-17. | L0777: 3, L0766: 2, | 19p13.2 | 108725, |
| | | | | | | L0776: 2, L0759: 2, | | 120700, |
| | | | | | | H0412: 1, L0638: 1, | | 133171, |
| | | | | | | L0646: 1, L0764: 1, | | 143890, |
| | | | | | | L0662: 1, L0659: 1, | | 147670, |
| | | | | | | L0666: 1, L0663: 1, | | 147670, |
| | | | | | | L0740: 1, L0749: 1 and | | 147670, |
| | | | | | | L0588: 1. | | 151440, |
| | | | | | | | | 164953, |
| | | | | | | | | 231670, |
| | | | | | | | | 600276, |
| | | | | | | | | 600957, |
| | | | | | | | | 601843 |
| HUSGQ62 | 745727 | 378 | 253-450 | 993 | His-6 to Val-22. | H0412: 1 and L0748: | | |
| | | | | | | 1. | | |
| HUSGM24 | 425180 | 379 | 395-751 | 994 | | H0412: 1 and L0754: | | |
| | | | | | | 1. | | |
| HUSGJ68 | 753059 | 380 | 41-232 | 995 | Lys-8 to Cys-14. | H0412: 1 | | |
| HUSGH09 | 625647 | 381 | 324-689 | 996 | Arg-1 to Arg-8. | H0412: 1 and L0748: | | |
| | | | | | | 1. | | |
| HUSGF79 | 775309 | 382 | 269-403 | 997 | Ser-23 to Tyr-31, | L0766: 2, H0412: 1 | | |
| | | | | | Gln-34 to Thr-41. | and L0754: 1. | | |
| HUSGF59 | 576784 | 383 | 1-282 | 998 | Gly-41 to Cys-59, | H0412: 1 | | |
| | | | | | Arg-72 to Lys-77. | | | |
| HUSGF10 | 964844 | 384 | 97-291 | 999 | Ser-34 to Asp-39 | H0412: 1 | | |
| HUSGE22 | 888829 | 385 | 199-444 | 1000 | Lys-1 to Lys-16, | AR054: 4 | | |
| | | | | | Lys-70 to Gly-79. | H0412: 1 | | |
| HUSGB36 | 572924 | 386 | 78-245 | 1001 | Ser-17 to Ala-22, | H0412: 1 and L0754: | | |
| | | | | | Pro-37 to Tyr-46. | 1. | | |
| HUSGB01 | 916804 | 387 | 2-169 | 1002 | Leu-16 to Lys-21. | H0412: 1 | | |
| HUSFH89 | 786970 | 388 | 98-262 | 1003 | | L0748: 2 and H0433: | | |
| | | | | | | 1. | | |
| HUSFF03 | 924616 | 389 | 2-589 | 1004 | Pro-12 to Glu-28, | L0766: 2, H0433: 1 | 9q31-q33 | 109400, |
| | | | | | Arg-34 to Cys-43, | and L0779: 1. | | 132800, |
| | | | | | Pro-45 to Ser-57, | | | 132800, |
| | | | | | Ser-65 to Tyr-70, | | | 146150, |
| | | | | | Ser-83 to Asn-88, | | | 186855, |
| | | | | | Asp-128 to Asp-134, | | | 223900, |
| | | | | | Val-157 to Glu-168, | | | 253800, |
| | | | | | Ser-182 to Lys-192. | | | 253800, |
| | | | | | | | | 268900, |
| | | | | | | | | 278700, |
| | | | | | | | | 602088 |
| HUSFE05 | 932106 | 390 | 57-263 | 1005 | | H0433: 1, L0766: 1 | | |
| | | | | | | and L0595: 1. | | |
| HUSDA09 | 461656 | 391 | 260-487 | 1006 | Gly-10 to Phe-16. | H0403: 1 and L0589: | | |
| | | | | | | 1. | | |
| HUSAY21 | 920403 | 392 | 255-503 | 1007 | Val-27 to Asp-39, | H0268: 1 and L0754: | | |
| | | | | | Thr-41 to Gly-46, | 1. | | |
| | | | | | Ser-54 to Thr-63, | | | |
| | | | | | Asp-77 to Pro-83. | | | |
| HUSAO27 | 955287 | 393 | 160-270 | 1008 | | H0268: 1 | | |
| HUSAM87 | 529783 | 394 | 3-137 | 1009 | Arg-1 to Lys-6, | H0268: 1 | | |
| | | | | | Gly-14 to Cys-20. | | | |
| HUSAM35 | 558191 | 395 | 187-2 | 1010 | | H0268: 1 | | |
| HUSAM22 | 523674 | 396 | 3-95 | 1011 | Glu-20 to Lys-29. | H0268: 1 | | |
| HUSAL04 | 927719 | 397 | 190-330 | 1012 | | H0268: 1 | | |
| HUSAJ57 | 678932 | 398 | 127-351 | 1013 | Leu-1 to Thr-6. | H0268: 1 | | |
| HUSAJ15 | 522056 | 399 | 105-203 | 1014 | Leu-18 to Gln-30. | H0268: 1 | | |
| HULAG30 | 788577 | 400 | 2-277 | 1015 | Gly-8 to Arg-26. | L0731: 2 and H0530: | | |
| | | | | | | 1. | | |
| HMELV25 | 678120 | 401 | 201-311 | 1016 | | L0777: 2, H0266: 1, | | |
| | | | | | | L0766: 1, L0803: 1 and | | |
| | | | | | | L0748: 1. | | |
| HMELV14 | 876087 | 402 | 86-223 | 1017 | Ser-38 to Thr-46. | H0266: 1, L0746: 1 | | |
| | | | | | | and L0779: 1. | | |
| HMELR45 | 717696 | 403 | 192-52 | 1018 | Lys-14 to Arg-20, | H0266: 1 | | |
| | | | | | Gly-27 to Thr-40. | | | |
| | 717797 | 610 | 186-389 | 1225 | Arg-29 to Leu-37. | | | |
| HMELM86 | 784702 | 404 | 23-133 | 1019 | Phe-32 to Glu-37. | H0266: 1 | | |
| HMELM85 | 783536 | 405 | 72-224 | 1020 | | H0266: 1 | | |
| HMELM03 | 924168 | 406 | 119-316 | 1021 | | H0266: 1 | | |
| HMELI57 | 734769 | 407 | 2-292 | 1022 | Met-1 to Gln-15, | H0266: 1 and L0591: | | |
| | | | | | Ser-22 to Ala-31, | 1. | | |
| | | | | | Glu-45 to Val-51, | | | |
| | | | | | Met-58 to Ser-63, | | | |
| | | | | | Thr-74 to Asn-84, | | | |
| | | | | | Met-90 to Pro-97. | | | |
| HMELH60 | 422844 | 408 | 338-3 | 1023 | | H0266: 1 | | |
| | 878666 | 611 | 2-166 | 1226 | | | | |
| HMEKZ06 | 935467 | 409 | 43-297 | 1024 | Asp-13 to Asn-25, | H0266: 1 and L0780: | 4 | |
| | | | | | Ile-41 to Pro-52. | 1. | | |
| HMEKW07 | 953369 | 410 | 354-623 | 1025 | | H0266: 1 and L0776: | | |
| | | | | | | 1. | | |
| HMEKQ19 | 668659 | 411 | 289-585 | 1026 | | H0266: 1, L0748: 1 | | |
| | | | | | | and L0759: 1. | | |
| HMEKO03 | 924172 | 412 | 159-338 | 1027 | | L0766: 2, H0266: 1 | | |
| | | | | | | and L0779: 1. | | |
| HMEKJ40 | 711187 | 413 | 119-340 | 1028 | Ile-13 to Cys-20, | H0266: 1 and L0748: | | |
| | | | | | Ile-36 to Ser-41. | 1. | | |
| HMEKH73 | 923893 | 414 | 65-541 | 1029 | Asp-14 to Leu-49, | H0266: 1 and L0759: | | |
| | | | | | Pro-52 to Pro-73. | 1. | | |
| HMEKC72 | 760637 | 415 | 199-393 | 1030 | Cys-1 to Asp-8. | H0266: 1 and L0743: | | |
| | | | | | | 1. | | |
| HMEJW50 | 724396 | 416 | 61-237 | 1031 | | H0266: 1 and L0748: | | |
| | | | | | | 1. | | |
| HMEJJ81 | 777945 | 417 | 73-309 | 1032 | Arg-1 to Asp-9, | H0266: 1 and L0749. | | |
| | | | | | Arg-22 to His-33, | 1. | | |
| | | | | | Ala-37 to Glu-47. | | | |
| HMEJF25 | 678131 | 418 | 99-425 | 1033 | Val-30 to Thr-40, | H0266: 1 and L073l: | | |
| | | | | | Lys-75 to Trp-88, | 1. | | |
| | | | | | Lys-90 to Ser-95. | | | |
| HMEIV22 | 674611 | 419 | 408-503 | 1034 | | H0266: 1 and L0748: | | |
| | | | | | | 1. | | |
| HMEIS07 | 922703 | 420 | 1-387 | 1035 | Gly-1 to Arg-7, | H0266: 1, L0745: 1 | | |
| | | | | | Pro-13 to Pro-37. | and L0603: 1. | | |
| HMEIA06 | 935966 | 421 | 19-168 | 1036 | Pro-6 to Gly-11. | H0266: 1 | | |
| HMEGK14 | 796443 | 422 | 11-334 | 1037 | Gln-18 to Lys-29, | L0749: 2 and H0266: | | |
| | | | | | Arg-43 to Leu-55, | 1. | | |
| | | | | | Pro-57 to Pro-67, | | | |
| | | | | | Pro-81 to Gly-86. | | | |
| HMEGH92 | 790629 | 423 | 18-494 | 1038 | Asp-21 to Arg-31. | H0266: 1 and L0766: | | |
| | | | | | | 1. | | |
| HMEFD72 | 766185 | 424 | 1-234 | 1039 | Leu-6 to Thr-11, | H0266: 1 and L0766: | | |
| | | | | | His-13 to Gly-21, | 1. | | |
| | | | | | Gln-52 to Arg-62. | | | |
| HMEEL38 | 733649 | 425 | 3-200 | 1040 | | H0266: 1, L0748: | 6p12 | 180297, |
| | | | | | | L0756: 1 and L0599: 1. | | 230450, |
| | | | | | | | | 263200, |
| | | | | | | | | 601690 |
| HMEDR76 | 529897 | 426 | 18-173 | 1041 | | H0266: 1 | | |
| HMECQ10 | 968500 | 427 | 2-148 | 1042 | Trp-8 to Ser-14, | H0266: 1 and L0766: | | |
| | | | | | Arg-30 to Arg-39. | 1. | | |
| HMECH43 | 715568 | 428 | 2-133 | 1043 | | H0266: 1 and L0766: | | |
| | | | | | | 1. | | |
| HMEBY95 | 796058 | 429 | 172-327 | 1044 | | H0267: 1 and L0766: | | |
| | | | | | | 1. | | |
| HMEBG01 | 921763 | 430 | 94-240 | 1045 | | H0267: 1 and L0744: | | |
| | | | | | | 1. | | |
| HMEAN12 | 655220 | 431 | 59-259 | 1046 | | H0266: 1 and L0754: | | |
| | | | | | | 1. | | |
| HMEAI38 | 709207 | 432 | 325-504 | 1047 | Pro-2 to Gly-7, | H0266: 1 and L0748: | | |
| | | | | | Asp-13 to Ser-20. | 1. | | |
| HMEAH31 | 698403 | 433 | 68-190 | 1048 | Gly-32 to Asp-39. | L0581: 2, L0471: 1, | | |
| | | | | | | H0266: 1 and L0364: 1. | | |
| HMEAE24 | 880925 | 434 | 2-169 | 1049 | | H0266: 1 | | |
| HMEAE01 | 916744 | 435 | 2-118 | 1050 | | H0266: 1 | | |
| HMEAD86 | 785802 | 436 | 3-299 | 1051 | Phe-32 to Arg-37, | H0266: 1 and L0766: | | |
| | | | | | Cys-40 to Thr-45, | 1. | | |
| | | | | | Glu-63 to Gly-70. | | | |
| HMEAD47 | 720638 | 437 | 2-346 | 1052 | Arg-41 to Ser-46, | H0266: 1 and L0748: | | |
| | | | | | Pro-52 to Gly-57. | 1. | | |
| HMEAA17 | 921765 | 438 | 105-332 | 1053 | | H0266: 1 and L0439: | | |
| | | | | | | 1. | | |
| HHFUB83 | 800580 | 439 | 2-235 | 1054 | Gly-1 to Ala-7. | H0242: 1 | | |
| HHFOU02 | 918070 | 440 | 142-432 | 1055 | Ser-7 to Ser-14. | L0803: 2, H0645: 1 | | |
| | | | | | | and L0747: 1. | | |
| HHFOL43 | 974002 | 441 | 16-324 | 1056 | His-1 to His-10, | H0645: 1 | | |
| | | | | | Pro-14 to Asn-19, | | | |
| | | | | | Leu-48 to Arg-56, | | | |
| | | | | | Lys-65 to Ile-76, | | | |
| | | | | | Lys-93 to Arg-103. | | | |
| HHFOK10 | 961346 | 442 | 22-279 | 1057 | Ser-2 to Ser-8, | H0645: 1 and L0766: | | |
| | | | | | Lys-14 to Arg-19. | 1. | | |
| HHFNJ05 | 930899 | 443 | 3-320 | 1058 | Pro-13 to Gly-22, | L0774: 2, H0619: 1 | | |
| | | | | | Arg-31 to Gly-42, | and L0769: 1. | | |
| | | | | | Ser-86 to Cys-92, | | | |
| | | | | | Pro-94 to Pro-101. | | | |
| HHFMX34 | 945385 | 444 | 3-461 | 1059 | Ala-7 to Gly-13, | AR089: 11, AR061: 8 | | |
| | | | | | Ile-71 to Gln-77, | H0619: 1 | | |
| | | | | | Phe-79 to Ala-85, | | | |
| | | | | | Gly-142 to Pro-148. | | | |
| HHFLU06 | 857884 | 445 | 2-328 | 1060 | | AR061: 5, AR089: 2 | | |
| | | | | | | H0619: 1 | | |
| HHFLT84 | 857890 | 446 | 407-225 | 1061 | | H0619: 1 and L0745: | | |
| | | | | | | 1. | | |
| HHFLL08 | 958103 | 447 | 67-354 | 1062 | Asn-6 to Asn-27, | H0619: 1 and L0599: | | |
| | | | | | Ser-44 to Tyr-52. | 1. | | |
| HHFLJ51 | 857898 | 448 | 186-443 | 1063 | Phe-12 to His-17, | L0617: 1 and H0619: | | |
| | | | | | Gly-53 to Tyr-60. | 1. | | |
| HHFLI10 | 963162 | 449 | 64-471 | 1064 | Thr-11 to Lys-19, | H0619: 1 | | |
| | | | | | Ser-44 to Asn-49, | | | |
| | | | | | Cys-102 to Ala-111, | | | |
| | | | | | Pro-114 to Thr-120. | | | |
| HHFLI07 | 952081 | 450 | 404-589 | 1065 | Ser-1 to Cys-24. | H0619: 1 | | |
| HHFLH62 | 857908 | 451 | 46-240 | 1066 | Thr-26 to Tyr-31, | H0619: 1 and L0759: | | |
| | | | | | Ile-52 to Cys-65. 1. | | | |
| HHFLE12 | 969531 | 452 | 2-205 | 1067 | | H0619: 1 and L0758: | | |
| | | | | | | 1. | | |
| HHFKX28 | 971102 | 453 | 454-176 | 1068 | Tyr-41 to Gly-52, | L0766: 2 and H0619: | | |
| | | | | | Leu-66 to Trp-71, | 1. | | |
| | | | | | Ser-73 to Cys-85. | | | |
| HHFKB24 | 887025 | 454 | 3-173 | 1069 | Asp-1 to Ser-14. | AR054: 27, AR050: | | |
| | | | | | | 20, AR051: 19 | | |
| | | | | | | H0619: 1 | | |
| HHFJM64 | 958384 | 455 | 170-1030 | 1070 | Val-4 to Asn-11, | H0619: 1 and L0805: | | |
| | | | | | Cys-24 to Tyr-31. | 1. | | |
| HHFIA58 | 858011 | 456 | 99-284 | 1071 | Glu-31 to Ala-40. | H0050: 1 and L0070: | | |
| | | | | | | 1. | | |
| HHFIA13 | 657405 | 457 | 108-308 | 1072 | Val-19 to Trp-24, | L0745: 2 and H0050: | | |
| | | | | | Ser-59 to Trp-67. | 1. | | |
| HHFHY95 | 795053 | 458 | 13-243 | 1073 | | H0050: 1 and L0599: | | |
| | | | | | | 1. | | |
| HHFHR63 | 745215 | 459 | 164-391 | 1074 | Pro-36 to Asn-45. | H0050: 1, L0748: 1 | | |
| | | | | | | and L0439: 1. | | |
| HHFHP68 | 753144 | 460 | 232-432 | 1075 | | H0050: 1 and L0666: | | |
| | | | | | | 1. | | |
| HHFHN74 | 765758 | 461 | 602-799 | 1076 | | L0439:7 and HO050: | | |
| | | | | | | 1. | | |
| HHFHM22 | 674841 | 462 | 18-287 | 1077 | Leu-6 to Gln-13. | H0050: 1 and L0439: | | |
| | | | | | | 1. | | |
| HHFHJ90 | 675218 | 463 | 200-364 | 1078 | Gln-32 to Phe-37. | H0050: 1 and L0748: | | |
| | | | | | | 1. | | |
| HHFHD38 | 709082 | 464 | 33-149 | 1079 | | H0050: 1 and L0748: | | |
| | | | | | | 1. | | |
| HHFGX13 | 656806 | 465 | 566-414 | 1080 | Pro-8 to Leu-22, | H0050: 1 | | |
| | | | | | Leu-42 to Glu-49. | | | |
| | 657080 | 612 | 30-131 | 1227 | Pro-1 to Gln-6. | | | |
| HHFGX03 | 924753 | 466 | 3-338 | 1081 | Trp-5 to Asp-16, | H0050: 1 and L0766: | | |
| | | | | | Asp-25 to Asp-30, | 1. | | |
| | | | | | Arg-49 to Pro-54. | | | |
| HHFGR31 | 953204 | 467 | 109-405 | 1082 | Leu-22 to Gly-31. | H0050: 1 and L0750: | | |
| | | | | | | 1. | | |
| HHFGR30 | 692887 | 468 | 1-141 | 1083 | Thr-25 to Thr-30, | H0050: 1 and L0589: | | |
| | | | | | Gly-32 to Asp-37. | 1. | | |
| HHFGP91 | 800328 | 469 | 52-579 | 1084 | | H0050: 1 and L0794: | | |
| | | | | | | 1. | | |
| HHFGP69 | 918393 | 470 | 712-485 | 1085 | Asn-1 to Gly-9. | AR051: 57, AR050: | | |
| | | | | | | 56, AR054: 46 | | |
| | | | | | | H0050: 1 | | |
| | 918394 | 613 | 281-126 | 1228 | Phe-4 to Gln-24, | | | |
| | | | | | Thr-29 to Leu-38, | | | |
| | | | | | Ser-46 to Arg-52. | | | |
| HHFGL77 | 490379 | 471 | 322-119 | 1086 | Val-3 to Ser-29, | H0050: 1 | | |
| | | | | | Phe-47 to Gly-52. | | | |
| | 570229 | 614 | 120-275 | 1229 | | | | |
| HHFGH81 | 778193 | 472 | 46-267 | 1087 | Asp-14 to Gln-22, | H0050: 1 and L0439: | | |
| | | | | | Gln-35 to Phe-41. | 1. | | |
| HHFGH43 | 573495 | 473 | 2-202 | 1088 | | L0744: 3, H0050: 1, | 2p14-p13.4 | 203800 |
| | | | | | | L0743: 1 and L0748: 1. | | |
| HHFFZ50 | 513773 | 474 | 263-436 | 1089 | | H0050: 1 | | |
| | 858039 | 615 | 103-309 | 1230 | | | | |
| HHFFT05 | 932675 | 475 | 3-137 | 1090 | Thr-2 to Ser-19, | H0050: 1 | | |
| | | | | | Glu-21 to Trp-30. | | | |
| HHFFT01 | 880757 | 476 | 179-400 | 1091 | Arg-37 to Phe-45. | AR051: 33, AR054: | | |
| | | | | | | 28, AR050: 14 | | |
| | | | | | | H0050: 1 | | |
| HHFFR95 | 796677 | 477 | 1-213 | 1092 | | L0439: 2 and H0050: | | |
| | | | | | | 1. | | |
| HHFFR75 | 766630 | 478 | 483-250 | 1093 | Pro-1 to Ala-8. | H0050: 1 | | |
| | 858041 | 616 | 207-335 | 1231 | | | | |
| HHFFR32 | 699723 | 479 | 92-313 | 1094 | Pro-6 to Gly-12. | H0050: 1 and L0777: | | |
| | | | | | | 1. | | |
| HHFFP17 | 880667 | 480 | 215-409 | 1095 | | H0050: 1 and L0803: | | |
| | | | | | | 1. | | |
| HFIFF046 | 530501 | 481 | 32-286 | 1096 | Ser-1 to Cys-6, | H0050: 1 | | |
| | | | | | Ala-28 to His-34. | | | |
| HHFFM05 | 932738 | 482 | 324-470 | 1097 | | H0050: 1 and L0748: | | |
| | | | | | | 1. | | |
| HHFFL66 | 530503 | 483 | 1-150 | 1098 | Ile-1 to Ala-6. | H0050: 1 | | |
| HHFFK30 | 858051 | 484 | 2-193 | 1099 | Ile-8 to Gly-13. | H0050: 1 and L0378: | | |
| | | | | | | 1. | | |
| HHFFI59 | 739587 | 485 | 74-280 | 1100 | Gln-22 to Ser-29. | H0050: 1 and L0748: | | |
| | | | | | | 1. | | |
| HHFFI08 | 960254 | 486 | 49-342 | 1101 | Thr-13 to Ala-18, | L0748: 2, L0002: 1 and | | |
| | | | | | Ala-39 to Ser-46, | H0050: 1. | | |
| | | | | | Cys-51 to Thr-58, | | | |
| | | | | | Pro-70 to Tyr-75, | | | |
| | | | | | Glu-83 to Gln-95. | | | |
| HHFFH76 | 767623 | 487 | 265-546 | 1102 | Ala-1 to Asn-6. | H0050: 1 and L0750: | 2q32.1 | 600258, |
| | | | | | | 1. | | 602087 |
| HHFFG82 | 530662 | 488 | 3-281 | 1103 | Ala-21 to Asn-27. | H0050: 1 | | |
| HHFFF92 | 790572 | 489 | 52-345 | 1104 | | L0745: 3, L0750: 2 and | | |
| | | | | | | H0050: 1. | | |
| HHFFF07 | 954258 | 490 | 409-576 | 1105 | | H0050: 1 and L0749: | | |
| | | | | | | 1. | | |
| HHFEB86 | 785653 | 491 | 161-367 | 1106 | | H0050: 1 and L0748: | | |
| | | | | | | 1. | | |
| HHFDN80 | 781634 | 492 | 93-287 | 1107 | Ile-7 to Asn-26, | H0050: 1 and L0591: | 6p22 | 248611 |
| | | | | | Gly-35 to Gly-42, | 1. | | |
| | | | | | Ala-44 to Gly-49. | | | |
| HHFDI82 | 499010 | 493 | 370-492 | 1108 | Ile-18 to Asp-28, | H0050. 1 | | |
| | | | | | Ile-32 to Asn-37. | | | |
| | 511062 | 617 | 518-306 | 1232 | | | | |
| HHFDH26 | 685188 | 494 | 1-441 | 1109 | Ser-36 to Lys-53, | H0050: 1 and L0754: | | |
| | | | | | Pro-63 to Pro-79, | 1. | | |
| | | | | | Val-82 to Gly-104. | | | |
| HHFDC10 | 968647 | 495 | 2-136 | 1110 | Ser-34 to Leu-40. | L0748: 2,H0050:1 | | |
| | | | | | | and L0599: 1. | | |
| HHFDA13 | 667804 | 496 | 221-337 | 1111 | Met-6 to Ile-18. | H0050: 1 and L0748: | | |
| | | | | | | 1. | | |
| HHFCT63 | 572784 | 497 | 184-32 | 1112 | | H0050: 1 and L0748: | | |
| | | | | | | 1. | | |
| HHFCP39 | 429442 | 498 | 81-194 | 1113 | Asn-24 to Asn-36. | H0050: 1 and L0748: | | |
| | | | | | | 1. | | |
| HHFC013 | 500899 | 499 | 322-221 | 1114 | | H0050: 1 and L0754: | | |
| | | | | | | 1. | | |
| HHFCN59 | 739657 | 500 | 386-138 | 1115 | His-39 to Pro-45. | H0050: 1 and L0750: | | |
| | | | | | | 1. | | |
| HHFCN13 | 667805 | 501 | 221-6 | 1116 | Phe-38 to Lys-44. | L0749: 3 and H0050: | | |
| | | | | | | 1. | | |
| HHFCM51 | 509631 | 502 | 23-151 | 1117 | Asn-28 to Leu-33. | H0050: 1 | | |
| HHFCH52 | 911570 | 503 | 307-50 | 1118 | | H0050: 1 | | |
| HHFCF58 | 575183 | 504 | 166-333 | 1119 | Ser-2 to Gly-12. | L0748: 3,H0050: 1 | | |
| | | | | | | and L0750: 1. | | |
| | 575184 | 618 | 500-159 | 1233 | | | | |
| HHFCE73 | 764763 | 505 | 5-214 | 1120 | | L0748: 3 and H0050: | | |
| | | | | | | 1. | | |
| HHFCE40 | 712866 | 506 | 71-199 | 1121 | | H0050: 1 and L0439: | | |
| | | | | | | 1. | | |
| HHFCD43 | 714353 | 507 | 52-150 | 1122 | | H0050: 1,L0803: 1 | | |
| | | | | | | and L0596: 1. | | |
| HHFCC60 | 739669 | 508 | 197-436 | 1123 | | H0050: 1 and L0439: | | |
| | | | | | | 1. | | |
| HHFCC45 | 858066 | 509 | 23-217 | 1124 | | H0050: 1 and L0746: | | |
| | | | | | | 1. | | |
| HHFCC20 | 600231 | 510 | 605-411 | 1125 | | H0050: 1 | | |
| | 825658 | 619 | 3-344 | 1234 | Gln-41 to Gly-53, | | | |
| | | | | | Pro-55 to Glu-64, | | | |
| | | | | | Arg-108 to Gly-113. | | | |
| HHFBW92 | 575156 | 511 | 393-551 | 1126 | | H0050: 1 and L0748: | | |
| | | | | | | 1. | | |
| HHFBU63 | 745661 | 512 | 212-382 | 1127 | Lys-3 to Arg-21, | H0050: 1 and L0748: | | |
| | | | | | Pro-40 to Lys-47. | 1. | | |
| HHFBU07 | 954478 | 513 | 172-405 | 1128 | | H0050: 1 and L0804: | | |
| | | | | | | 1. | | |
| HHFBT24 | 508067 | 514 | 2-418 | 1129 | | H0050: 1 | | |
| HHFBQ94 | 796838 | 515 | 108-278 | 1130 | | L0750: 2, H0050: 1 | | |
| | | | | | | and L0604: 1. | | |
| HHFBP29 | 710894 | 516 | 1-279 | 1131 | Val-17 to Thr-23, | L0748: 5, H0050: 1, | | |
| | | | | | Ser-57 to Arg-64. | L0805: 1 and L0749: 1. | | |
| HHFBN17 | 589798 | 517 | 180-1 | 1132 | Ser-30 to Tyr-35, | H0050: 1 | | |
| | | | | | Leu-52 to Glu-60. | | | |
| | 858072 | 620 | 358-528 | 1235 | | | | |
| HHFBM11 | 968002 | 518 | 224-3 | 1133 | Val-36 to Ser-54. | L0758:4, H0050: 1, | | |
| | | | | | | L0769: 1 and L0438: 1. | | |
| HHFBD83 | 781525 | 519 | 602-411 | 1134 | | L0748: 2, H0050: 1 | | |
| | | | | | | and L0745: 1. | | |
| HHFBD42 | 712899 | 520 | 463-77 | 1135 | | L0754: 3, L0749: 2, | | |
| | | | | | | H0050: 1, L0662: 1 and | | |
| | | | | | | L0596: 1. | | |
| HHFBB14 | 522375 | 521 | 3-191 | 1136 | Arg-26 to Glu-37. | H0050: 1 and L0605: | | |
| | | | | | | 1. | | |
| HHFBA11 | 967991 | 522 | 181-321 | 1137 | Asp-1 to Thr-9. | H0050: 1 | | |
| HHFAB62 | 824590 | 523 | 608-255 | 1138 | Arg-4 to Asp-9. | L0439: 4 and H0019: | | |
| | | | | | | 1. | | |
| HHBGN74 | 765214 | 524 | 145-471 | 1139 | Phe-12 to Pro-22, | H0373: 1 and L0604: | | |
| | | | | | Glu-29 to Asn-38, | 1. | | |
| | | | | | Glu-45 to Tyr-55. | | | |
| HHBGJ53 | 909912 | 525 | 1-282 | 1140 | Ser-1 to Ser-7, | AR089: 8, AR061: 5 | | |
| | | | | | Ser-25 to Arg-31. | L0740: 2 and H0373: | | |
| | | | | | | 1. | | |
| HHBGG10 | 963849 | 526 | 215-400 | 1141 | Lys-1 to Thr-7, | H0373: 1 and L0752: | | |
| | | | | | Gln-12 to Glu-25. | 1. | | |
| HHBGC75 | 767042 | 527 | 16-219 | 1142 | Lys-48 to Lys-63. | L0777: 3 and H0373: | | |
| | | | | | | 1. | | |
| HHBFT06 | 934826 | 528 | 358-489 | 1143 | Asp-6 to Ile-12, | H0373: 1 and L0142: | | |
| | | | | | Met-21 to Ala-26. | 1. | | |
| HHBFM77 | 771816 | 529 | 186-266 | 1144 | | H0373: 1 and L0753: | | |
| | | | | | | 1. | | |
| HHBEV93 | 792041 | 530 | 2-139 | 1145 | | L0742: 3 and H0373: | | |
| | | | | | | 1. | | |
| HHBES89 | 786667 | 531 | 216-398 | 1146 | His-12 to Ser-17. | L0439:4 and H0373: | | |
| | | | | | | 1. | | |
| HHBEM49 | 722337 | 532 | 288-455 | 1147 | Lys-1 to Phe-6. | H0373: 1, L0749: 1 | | |
| | | | | | | and L0601: 1. | | |
| HHBEG80 | 951688 | 533 | 284-442 | 1148 | Ser-1l to Cys-26, | AR089: 21, AR061: 7 | | |
| | | | | | Lys-30 to Lys-53. | H0373: 1 and L0731: | | |
| | | | | | | 1. | | |
| HHBEG72 | 761150 | 534 | 157-402 | 1149 | Arg-29 to Ser-34. | H0373: 1 and L0748: | | |
| | | | | | | 1. | | |
| HEMHA53 | 728297 | 535 | 450-605 | 1150 | | S0046: 1 and L0749: 1. | | |
| HEMGX57 | 872083 | 536 | 382-606 | 1151 | | S0046: 1 and L0766: 1. | | |
| HEMGT27 | 851065 | 537 | 123-293 | 1152 | Cys-36 to Trp-42. | S0046: 1 and L0592: 1. | | |
| HEMGL56 | 767669 | 538 | 3-332 | 1153 | Gly-89 to Ala-95. | AR089: 25, AR061: 7 | 3p14.3 | 150250, |
| | | | | | | S0046: 1 | | 164500, |
| | | | | | | | | 277730, |
| | | | | | | | | 600971, |
| | | | | | | | | 601226 |
| HEMFN30 | 692818 | 539 | 344-805 | 1154 | Gln-1 to Asn-8, | L0598: 2, L0731: 2 and | | |
| | | | | | Lys-17 to Arg-24, | S0046: 1. | | |
| | | | | | Ser-89 to Arg-103. | | | |
| HEMFF16 | 576539 | 540 | 3-140 | 1155 | Asn-1 to Pro-11. | S0046: 1 | | |
| HEMEF34 | 596812 | 541 | 477-695 | 1156 | Gly-37 to Val-43. | S0046: 1 | | |
| | 851083 | 621 | 3-182 | 1236 | Gly-24 to Val-30. | | | |
| HEMEA03 | 921922 | 542 | 124-258 | 1157 | | S0046: 1 and L0749: 1. | | |
| HEMDX96 | 935963 | 543 | 650-255 | 1158 | | L0751: 2 and S0046: 1. | | |
| HEMCV44 | 574321 | 544 | 235-345 | 1159 | Tyr-6 to Ser-11. | S0046: 1 | | |
| HEMCK53 | 728424 | 545 | 69-251 | 1160 | Gly-11 to Asp-24, | L0748: 2 and S0046: 1. | | |
| | | | | | Ser-41 to Ile-46. | | | |
| HEMCI59 | 739551 | 546 | 1-354 | 1161 | His-1 to Met-11, | AR089: 4, AR061: 3 | | |
| | | | | | Asp-40 to Glu-48, | S0046: 1 and L0740: 1. | | |
| | | | | | Tyr-72 to Arg-77, | | | |
| | | | | | Asn-111 to His-117. | | | |
| HEMCI41 | 712614 | 547 | 300-578 | 1162 | | L0805: 2, L0608: 2, | | |
| | | | | | | S0046: 1, L0775: 1, | | |
| | | | | | | L0375: 1, L0651: 1, | | |
| | | | | | | L0756: 1, L0759: 1 and | | |
| | | | | | | L0592: 1. | | |
| HEMCC38 | 707453 | 548 | 201-341 | 1163 | | S0046: 1 and L0748: 1. | | |
| HEMBU26 | 684928 | 549 | 1-81 | 1164 | Thr-11 to Lys-17. | S0046: 1 and L0754: 1. | | |
| HEMBT61 | 939957 | 550 | 1-351 | 1165 | | AR061: 8, AR089: 4 | | |
| | | | | | | L0547: 2, S0046: 1, | | |
| | | | | | | L0471: 1, L0772: 1, | | |
| | | | | | | L0529: 1 and L0780: 1. | | |
| HEMAL61 | 851106 | 551 | 130-270 | 1166 | Pro-4 to Lys-13, | S0046: 1 | | |
| | | | | | Leu-21 to Pro-26, | | | |
| | | | | | Lys-32 to Gly-41. | | | |
| HEMAA63 | 745498 | 552 | 3-149 | 1167 | | S0046: 1 and L0748: 1. | | |
| HELHJ74 | 765696 | 553 | 181-513 | 1168 | Arg-4 to Lys-26, | L0745: 3 and S0045: 1. | | |
| | | | | | Thr-31 to Gly-36, | | | |
| | | | | | Glu-83 to Lys-88. | | | |
| HELHD20 | 668881 | 554 | 222-434 | 1169 | Lys-1 to Trp-10, | S0045: 1 | | |
| | | | | | Thr-18 to Val-27. | | | |
| HELHC59 | 769404 | 555 | 285-518 | 1170 | | S0045: 1 and L0740: 1. | | |
| HELGY42 | 713019 | 556 | 47-220 | 1171 | | L0742: 2 and S0045: 1. | | |
| HELGY02 | 948302 | 557 | 3-410 | 1172 | His-1 to Gly-8, | AR089: 0, AR061: 0 | | |
| | | | | | Leu-20 to Pro-30, | S0045: 1 | | |
| | | | | | Lys-44 to Glu-58, | | | |
| | | | | | Pro-60 to Gln-67. | | | |
| HELGW31 | 610003 | 558 | 576-1337 | 1173 | Asp-56 to Ser-62, | AR061: 335, AR089: | | |
| | | | | | Gly-195 to Ser-202. | 290, AR051: 10, | | |
| | | | | | | AR050: 2, AR054: 2 | | |
| | | | | | | S0045: 1 | | |
| | 957568 | 622 | 1035-394 | 1237 | | | | |
| | 964303 | 623 | 21-449 | 1238 | | | | |
| HELGV36 | 597120 | 559 | 233-373 | 1174 | Arg-4 to Ala-10. | S0045: 1, L0748: 1 and | | |
| | | | | | | L0754: 1. | | |
| HELGQ55 | 732223 | 560 | 1-315 | 1175 | | S0045: 1 and L0750: 1. | | |
| HELGK56 | 925698 | 561 | 129-788 | 1176 | | AR061: 3, AR089: 1 | | |
| | | | | | | S0045: 1 | | |
| HELGG21 | 671071 | 562 | 2-253 | 1177 | | S0045: 1 and L0748: 1. | | |
| HELGD47 | 851143 | 563 | 304-453 | 1178 | Arg-1 to Cys-6, | S0045: 1 and L0717: 1. | | |
| | | | | | Pro-43 to Met-50. | | | |
| HELFQ55 | 732224 | 564 | 116-265 | 1179 | Thr-28 to Gln-34, | S0045: 1 and L0439: 1. | | |
| | | | | | His-38 to Thr-44. | | | |
| HELFN75 | 658681 | 565 | 264-635 | 1180 | | AR051: 6, AR054: 4, | | |
| | | | | | | AR050: 1, AR089: 1, | | |
| | | | | | | AR061: 0 | | |
| | | | | | | S0045: 1 | | |
| HELFJ35 | 506277 | 566 | 133-321 | 1181 | Gln-6 to Lys-15. | S0045: 1 | | |
| HELFA38 | 851146 | 567 | 85-318 | 1182 | Trp-55 to Gly-60. | S0045: 1 | | |
| | 954009 | 624 | 482-210 | 1239 | | | | |
| HELEZ81 | 571340 | 568 | 3-329 | 1183 | Pro-82 to Gln-87. | S0045: 1 | | |
| HELET68 | 800029 | 569 | 17-208 | 1184 | Thr-1 to Glu-9. | S0045: 1 and L0748: 1. | | |
| HELE042 | 579016 | 570 | 3-467 | 1185 | His-1 to Ser-20, | AR051: 19, AR054: | | |
| | | | | | Leu-35 to Glu-43, | 11, AR050: 9 | | |
| | | | | | Ser-73 to Glu-79. | S0045: 1 | | |
| HELEH76 | 506674 | 571 | 1-411 | 1186 | | S0045: 1, L0766: 1 and | 1p13 | 102770, |
| | | | | | | L0754: 1. | | 188540, |
| | | | | | | | | 600234, |
| | | | | | | | | 601414, |
| | | | | | | | | 601691, |
| | | | | | | | | 601691, |
| | | | | | | | | 601691, |
| | | | | | | | | 601691, |
| | | | | | | | | 601718, |
| | | | | | | | | 602094 |
| HELEE83 | 577206 | 572 | 1-123 | 1187 | Gly-1 to Ala-7. | S0045: 1 | | |
| HELDT63 | 744864 | 573 | 635-516 | 1188 | Arg-12 to Lys-19, | AR051: 21, AR050: | | |
| | | | | | Gly-35 to Gly-40. | 18, AR054: 3 | | |
| | | | | | | S0045: 1 | | |
| | 898960 | 625 | 3-107 | 1240 | Leu-28 to Ser-35. | | | |
| HELDL15 | 660557 | 574 | 170-406 | 1189 | Lys-40 to Pro-48, | L0750: 2, S0045: 1, | | |
| | | | | | Cys-66 to Cys-74. | L0803: 1 and L0783: 1. | | |
| HELDL08 | 959919 | 575 | 267-377 | 1190 | | S0045: 1 and L0589: 1. | | |
| HELDK22 | 567310 | 576 | 1-309 | 1191 | | S0045: 1 | | |
| HELDH71 | 740198 | 577 | 239-634 | 1192 | Leu-6 to Asn-14, | S0045: 1 and L0748: 1. | | |
| | | | | | Thr-22 to Lys-47. | | | |
| HELDG91 | 790371 | 578 | 555-704 | 1193 | Ala-24 to Pro-37. | S0045: 1, L0743: 1 and | | |
| | | | | | | L0740: 1. | | |
| HELCW51 | 531073 | 579 | 110-262 | 1194 | Asn-12 to Lys-20. | S0045: 1 | | |
| HELCI30 | 691024 | 580 | 12-200 | 1195 | | S0045: 1 and L0439: 1. | | |
| HELCG36 | 655045 | 581 | 96-218 | 1196 | | S0045: 1, L0754: 1 and | | |
| | | | | | | L0731: 1. | | |
| HELBU11 | 967661 | 582 | 10-204 | 1197 | | L0748: 2, S0045: 1 and | | |
| | | | | | | L0608: 1. | | |
| HELBC83 | 781412 | 583 | 132-425 | 1198 | | L0439: 2 and S0045: 1. | | |
| HELAZ48 | 864515 | 584 | 2-226 | 1199 | | L0439: 2, L0740: 2, | | |
| | | | | | | S0045: 1, L0750: 1 | | |
| | | | | | | and L0752: 1. | | |
| HELAW26 | 684925 | 585 | 279-542 | 1200 | | L0748: 3 and S0045: 1. | | |
| HELAQ36 | 707420 | 586 | 69-176 | 1201 | | S0045: 1 and L0748: 1. | | |
| HELAM32 | 699661 | 587 | 1-228 | 1202 | | S0045: 1 and L0748: 1. | | |
| HELAH32 | 699665 | 588 | 1-249 | 1203 | | L0757: 2 and S0045: 1. | | |
| HCMSY80 | 526182 | 589 | 1-153 | 1204 | | H0196: 1 | | |
| HCMSQ63 | 745584 | 590 | 142-303 | 1205 | Pro-1 to Pro-7, | H0196: 1 and L0777: | | |
| | | | | | Pro-10 to Asn-15. | 1. | | |
| HCMSK41 | 940260 | 591 | 109-402 | 1206 | Ser-1 to Trp-6, | AR061: 3, AR089: 1 | | |
| | | | | | Leu-24 to Ser-29. | H0196: 1 | | |
| HAHSB27 | 501010 | 592 | 196-417 | 1207 | Trp-5 to His-16, | H0097: 1 | | |
| | | | | | Gln-45 to Phe-50. | | | |
| HAHFS80 | 954432 | 593 | 202-510 | 1208 | Pro-12 to Thr-19. | L0623: 1, H0599: 1, | | |
| | | | | | | L0471: 1 and L0485: 1. | | |
| HAHFE11 | 965293 | 594 | 88-282 | 1209 | | H0599: 1 and L0758: | | |
| | | | | | | 1. | | |
| HAHEP68 | 738501 | 595 | 84-431 | 1210 | Ser-1 to Val-14, | H0599: 1, L0439: 1 | | |
| | | | | | Ser-26 to Glu-39, | and L0747: 1. | | |
| | | | | | Ala-48 to Pro-53, | | | |
| | | | | | Trp-62 to Thr-68, | | | |
| | | | | | Lys-74 to Asn-84, | | | |
| | | | | | Thr-89 to Pro-95, | | | |
| | | | | | Val-99 to Thr-108. | | | |
| HAHCU22 | 848831 | 596 | 35-211 | 1211 | Thr-18 to Gly-26. | H0599: 1 and L0471: | | |
| | | | | | | 1. | | |
| HAHCR15 | 810326 | 597 | 3-455 | 1212 | | H0599: 1, L0471: 1 | | |
| | | | | | | and L0602: 1. | | |
| HAHCL94 | 794044 | 598 | 2-316 | 1213 | Ala-1 to Ala-6, | H0599: 1 and L0748: | 5p13.1-5cen | 108962, |
| | | | | | Ser-10 to Gly-17. | 1. | | 600837 |
| HAHBC03 | 923542 | 599 | 232-519 | 1214 | Gln-48 to Trp-71, | H0002: 1 and L0758: | 1p136-p34 | 118210, |
| | | | | | His-87 to Lys-94. | 1. | | 120550, |
| | | | | | | | | 120570, |
| | | | | | | | | 120575, |
| | | | | | | | | 121800, |
| | | | | | | | | 130500, |
| | | | | | | | | 133200, |
| | | | | | | | | 138140, |
| | | | | | | | | 155600, |
| | | | | | | | | 168360, |
| | | | | | | | | 171760, |
| | | | | | | | | 171760, |
| | | | | | | | | 176100, |
| | | | | | | | | 176100, |
| | | | | | | | | 178300, |
| | | | | | | | | 185470, |
| | | | | | | | | 211420, |
| | | | | | | | | 230000, |
| | | | | | | | | 230350, |
| | | | | | | | | 255800, |
| | | | | | | | | 601990, |
| | | | | | | | | 602023, |
| | | | | | | | | 602771 |
| HAHAD95 | 865104 | 600 | 106-279 | 1215 | Gly-7 to Gly-14. | H0002: 1 | | |
| HAFBG30 | 693363 | 601 | 284-472 | 1216 | | T0049: 1 and L0731: 1. | | |
| HAFAY37 | 928705 | 602 | 332-529 | 1217 | | T0049: 1, L0598: 1, | | |
| | | | | | | L0766: 1 and L0748: 1. | | |
| HAFAJ63 | 845452 | 603 | 273-497 | 1218 | | T0049: 1, L0748: 1 and | | |
| | | | | | | L0754: 1. | | |
| HAECA04 | 932993 | 604 | 40-195 | 1219 | Glu-1 to Arg-9, | T0048: 1 and L0060: 1. | | |
| | | | | | Leu-17 to Ala-25. | | | |
| HAEAM82 | 781539 | 605 | 272-571 | 1220 | Tyr-13 to Met-23, | T0048: 1 and L0595: 1. | | |
| | | | | | Ser-40 to Pro-49. | | | |

[0062] The first column in Table 1A provides a unique “Clone ID NO:Z” for a cDNA clone related to each contig sequence disclosed in Table 1A. This clone ID references the cDNA clone which contains at least the 5′ most sequence of the assembled contig, and at least a portion of SEQ ID NO:X was determined by directly sequencing the referenced clone. The reference clone may have more sequence than described in the sequence listing or the clone may have less. In the vast majority of cases, however, the clone is believed to encode a full-length polypeptide. In the case where a clone is not full-length, a full-length cDNA can be obtained by methods known in the art and/or as described elsewhere herein.

[0063] The second column in Table 1A provides a unique “Contig ID” identification for each contig sequence. The third column provides the “SEQ ID NO:X” identifier for each of the cardiovascular system associated contig polynucleotide sequences disclosed in Table 1A. The fourth column, “ORF (From-To)”, provides the location (i.e., nucleotide position numbers) within the polynucleotide sequence “SEQ ID NO:X” that delineate the preferred open reading frame (ORF) shown in the sequence listing and referenced in Table 1A, column 5, as SEQ ID NO:Y. Where the nucleotide position number “To” is lower than the nucleotide position number “From”, the preferred ORF is the reverse complement of the referenced polynucleotide sequence.

[0064] The fifth column in Table 1A provides the corresponding SEQ ID NO:Y for the polypeptide sequence encoded by the preferred ORF delineated in column 4. In one embodiment, the invention provides an amino acid sequence comprising, or alternatively consisting of, a polypeptide encoded by the portion of SEQ ID NO:X delineated by “ORF (From-To)”. Also provided are polynucleotides encoding such amino acid sequences and the complementary strand thereto.

[0065] Column 6 in Table 1A lists residues comprising epitopes contained in the polypeptides encoded by the preferred ORF (SEQ ID NO:Y), as predicted using the algorithm of Jameson and Wolf, (1988) Comp. Appl. Biosci. 4:181-186. The Jameson-Wolf antigenic analysis was performed using the computer program PROTEAN (Version 3.11 for the Power MacIntosh, DNASTAR, Inc., 1228 South Park Street Madison, Wis.). In specific embodiments, polypeptides of the invention comprise, or alternatively consist of, at least one, two, three, four, five or more of the predicted epitopes as described in Table 1A. It will be appreciated that depending on the analytical criteria used to predict antigenic determinants, the exact address of the determinant may vary slightly.

[0066] Column 7 in Table 1A provides an expression profile and library code: count for each of the contig sequences (SEQ ID NO:X) disclosed in Table 1A, which can routinely be combined with the information provided in Table 4 and used to determine the normal or diseased tissues, cells, and/or cell line libraries which predominantly express the polynucleotides of the invention. The first number in column 7 (preceding the colon), represents the tissue/cell source identifier code corresponding to the code and description provided in Table 4. For those identifier codes in which the first two letters are not “AR”, the second number in column 7 (following the colon) represents the number of times a sequence corresponding to the reference polynucleotide sequence was identified in the tissue/cell source. Those tissue/cell source identifier codes in which the first two letters are “AR” designate information generated using DNA array technology. Utilizing this technology, cDNAs were amplified by PCR and then transferred, in duplicate, onto the array. Gene expression was assayed through hybridization of first strand cDNA probes to the DNA array. cDNA probes were generated from total RNA extracted from a variety of different tissues and cell lines. Probe synthesis was performed in the presence of ³³P dCTP, using oligo(dT) to prime reverse transcription. After hybridization, high stringency washing conditions were employed to remove non-specific hybrids from the array. The remaining signal, emanating from each gene target, was measured using a Phosphorimager. Gene expression was reported as Phosphor Stimulating Luminescence (PSL) which reflects the level of phosphor signal generated from the probe hybridized to each of the gene targets represented on the array. A local background signal subtraction was performed before the total signal generated from each array was used to normalize gene expression between the different hybridizations. The value presented after “[array code]:” represents the mean of the duplicate values, following background subtraction and probe normalization. One of skill in the art could routinely use this information to identify normal and/or diseased tissue(s) which show a predominant expression pattern of the corresponding polynucleotide of the invention or to identify polynucleotides which show predominant and/or specific tissue and/or cell expression. The sequences disclosed herein have been determined to be predominantly expressed in cardiovascular system tissues, including normal and diseased cardiovascular system tissues (See Table 1A, column 7 and Table 4).

[0067] Column 8 in Table 1A provides a chromosomal map location for certain polynucleotides of the invention. Chromosomal location was determined by finding exact matches to EST and cDNA sequences contained in the NCBI (National Center for Biotechnology Information) UniGene database. Each sequence in the UniGene database is assigned to a “cluster”; all of the ESTs, cDNAs, and STSs in a cluster are believed to be derived from a single gene. Chromosomal mapping data is often available for one or more sequence(s) in a UniGene cluster; this data (if consistent) is then applied to the cluster as a whole. Thus, it is possible to infer the chromosomal location of a new polynucleotide sequence by determining its identity with a mapped UniGene cluster.

[0068] A modified version of the computer program BLASTN (Altshul et al., J. Mol. Biol. 215:403-410 (1990), and Gish et al., Nat. Genet. 3:266-272 (1993)) was used to search the UniGene database for EST or cDNA sequences that contain exact or near-exact matches to a polynucleotide sequence of the invention (the ‘Query’). A sequence from the UniGene database (the ‘Subject’) was said to be an exact match if it contained a segment of 50 nucleotides in length such that 48 of those nucleotides were in the same order as found in the Query sequence. If all of the matches that met this criteria were in the same UniGene cluster, and mapping data was available for this cluster, it is indicated in Table 1A under the heading “Cytologic Band”. Where a cluster had been further localized to a distinct cytologic band, that band is disclosed; where no banding information was available, but the gene had been localized to a single chromosome, the chromosome is disclosed.

[0069] Once a presumptive chromosomal location was determined for a polynucleotide of the invention, an associated disease locus was identified by comparison with a database of diseases, which have been experimentally associated with genetic loci. The database used was the Morbid Map, derived from OMIM™ (supra). If the putative chromosomal location of a polynucleotide of the invention (Query sequence) was associated with a disease in the Morbid Map database, an OMIM reference identification number was noted in column 9, Table 1A, labeled “OMIM Disease Reference(s)”. Table 5 is a key to the OMIM reference identification numbers (column 1), and provides a description of the associated disease in Column 2.

TABLE 1B

| Clone ID | SEQ ID | CONTIG | | SEQ ID | EXON |
|---|---|---|---|---|---|
| NO:Z | NO:X | ID: | BAC ID: A | NO:B | From-To |
| HAHCL07 | 11 | 952661 | AC022706 | 1241 | 1-1814 |
| HAHCL07 | 11 | 952661 | AC022916 | 1242 | 1-1814 |
| HAHCL07 | 11 | 952661 | AC022706 | 1243 | 1-107 |
| HAHCL07 | 11 | 952661 | AC022916 | 1244 | 1-107 |
| HAHCP41 | 13 | 712086 | AP002755 | 1245 | 1-326 |
| HAHCP41 | 13 | 712086 | AP000774 | 1246 | 1-326 |
| HAHCP41 | 13 | 712086 | AC020742 | 1247 | 1-326 |
| HAHCP41 | 13 | 712086 | AC001234 | 1248 | 1-326 |
| HAHCP41 | 13 | 712086 | AP002755 | 1249 | 1-538 |
| HAHCP41 | 13 | 712086 | AP000774 | 1250 | 1-538 |
| HAHCP41 | 13 | 712086 | AC020742 | 1251 | 1-538 |
| HAHCP41 | 13 | 712086 | AC001234 | 1252 | 1-538 |
| HAHCP49 | 14 | 722659 | AC046164 | 1253 | 1-244 |
| HAHCP55 | 15 | 865095 | AC011610 | 1254 | 1-125 |
| | | | | | 1640-1708 |
| | | | | | 1938-2132 |
| | | | | | 3921-4067 |
| | | | | | 4332-4975 |
| | | | | | 6267-6343 |
| | | | | | 6434-6748 |
| | | | | | 6940-7010 |
| | | | | | 9423-9456 |
| | | | | | 9548-9900 |
| | | | | | 12131-12199 |
| | | | | | 13540-13627 |
| | | | | | 13844-13921 |
| | | | | | 14168-14201 |
| | | | | | 14997-15076 |
| | | | | | 15386-16024 |
| | | | | | 16177-16523 |
| | | | | | 16776-16849 |
| | | | | | 17304-17711 |
| | | | | | 17901-18042 |
| | | | | | 18921-19274 |
| HAHCP55 | 15 | 865095 | AC066599 | 1255 | 1-69 |
| | | | | | 524-931 |
| | | | | | 1121-1262 |
| | | | | | 2140-2493 |
| HAHCP55 | 15 | 865095 | AC022382 | 1256 | 1-69 |
| | | | | | 524-931 |
| | | | | | 1121-1262 |
| | | | | | 2142-2495 |
| HAHCP55 | 15 | 865095 | AC024163 | 1257 | 1-69 |
| | | | | | 524-931 |
| | | | | | 1121-1262 |
| | | | | | 2140-2493 |
| HAHCP55 | 15 | 865095 | AC007850 | 1258 | 1-125 |
| | | | | | 1640-1708 |
| | | | | | 1938-2132 |
| | | | | | 3921-4067 |
| | | | | | 4332-4975 |
| | | | | | 6267-6343 |
| | | | | | 6434-6748 |
| | | | | | 6940-7010 |
| | | | | | 9423-9456 |
| | | | | | 9548-9900 |
| | | | | | 12130-12198 |
| | | | | | 13539-13626 |
| | | | | | 13843-13920 |
| | | | | | 14167-14200 |
| | | | | | 14996-15075 |
| | | | | | 15385-16023 |
| | | | | | 16176-16522 |
| | | | | | 16774-16847 |
| | | | | | 17302-17709 |
| | | | | | 17899-18040 |
| | | | | | 18918-19206 |
| HAHCP55 | 15 | 865095 | AC008034 | 1259 | 1-125 |
| | | | | | 1640-1708 |
| | | | | | 1938-2132 |
| | | | | | 3921-4067 |
| | | | | | 4332-4975 |
| | | | | | 6267-6343 |
| | | | | | 6434-6748 |
| | | | | | 6940-7010 |
| | | | | | 9637-9816 |
| | | | | | 12130-12198 |
| | | | | | 13539-13626 |
| | | | | | 13843-13920 |
| | | | | | 14167-14200 |
| | | | | | 14996-15075 |
| | | | | | 15385-16023 |
| | | | | | 16176-16522 |
| | | | | | 16774-16847 |
| | | | | | 17302-17709 |
| | | | | | 17899-18040 |
| | | | | | 18918-19271 |
| | | | | | 20211-20888 |
| | | | | | 21472-21834 |
| | | | | | 22101-22510 |
| | | | | | 24271-24974 |
| | | | | | 25056-25409 |
| | | | | | 25860-26636 |
| | | | | | 26691-26822 |
| | | | | | 27128-28128 |
| | | | | | 30303-30454 |
| | | | | | 30745-31348 |
| HAHCP55 | 15 | 865095 | AC066599 | 1260 | 1-347 |
| HAHCP55 | 15 | 865095 | AC022382 | 1261 | 1-347 |
| HAHCP55 | 15 | 865095 | AC011610 | 1262 | 1-564 |
| HAHCP55 | 15 | 865095 | AC066599 | 1263 | 1-678 |
| HAHCP55 | 15 | 865095 | AC022382 | 1264 | 1-678 |
| HAHCP55 | 15 | 865095 | AC024163 | 1265 | 1-347 |
| HAHCP55 | 15 | 865095 | AC007850 | 1266 | 1-564 |
| HAHCP55 | 15 | 865095 | AC008034 | 1267 | 1-564 |
| HAHCP55 | 15 | 865095 | AC024163 | 1268 | 1-678 |
| HAHCP67 | 16 | 756916 | AC044892 | 1269 | 1-160 |
| | | | | | 1117-1442 |
| | | | | | 1844-2103 |
| | | | | | 2869-3022 |
| | | | | | 3971-4116 |
| | | | | | 5198-5472 |
| | | | | | 6138-6590 |
| | | | | | 7022-7205 |
| | | | | | 7607-7703 |
| | | | | | 7910-8685 |
| | | | | | 9075-9227 |
| | | | | | 9362-9724 |
| | | | | | 9937-10537 |
| HAHCP67 | 16 | 756916 | AC006252 | 1270 | 1-160 |
| | | | | | 1116-1441 |
| | | | | | 1843-2102 |
| | | | | | 2868-3021 |
| | | | | | 3978-4123 |
| | | | | | 5226-5479 |
| | | | | | 6145-6597 |
| | | | | | 7029-7211 |
| | | | | | 7613-7709 |
| | | | | | 7916-8691 |
| | | | | | 9081-9233 |
| | | | | | 9368-9730 |
| | | | | | 9943-10543 |
| HAHCP67 | 16 | 756916 | AC044892 | 1271 | 1-995 |
| | | | | | 1441-1664 |
| HAHCP67 | 16 | 756916 | AC006252 | 1272 | 1-995 |
| | | | | | 1441-1664 |
| HAHCP91 | 17 | 789998 | AC005833 | 1273 | 1-288 |
| HAHCP91 | 17 | 789998 | AC005833 | 1274 | 1-216 |
| HAHCP91 | 17 | 789998 | AC005833 | 1275 | 1-328 |
| | | | | | 378-1059 |
| | | | | | 1980-2100 |
| HAHCR57 | 18 | 865096 | AC073487 | 1276 | 1-587 |
| | | | | | 2146-3842 |
| | | | | | 3989-4201 |
| | | | | | 5499-5529 |
| | | | | | 6178-6728 |
| | | | | | 7177-7679 |
| | | | | | 8088-9978 |
| | | | | | 10716-10977 |
| | | | | | 10981-11359 |
| | | | | | 11459-11652 |
| | | | | | 11709-12255 |
| | | | | | 12352-12457 |
| | | | | | 12485-12662 |
| | | | | | 12775-12853 |
| | | | | | 12946-13797 |
| | | | | | 13854-13972 |
| | | | | | 14616-14764 |
| | | | | | 15230-15403 |
| | | | | | 15550-15610 |
| | | | | | 15784-15879 |
| | | | | | 16027-16157 |
| | | | | | 16273-16359 |
| | | | | | 16716-16906 |
| | | | | | 17040-17252 |
| | | | | | 18205-18727 |
| | | | | | 18898-19487 |
| | | | | | 20516-20784 |
| | | | | | 21205-21286 |
| | | | | | 21386-21515 |
| | | | | | 25809-26225 |
| HAHCR57 | 18 | 865096 | AC073487 | 1277 | 1-259 |
| HAHEE04 | 19 | 922257 | AL158169 | 1278 | 1-217 |
| | | | | | 532-704 |
| | | | | | 791-908 |
| | | | | | 1623-1788 |
| | | | | | 1831-1985 |
| | | | | | 2107-2447 |
| | | | | | 4415-4873 |
| | | | | | 5085-5172 |
| | | | | | 5281-5360 |
| | | | | | 5579-5646 |
| | | | | | 5738-5988 |
| | | | | | 6535-8317 |
| HAHEE04 | 19 | 922257 | AL356104 | 1279 | 1-459 |
| | | | | | 671-758 |
| | | | | | 867-946 |
| HAHEE04 | 19 | 922257 | AL158169 | 1280 | 1-84 |
| HAHEE04 | 19 | 922257 | AL356104 | 1281 | 1-68 |
| | | | | | 160-410 |
| | | | | | 957-2739 |
| HAHEO46 | 21 | 718772 | AC008640 | 1282 | 1-988 |
| HAHEO46 | 21 | 718772 | AC011376 | 1283 | 1-988 |
| HAHEO46 | 21 | 718772 | AC008640 | 1284 | 1-308 |
| HAHEO46 | 21 | 718772 | AC011376 | 1285 | 1-308 |
| HAHES10 | 22 | 961594 | AC007618 | 1286 | 1-417 |
| HAHES10 | 22 | 961594 | AC007618 | 1287 | 1-545 |
| HAHES10 | 22 | 961594 | AC007618 | 1288 | 1-557 |
| HAHFX20 | 23 | 925753 | AC022965 | 1289 | 1-265 |
| HAHFX20 | 23 | 925753 | AL390725 | 1290 | 1-265 |
| HAHFX20 | 23 | 925753 | AC022965 | 1291 | 1-489 |
| HAHFX20 | 23 | 925753 | AL390725 | 1292 | 1-489 |
| HAHFX20 | 23 | 925753 | AC022965 | 1293 | 1-518 |
| HAHFX20 | 23 | 925753 | AL390725 | 1294 | 1-518 |
| HAHHO04 | 25 | 925814 | AC009417 | 1295 | 1-166 |
| | | | | | 344-432 |
| | | | | | 941-1480 |
| HAHHO04 | 25 | 925814 | AC073650 | 1296 | 1-31 |
| | | | | | 529-793 |
| | | | | | 1012-1296 |
| | | | | | 1451-1539 |
| | | | | | 2048-2587 |
| HAHHO04 | 25 | 925814 | AC009417 | 1297 | 1-289 |
| HAHHO04 | 25 | 925814 | AC073650 | 1298 | 1-289 |
| HAHHS01 | 26 | 913863 | AC011189 | 1299 | 1-290 |
| HAHHS01 | 26 | 913863 | AC027040 | 1300 | 1-290 |
| HAHHS01 | 26 | 913863 | AC002993 | 1301 | 1-290 |
| HAHHS01 | 26 | 913863 | AC011189 | 1302 | 1-562 |
| HAHIK10 | 27 | 961425 | AL354822 | 1303 | 1-172 |
| HAHIK10 | 27 | 961425 | AL159982 | 1304 | 1-168 |
| HAHIK10 | 27 | 961425 | AC025100 | 1305 | 1-170 |
| HAHIK10 | 27 | 961425 | AC023572 | 1306 | 1-173 |
| HAHIK10 | 27 | 961425 | AL354817 | 1307 | 1-173 |
| HAHIK10 | 27 | 961425 | AL354697 | 1308 | 1-173 |
| HAHIK10 | 27 | 961425 | AC000382 | 1309 | 1-170 |
| HAH1K10 | 27 | 961425 | AC025100 | 1310 | 1-293 |
| HAHIK10 | 27 | 961425 | AC023572 | 1311 | 1-293 |
| HAHIK10 | 27 | 961425 | AL354822 | 1312 | 1-293 |
| HAHIK10 | 27 | 961425 | AL354817 | 1313 | 1-455 |
| HAHIK10 | 27 | 961425 | AL354697 | 1314 | 1-455 |
| HAHIK10 | 27 | 961425 | AL159982 | 1315 | 1-292 |
| HAHIW08 | 28 | 955803 | AC002413 | 1316 | 1-647 |
| HAHIW08 | 28 | 955803 | AL139396 | 1317 | 1-647 |
| HAHIW08 | 28 | 955803 | AC002413 | 1318 | 1-352 |
| HAHSC42 | 29 | 695111 | AC073389 | 1319 | 1-119 |
| | | | | | 1375-1607 |
| | | | | | 2148-2689 |
| | | | | | 2792-3076 |
| | | | | | 3843-4509 |
| | | | | | 4904-5519 |
| HAHSC42 | 29 | 695111 | AC073389 | 1320 | 1-457 |
| HAHSC42 | 29 | 695111 | AC073389 | 1321 | 1-327 |
| HCMSC52 | 31 | 522615 | AC026228 | 1322 | 1-111 |
| HCMSQ77 | 33 | 862373 | AC006463 | 1323 | 1-303 |
| HCMSX59 | 36 | 522598 | AC012134 | 1324 | 1-362 |
| HCMSX59 | 36 | 522598 | AC073904 | 1325 | 1-361 |
| HCMSX59 | 36 | 522598 | AP001811 | 1326 | 1-361 |
| HCMSX59 | 36 | 522598 | AP001811 | 1327 | 1-558 |
| HCMSX59 | 36 | 522598 | AC012134 | 1328 | 1-558 |
| HCMSX59 | 36 | 522598 | AC073904 | 1329 | 1-558 |
| HELAF85 | 37 | 507230 | AC020988 | 1330 | 1-320 |
| HELAF85 | 37 | 507230 | AC020988 | 1331 | 1-886 |
| | | | | | 900-3110 |
| HELAI26 | 38 | 920922 | AL157829 | 1332 | 1-327 |
| | | | | | 383-585 |
| | | | | | 5577-5852 |
| | | | | | 7628-7977 |
| | | | | | 15024-15185 |
| | | | | | 23099-23432 |
| HELAI26 | 38 | 920922 | AC015464 | 1333 | 1-276 |
| HELAI26 | 38 | 920922 | AL133284 | 1334 | 1-276 |
| HELAI26 | 38 | 920922 | AC015464 | 1335 | 1-350 |
| HELAV61 | 40 | 507205 | AL390880 | 1336 | 1-349 |
| HELAV61 | 40 | 507205 | AL390880 | 1337 | 1-264 |
| HELAV61 | 40 | 507205 | AL390880 | 1338 | 1-486 |
| HELBD70 | 42 | 527677 | AC026185 | 1339 | 1-848 |
| HELBD70 | 42 | 527677 | AC018494 | 1340 | 1-848 |
| HELBD70 | 42 | 527677 | AC026185 | 1341 | 1-543 |
| HELBD70 | 42 | 527677 | AC026185 | 1342 | 1-271 |
| HELBD70 | 42 | 527677 | AC018494 | 1343 | 1-543 |
| HELBD70 | 42 | 527677 | AC018494 | 1344 | 1-271 |
| HELBN45 | 44 | 527666 | AL031295 | 1345 | 1-293 |
| HELBN45 | 44 | 527666 | AL031295 | 1346 | 1-289 |
| HELDG77 | 46 | 750478 | AL159170 | 1347 | 1-541 |
| HELDG77 | 46 | 750478 | AL390024 | 1348 | 1-541 |
| HELDG77 | 46 | 750478 | AL159170 | 1349 | 1-483 |
| | | | | | 551-674 |
| HELEF52 | 51 | 506677 | AC012273 | 1350 | 1-317 |
| HELEF52 | 51 | 506677 | AC012273 | 1351 | 1-333 |
| HELER30 | 53 | 574038 | AC006057 | 1352 | 1-1857 |
| HELER30 | 53 | 574038 | AC006057 | 1353 | 1-75 |
| HELEU91 | 57 | 851160 | AP002386 | 1354 | 1-337 |
| HELEU91 | 57 | 851160 | AP001922 | 1355 | 1-337 |
| HELEU91 | 57 | 851160 | AP000649 | 1356 | 1-352 |
| HELEU91 | 57 | 851160 | AP001142 | 1357 | 1-351 |
| HELEU91 | 57 | 851160 | AC011256 | 1358 | 1-352 |
| HELEU91 | 57 | 851160 | AP001142 | 1359 | 1-492 |
| HELEU91 | 57 | 851160 | AP000649 | 1360 | 1-492 |
| HELEU91 | 57 | 851160 | AC011256 | 1361 | 1-492 |
| HELEU91 | 57 | 851160 | AP001142 | 1362 | 1-156 |
| HELEU91 | 57 | 851160 | AC011256 | 1363 | 1-156 |
| HELEW62 | 58 | 574025 | AC020656 | 1364 | 1-398 |
| | | | | | 2110-2216 |
| | | | | | 2736-3244 |
| | | | | | 5756-5912 |
| | | | | | 6792-6965 |
| | | | | | 7092-7180 |
| | | | | | 7274-7632 |
| | | | | | 7650-8158 |
| | | | | | 8486-8607 |
| | | | | | 8718-9027 |
| | | | | | 9103-9257 |
| | | | | | 10633-10932 |
| | | | | | 11428-11621 |
| | | | | | 11900-12183 |
| | | | | | 12559-14453 |
| | | | | | 14491-15109 |
| | | | | | 15316-15541 |
| | | | | | 16291-16817 |
| | | | | | 16893-17205 |
| | | | | | 17694-23419 |
| HELEW62 | 58 | 574025 | AC019161 | 1365 | 1-480 |
| | | | | | 808-929 |
| | | | | | 1040-1349 |
| | | | | | 1425-1579 |
| | | | | | 2955-3254 |
| | | | | | 3750-3943 |
| HELEW62 | 58 | 574025 | AC020656 | 1366 | 1-115 |
| HELEW62 | 58 | 574025 | AC019161 | 1367 | 1-283 |
| HELEW62 | 58 | 574025 | AC019161 | 1368 | 1-355 |
| HELFF40 | 59 | 574058 | AC000119 | 1369 | 1-452 |
| | | | | | 1221-1486 |
| | | | | | 2326-2549 |
| | | | | | 2833-2982 |
| | | | | | 3534-3620 |
| | | | | | 9221-10633 |
| | | | | | 11535-11911 |
| | | | | | 12219-12718 |
| HELFF40 | 59 | 574058 | AC000119 | 1370 | 1-644 |
| HELFH33 | 60 | 576530 | AC025152 | 1371 | 1-267 |
| HELFH33 | 60 | 576530 | AC008941 | 1372 | 1-246 |
| HELFH33 | 60 | 576530 | AC010073 | 1373 | 1-253 |
| HELFJ03 | 61 | 921943 | AL360083 | 1374 | 1-824 |
| HELFJ03 | 61 | 921943 | AL360083 | 1375 | 1-285 |
| HELFJ03 | 61 | 921943 | AL360083 | 1376 | 1-133 |
| HELFQ79 | 63 | 577248 | AC025152 | 1377 | 1-359 |
| HELFQ79 | 63 | 577248 | AC021062 | 1378 | 1-349 |
| HELFQ79 | 63 | 577248 | AC018720 | 1379 | 1-548 |
| HELFQ79 | 63 | 577248 | AC034250 | 1380 | 1-356 |
| HELFQ79 | 63 | 577248 | AC020865 | 1381 | 1-670 |
| HELGA54 | 64 | 576374 | AC023611 | 1382 | 1-180 |
| HELGA54 | 64 | 576374 | AC016131 | 1383 | 1-399 |
| HELGC24 | 65 | 576377 | AC016927 | 1384 | 1-93 |
| | | | | | 436-573 |
| | | | | | 1504-1585 |
| | | | | | 1922-1971 |
| | | | | | 2635-2726 |
| | | | | | 3541-3731 |
| | | | | | 6137-6496 |
| | | | | | 6517-6700 |
| | | | | | 7141-7604 |
| | | | | | 7621-8670 |
| | | | | | 8705-9096 |
| | | | | | 9766-10170 |
| | | | | | 10425-10501 |
| | | | | | 10987-11087 |
| | | | | | 11341-11941 |
| | | | | | 12244-15601 |
| | | | | | 15897-16018 |
| HELGC24 | 65 | 576377 | AC024903 | 1385 | 1-244 |
| | | | | | 278-784 |
| | | | | | 2960-3209 |
| | | | | | 6353-6483 |
| | | | | | 6826-6963 |
| | | | | | 7892-7976 |
| | | | | | 8310-8359 |
| | | | | | 9023-9114 |
| | | | | | 9928-10118 |
| | | | | | 12523-12882 |
| | | | | | 12903-13086 |
| | | | | | 13527-13990 |
| | | | | | 14007-15056 |
| | | | | | 15091-15482 |
| | | | | | 16152-16556 |
| | | | | | 16811-16887 |
| | | | | | 17373-17473 |
| | | | | | 17727-18327 |
| | | | | | 18630-21983 |
| | | | | | 22279-22400 |
| HELGC24 | 65 | 576377 | AC016927 | 1386 | 1-442 |
| HELGC24 | 65 | 576377 | AC024903 | 1387 | 1-442 |
| HELGC32 | 66 | 699375 | AC010646 | 1388 | 1-147 |
| | | | | | 327-996 |
| | | | | | 1637-1802 |
| | | | | | 1860-2209 |
| | | | | | 2317-3026 |
| HELGC32 | 66 | 699375 | AC010646 | 1389 | 1-146 |
| HELGC32 | 66 | 699375 | AC010646 | 1390 | 1-425 |
| | | | | | 665-988 |
| | | | | | 1074-1240 |
| | | | | | 1630-1763 |
| | | | | | 2370-2873 |
| | | | | | 3013-3759 |
| | | | | | 3800-4750 |
| | | | | | 5484-5900 |
| | | | | | 6149-6404 |
| | | | | | 7522-7653 |
| | | | | | 7678-7822 |
| | | | | | 9244-9344 |
| | | | | | 9545-9845 |
| | | | | | 10064-10093 |
| HELGG77 | 68 | 825795 | AC073531 | 1391 | 1-935 |
| HELGQ48 | 72 | 851178 | AL356982 | 1392 | 1-337 |
| HELGQ48 | 72 | 851178 | AL356982 | 1393 | 1-485 |
| HELGQ48 | 72 | 851178 | AL356982 | 1394 | 1-1124 |
| HELGT48 | 73 | 879483 | AC012043 | 1395 | 1-647 |
| HELGT48 | 73 | 879483 | AC012043 | 1396 | 1-346 |
| HELGZ48 | 74 | 721742 | AC010357 | 1397 | 1-411 |
| HELHB12 | 75 | 970863 | AC026088 | 1398 | 1-417 |
| HELHB12 | 75 | 970863 | AC026088 | 1399 | 1-500 |
| HELHB12 | 75 | 970863 | AC026088 | 1400 | 1-170 |
| HELHF07 | 78 | 949067 | AC073669 | 1401 | 1-597 |
| HELHF07 | 78 | 949067 | AC023605 | 1402 | 1-583 |
| HELHF07 | 78 | 949067 | AC074220 | 1403 | 1-362 |
| HELHF07 | 78 | 949067 | AC074220 | 1404 | 1-105 |
| HEMBC56 | 80 | 577797 | AC016582 | 1405 | 1-384 |
| HEMBC56 | 80 | 577797 | AC008395 | 1406 | 1-384 |
| HEMBC56 | 80 | 577797 | AC016582 | 1407 | 1-584 |
| HEMBC56 | 80 | 577797 | AC016582 | 1408 | 1-441 |
| HEMBC56 | 80 | 577797 | AC008395 | 1409 | 1-584 |
| HEMBC56 | 80 | 577797 | AC008395 | 1410 | 1-441 |
| HEMBI16 | 81 | 507220 | AL354935 | 1411 | 1-218 |
| HEMBI16 | 81 | 507220 | AL161792 | 1412 | 1-218 |
| HEMBI16 | 81 | 507220 | AL354935 | 1413 | 1-357 |
| HEMBI16 | 81 | 507220 | AL161792 | 1414 | 1-358 |
| HEMBZ84 | 82 | 527989 | AC006425 | 1415 | 1-187 |
| | | | | | 1153-1682 |
| | | | | | 2086-2186 |
| | | | | | 3494-5612 |
| | | | | | 5887-6014 |
| | | | | | 7903-8173 |
| | | | | | 8656-8807 |
| HEMBZ84 | 82 | 527989 | AC006425 | 1416 | 1-480 |
| HEMCM25 | 84 | 948738 | AL390057 | 1417 | 1-484 |
| HEMCM25 | 84 | 948738 | AC016105 | 1418 | 1-484 |
| HEMCM25 | 84 | 948738 | AL390057 | 1419 | 1-179 |
| HEMCM25 | 84 | 948738 | AC016105 | 1420 | 1-215 |
| | | | | | 219-1162 |
| HEMDG56 | 85 | 715834 | AL022311 | 1421 | 1-391 |
| | | | | | 950-1644 |
| | | | | | 3306-3805 |
| | | | | | 3846-4050 |
| | | | | | 5772-5953 |
| | | | | | 6844-7026 |
| | | | | | 7365-7583 |
| | | | | | 7689-7802 |
| | | | | | 8673-8951 |
| | | | | | 8981-9224 |
| | | | | | 11685-11826 |
| | | | | | 12396-12476 |
| | | | | | 12580-12702 |
| | | | | | 13304-13554 |
| | | | | | 14057-15041 |
| HEMDG56 | 85 | 715834 | AL022311 | 1422 | 1-314 |
| HEMDG56 | 85 | 715834 | AL022311 | 1423 | 1-226 |
| HEMDG83 | 86 | 576508 | AC068870 | 1424 | 1-599 |
| HEMDG83 | 86 | 576508 | AC068870 | 1425 | 1-312 |
| HEMDG83 | 86 | 576508 | AC068870 | 1426 | 1-394 |
| HEMDK92 | 87 | 574278 | AC027225 | 1427 | 1-297 |
| HEMDK92 | 87 | 574278 | AF127577 | 1428 | 1-348 |
| HEMEN63 | 93 | 578717 | AC008964 | 1429 | 1-309 |
| HEMEN63 | 93 | 578717 | AC010633 | 1430 | 1-309 |
| HEMFX2O | 97 | 840164 | AC011468 | 1431 | 1-1022 |
| | | | | | 1026-1219 |
| | | | | | 1226-1529 |
| | | | | | 2871-4241 |
| | | | | | 5024-5251 |
| HEMFX20 | 97 | 840164 | AC011468 | 1432 | 1-465 |
| HEMFX20 | 97 | 840164 | AC011468 | 1433 | 1-492 |
| HHBBK65 | 102 | 588062 | AC069164 | 1434 | 1-436 |
| HHBBL40 | 103 | 588066 | AL136979 | 1435 | 1-200 |
| | | | | | 1109-1226 |
| | | | | | 1290-1574 |
| | | | | | 2005-2748 |
| | | | | | 2835-3402 |
| | | | | | 3495-4093 |
| | | | | | 4122-4398 |
| | | | | | 4639-4787 |
| | | | | | 6077-6182 |
| | | | | | 8236-8462 |
| | | | | | 10743-10887 |
| | | | | | 11474-12059 |
| | | | | | 12155-12358 |
| | | | | | 14140-16057 |
| HHBBL40 | 103 | 588066 | AL136979 | 1436 | 1-225 |
| HHBEM70 | 107 | 756949 | AC025036 | 1437 | 1-148 |
| HHBEM70 | 107 | 756949 | AC011953 | 1438 | 1-126 |
| HHBEM70 | 107 | 756949 | AC027300 | 1439 | 1-158 |
| HHBEN34 | 108 | 703745 | AC068489 | 1440 | 1-383 |
| HHBEN34 | 108 | 703745 | AC068489 | 1441 | 1-127 |
| HHBEN34 | 108 | 703745 | AC068489 | 1442 | 1-546 |
| HHBFL31 | 109 | 800035 | AC069066 | 1443 | 1-295 |
| HHBFL31 | 109 | 800035 | AC011186 | 1444 | 1-295 |
| HHBFL31 | 109 | 800035 | AC069066 | 1445 | 1-195 |
| HHBFL31 | 109 | 800035 | AC011186 | 1446 | 1-186 |
| HHBFW44 | 110 | 716283 | AC026596 | 1447 | 1-263 |
| HHBFW44 | 110 | 716283 | AC026596 | 1448 | 1-545 |
| HHBGN52 | 113 | 726391 | AC007377 | 1449 | 1-648 |
| HHBGY59 | 117 | 792027 | AC023356 | 1450 | 1-230 |
| | | | | | 1461-1708 |
| | | | | | 3063-3429 |
| | | | | | 3456-3928 |
| | | | | | 5267-5599 |
| HHBGY59 | 117 | 792027 | AC023356 | 1451 | 1-1398 |
| | | | | | 1771-2539 |
| | | | | | 2583-3164 |
| HHBHK84 | 120 | 858431 | AL031719 | 1452 | 1-339 |
| HHBHK84 | 120 | 858431 | AC046159 | 1453 | 1-339 |
| HHFBD39 | 123 | 826307 | AC009595 | 1454 | 1-222 |
| HHFBD39 | 123 | 826307 | AC009595 | 1455 | 1-268 |
| HHFBF32 | 125 | 502872 | AC012482 | 1456 | 1-784 |
| HHFBF32 | 125 | 502872 | AC011200 | 1457 | 1-783 |
| HHFBF32 | 125 | 502872 | AC012482 | 1458 | 1-348 |
| HHFBF32 | 125 | 502872 | AC011200 | 1459 | 1-348 |
| HHFBJ81 | 128 | 502954 | AL133459 | 1460 | 1-344 |
| HHFBJ81 | 128 | 502954 | AC068460 | 1461 | 1-344 |
| HHFBJ81 | 128 | 502954 | AL133459 | 1462 | 1-333 |
| HHFBJ81 | 128 | 502954 | AC068460 | 1463 | 1-333 |
| HHFBL16 | 129 | 509237 | AC010336 | 1464 | 1-384 |
| HHFBL16 | 129 | 509237 | AC024700 | 1465 | 1-383 |
| HHFBL16 | 129 | 509237 | AC010336 | 1466 | 1-290 |
| HHFBL30 | 130 | 509238 | AL161790 | 1467 | 1-342 |
| HHFBL30 | 130 | 509238 | AC010741 | 1468 | 1-342 |
| HHFBL30 | 130 | 509238 | AL161790 | 1469 | 1-106 |
| HHFBL30 | 130 | 509238 | AC010741 | 1470 | 1-175 |
| HHFBL30 | 130 | 509238 | AC010741 | 1471 | 1-101 |
| HHFBL36 | 132 | 707930 | AC010261 | 1472 | 1-406 |
| HHFBL39 | 133 | 509637 | AC005343 | 1473 | 1-96 |
| | | | | | 784-1143 |
| | | | | | 1734-1849 |
| | | | | | 2133-2401 |
| | | | | | 3742-5557 |
| HHFBP60 | 135 | 503453 | AC002126 | 1474 | 1-277 |
| HHFBP60 | 135 | 503453 | AC002126 | 1475 | 1-105 |
| | | | | | 1581-1762 |
| | | | | | 2134-2537 |
| | | | | | 4582-4734 |
| | | | | | 5112-5210 |
| | | | | | 6383-6490 |
| | | | | | 6553-6642 |
| | | | | | 7270-7390 |
| | | | | | 7534-7570 |
| | | | | | 7840-7991 |
| | | | | | 9058-9375 |
| | | | | | 10822-10952 |
| | | | | | 12795-13209 |
| | | | | | 13221-13367 |
| | | | | | 13467-13582 |
| | | | | | 13723-13899 |
| | | | | | 14027-14125 |
| | | | | | 14701-15275 |
| HHFBP60 | 135 | 503453 | AC002126 | 1476 | 1-529 |
| HHFCH59 | 139 | 526389 | AC009474 | 1477 | 1-427 |
| HHFCH59 | 139 | 526389 | AC009474 | 1478 | 1-153 |
| HHFCI73 | 140 | 518427 | AC022919 | 1479 | 1-372 |
| HHFCI73 | 140 | 518427 | AC022919 | 1480 | 1-491 |
| HHFCK71 | 141 | 781725 | AC073990 | 1481 | 1-275 |
| | | | | | 554-732 |
| | | | | | 1216-1578 |
| | | | | | 1703-4646 |
| HHFCK71 | 141 | 781725 | AC005829 | 1482 | 1-275 |
| | | | | | 553-731 |
| | | | | | 1218-1580 |
| | | | | | 1989-4645 |
| HHFCK71 | 141 | 781725 | AC073990 | 1483 | 1-573 |
| HHFCK71 | 141 | 781725 | AC073990 | 1484 | 1-1043 |
| HHFCK71 | 141 | 781725 | AC005829 | 1485 | 1-573 |
| HHFCK71 | 141 | 781725 | AC005829 | 1486 | 1-922 |
| HHFCL91 | 142 | 509628 | AC013355 | 1487 | 1-688 |
| HHFCL91 | 142 | 509628 | AC018926 | 1488 | 1-384 |
| | | | | | 1804-2494 |
| HHFCL91 | 142 | 509628 | AC013355 | 1489 | 1-1408 |
| HHFCP67 | 143 | 536062 | AL353578 | 1490 | 1-295 |
| HHFCP67 | 143 | 536062 | AL353578 | 1491 | 1-473 |
| HHFCZ01 | 144 | 509163 | AC018939 | 1492 | 1-318 |
| HHFCZ01 | 144 | 509163 | AC016380 | 1493 | 1-317 |
| HHFCZ01 | 144 | 509163 | AL390755 | 1494 | 1-35 |
| | | | | | 2258-2648 |
| | | | | | 5778-5868 |
| | | | | | 7978-8065 |
| | | | | | 8456-8861 |
| | | | | | 9396-10035 |
| | | | | | 13564-13756 |
| | | | | | 14340-14510 |
| | | | | | 16437-16828 |
| | | | | | 17616-17707 |
| | | | | | 17794-17902 |
| | | | | | 19502-19601 |
| | | | | | 21470-21624 |
| | | | | | 21859-21971 |
| | | | | | 22649-22831 |
| | | | | | 22959-23049 |
| | | | | | 23854-24009 |
| | | | | | 24167-24269 |
| | | | | | 24379-24467 |
| | | | | | 24748-24987 |
| | | | | | 25534-25676 |
| | | | | | 26138-26270 |
| | | | | | 26365-26449 |
| | | | | | 26893-26995 |
| | | | | | 28121-28175 |
| | | | | | 30159-30348 |
| | | | | | 31129-31265 |
| | | | | | 32058-32441 |
| | | | | | 32580-33058 |
| | | | | | 33663-33737 |
| | | | | | 34588-34663 |
| | | | | | 35890-36034 |
| | | | | | 37329-37432 |
| | | | | | 37884-38392 |
| | | | | | 38447-38665 |
| | | | | | 39520-39794 |
| | | | | | 40417-40767 |
| | | | | | 41283-41815 |
| | | | | | 44971-45126 |
| | | | | | 45491-45610 |
| | | | | | 47830-48146 |
| | | | | | 48375-48564 |
| | | | | | 50441-51935 |
| HHFCZ01 | 144 | 509163 | AC016380 | 1495 | 1-189 |
| | | | | | 2067-3561 |
| HHFDA67 | 145 | 509387 | AC017000 | 1496 | 1-311 |
| HHFDG32 | 146 | 502957 | AC021453 | 1497 | 1-1671 |
| HHFDG32 | 146 | 502957 | AC021453 | 1498 | 1-117 |
| HHPDG32 | 146 | 502957 | AC021453 | 1499 | 1-677 |
| HHFDH38 | 148 | 536551 | AL136980 | 1500 | 1-331 |
| HHFDH38 | 148 | 536551 | AL136980 | 1501 | 1-661 |
| HHFDI42 | 150 | 500877 | AL359473 | 1502 | 1-442 |
| HHFDI62 | 151 | 745569 | AL354888 | 1503 | 1-1050 |
| HHFDI62 | 151 | 745569 | AL033527 | 1504 | 1-627 |
| HHFDI62 | 151 | 745569 | AL354888 | 1505 | 1-151 |
| HHFDI62 | 151 | 745569 | AL033527 | 1506 | 1-151 |
| HHFDI62 | 151 | 745569 | AL033527 | 1507 | 1-198 |
| HHFDI66 | 152 | 573283 | AC013723 | 1508 | 1-389 |
| HHFDI66 | 152 | 573283 | AC009973 | 1509 | 1-389 |
| HHFDJ87 | 154 | 575105 | AL158141 | 1510 | 1-341 |
| HHFDJ87 | 154 | 575105 | AL139111 | 1511 | 1-341 |
| HHFDJ87 | 154 | 575105 | AL158141 | 1512 | 1-532 |
| HHFDJ87 | 154 | 575105 | AL158141 | 1513 | 1-220 |
| HHFDJ87 | 154 | 575105 | AL139111 | 1514 | 1-532 |
| HHFDJ87 | 154 | 575105 | AL139111 | 1515 | 1-220 |
| HHFEJ18 | 156 | 525616 | AC027487 | 1516 | 1-1524 |
| HHFEJ18 | 156 | 525616 | AC068403 | 1517 | 1-1116 |
| HHFEJ18 | 156 | 525616 | AC006453 | 1518 | 1-2330 |
| HHFEJ18 | 156 | 525616 | AC005629 | 1519 | 1-2332 |
| HHFEJ18 | 156 | 525616 | AC068403 | 1520 | 1-1431 |
| HHFEJ18 | 156 | 525616 | AC027487 | 1521 | 1-129 |
| HHFEJ18 | 156 | 525616 | AC068403 | 1522 | 1-940 |
| HHFEJ18 | 156 | 525616 | AC006453 | 1523 | 1-174 |
| HHFEJ18 | 156 | 525616 | AC006453 | 1524 | 1-129 |
| HHFEJ18 | 156 | 525616 | AC005629 | 1525 | 1-182 |
| HHFEJ18 | 156 | 525616 | AC005629 | 1526 | 1-129 |
| HHFES51 | 158 | 525609 | AC022281 | 1527 | 1-171 |
| HHFES51 | 158 | 525609 | AC022281 | 1528 | 1-337 |
| HHFES51 | 158 | 525609 | AC022281 | 1529 | 1-322 |
| HHFFG41 | 159 | 575009 | AP002338 | 1530 | 1-412 |
| HHFFG4L | 159 | 575009 | AC073195 | 1531 | 1-412 |
| HHFFG41 | 159 | 575009 | AP002338 | 1532 | 1-95 |
| HHFFG41 | 159 | 575009 | AP002338 | 1533 | 1-173 |
| HHFFG41 | 159 | 575009 | AC073195 | 1534 | 1-209 |
| HHFFO66 | 161 | 500910 | AC068341 | 1535 | 1-49 |
| | | | | | 72-448 |
| | | | | | 1609-2003 |
| HHFFO66 | 161 | 500910 | AC068341 | 1536 | 1-338 |
| HHFFT69 | 163 | 662462 | AL359453 | 1537 | 1-1968 |
| HHFFT69 | 163 | 662462 | AL359096 | 1538 | 1-1968 |
| | | | | | 2155-5508 |
| HHFFT69 | 163 | 662462 | AC053522 | 1539 | 1-1968 |
| | | | | | 2155-5508 |
| HHFFT69 | 163 | 662462 | AC015973 | 1540 | 1-1968 |
| | | | | | 2155-5508 |
| HHFFT69 | 163 | 662462 | AL359453 | 1541 | 1-1594 |
| HHFFT69 | 163 | 662462 | AL359096 | 1542 | 1-332 |
| HHFFT69 | 163 | 662462 | AL359096 | 1543 | 1-2319 |
| HHFFT69 | 163 | 662462 | AC053522 | 1544 | 1-2319 |
| HHFFT69 | 163 | 662462 | AC053522 | 1545 | 1-332 |
| HHFFT69 | 163 | 662462 | AC015973 | 1546 | 1-2318 |
| HHFFT69 | 163 | 662462 | AC015973 | 1547 | 1-332 |
| HHFFX20 | 164 | 525617 | AC021421 | 1548 | 1-112 |
| HHFFX20 | 164 | 525617 | AL133312 | 1549 | 1-644 |
| | | | | | 777-888 |
| | | | | | 1007-1671 |
| HHFFX20 | 164 | 525617 | AL135752 | 1550 | 1-644 |
| | | | | | 777-888 |
| | | | | | 1007-1671 |
| HHFFX20 | 164 | 525617 | AC021421 | 1551 | 1-203 |
| HHFFX20 | 164 | 525617 | AL133312 | 1552 | 1-355 |
| HHFFX20 | 164 | 525617 | AL133312 | 1553 | 1-290 |
| HHFFX20 | 164 | 525617 | AL135752 | 1554 | 1-290 |
| HHFFX20 | 164 | 525617 | AL135752 | 1555 | 1-355 |
| HHFFX75 | 165 | 507394 | Z93024 | 1556 | 1-113 |
| | | | | | 552-1029 |
| | | | | | 1177-1329 |
| | | | | | 3299-3343 |
| | | | | | 3350-3543 |
| | | | | | 4372-4456 |
| | | | | | 5937-6110 |
| | | | | | 7289-7459 |
| | | | | | 9374-9496 |
| | | | | | 10624-10699 |
| | | | | | 12785-13230 |
| | | | | | 13572-13759 |
| | | | | | 14164-14313 |
| | | | | | 16011-16073 |
| | | | | | 16995-17273 |
| | | | | | 17279-17695 |
| | | | | | 17765-18278 |
| | | | | | 18343-19051 |
| | | | | | 19109-19192 |
| | | | | | 20461-20639 |
| | | | | | 21437-21601 |
| | | | | | 21866-21938 |
| | | | | | 24242-24654 |
| | | | | | 24773-26048 |
| HHFFX75 | 165 | 507394 | Z93024 | 1557 | 1-278 |
| HHFFZ04 | 167 | 927869 | AL132641 | 1558 | 1-4063 |
| | | | | | 4990-5958 |
| HHFFZ04 | 167 | 927869 | AL132641 | 1559 | 1-2545 |
| HHFGE01 | 174 | 917137 | AC020723 | 1560 | 1-196 |
| | | | | | 920-1040 |
| | | | | | 1113-1520 |
| | | | | | 1666-1933 |
| | | | | | 2807-3264 |
| | | | | | 3459-3729 |
| | | | | | 3808-4062 |
| | | | | | 4374-4487 |
| | | | | | 4725-5161 |
| HHFGE01 | 174 | 917137 | AC020723 | 1561 | 1-2595 |
| HHFGN31 | 177 | 908508 | AC026271 | 1562 | 1-479 |
| HHFGN31 | 177 | 908508 | AC026964 | 1563 | 1-571 |
| HHFGN31 | 177 | 908508 | AC005324 | 1564 | 1-570 |
| HHFGN31 | 177 | 908508 | AC026271 | 1565 | 1-302 |
| HHFGN31 | 177 | 908508 | AC026271 | 1566 | 1-319 |
| HHFGN31 | 177 | 908508 | AC026964 | 1567 | 1-299 |
| HHFGN31 | 177 | 908508 | AC026964 | 1568 | 1-313 |
| | | | | | 1769-2018 |
| HHFGN31 | 177 | 908508 | AC005324 | 1569 | 1-285 |
| HHFGN31 | 177 | 908508 | AC005324 | 1570 | 1-132 |
| HHFGP71 | 179 | 573860 | AL109916 | 1571 | 1-435 |
| HHFGR35 | 180 | 573510 | AC010687 | 1572 | 1-498 |
| | | | | | 694-956 |
| | | | | | 3087-3395 |
| | | | | | 3463-3725 |
| | | | | | 4192-4660 |
| HHFGR35 | 180 | 573510 | AC005369 | 1573 | 1-498 |
| | | | | | 694-956 |
| | | | | | 1721-1826 |
| | | | | | 3090-3398 |
| | | | | | 3466-3725 |
| | | | | | 4195-4664 |
| | | | | | 5068-5524 |
| | | | | | 7874-7984 |
| | | | | | 8636-8763 |
| | | | | | 9038-9626 |
| | | | | | 9670-10114 |
| | | | | | 10341-10441 |
| | | | | | 10646-10780 |
| | | | | | 10867-11561 |
| | | | | | 11674-12184 |
| | | | | | 12626-12746 |
| | | | | | 12931-13086 |
| | | | | | 13095-14152 |
| HHFGR35 | 180 | 573510 | AC010687 | 1574 | 1-112 |
| HHFGR35 | 180 | 573510 | AC005369 | 1575 | 1-112 |
| HHFGR35 | 180 | 573510 | AC005369 | 1576 | 1-260 |
| HHFGS09 | 181 | 526331 | AL356984 | 1577 | 1-237 |
| | | | | | 440-564 |
| | | | | | 1957-2091 |
| | | | | | 2278-3345 |
| | | | | | 3402-3454 |
| | | | | | 3523-4073 |
| HHFGS09 | 181 | 526331 | AL008733 | 1578 | 1-237 |
| | | | | | 440-564 |
| | | | | | 1957-2091 |
| | | | | | 2278-3345 |
| | | | | | 3402-3454 |
| | | | | | 3523-4073 |
| HHFGS09 | 181 | 526331 | AL356984 | 1579 | 1-364 |
| HHFGS09 | 181 | 526331 | AL356984 | 1580 | 1-289 |
| | | | | | 463-1174 |
| | | | | | 2090-2428 |
| | | | | | 3930-4781 |
| HHFGS09 | 181 | 526331 | AL008733 | 1581 | 1-289 |
| | | | | | 463-1174 |
| | | | | | 2090-2428 |
| | | | | | 3930-4781 |
| HHFGS09 | 181 | 526331 | AL008733 | 1582 | 1-364 |
| HHFGS40 | 182 | 888332 | AC026173 | 1583 | 1-304 |
| HHFGS40 | 182 | 888332 | AC055829 | 1584 | 1-304 |
| HHFGS40 | 182 | 888332 | AC023176 | 1585 | 1-304 |
| HHFGS40 | 182 | 888332 | AC026173 | 1586 | 1-412 |
| HHFGS40 | 182 | 888332 | AC055829 | 1587 | 1-253 |
| HHFGS40 | 182 | 888332 | AC026173 | 1588 | 1-253 |
| HHFGS40 | 182 | 888332 | AC055829 | 1589 | 1-412 |
| HHFGS40 | 182 | 888332 | AC023176 | 1590 | 1-240 |
| HHFGS40 | 182 | 888332 | AC023176 | 1591 | 1-412 |
| HHFGS92 | 183 | 871899 | AC026055 | 1592 | 1-370 |
| HHFGS92 | 183 | 871899 | AC020565 | 1593 | 1-371 |
| HHFGS92 | 183 | 871899 | AC026055 | 1594 | 1-383 |
| HHFGS92 | 183 | 871899 | AC026055 | 1595 | 1-488 |
| HHFGS92 | 183 | 871899 | AC020565 | 1596 | 1-387 |
| HHFGS92 | 183 | 871899 | AC020565 | 1597 | 1-488 |
| HHFGT10 | 184 | 968109 | AC006312 | 1598 | 1-395 |
| | | | | | 407-1052 |
| | | | | | 2090-2221 |
| | | | | | 2608-2705 |
| | | | | | 3245-3347 |
| | | | | | 3542-3934 |
| | | | | | 4847-5734 |
| | | | | | 5975-6244 |
| | | | | | 6329-6718 |
| | | | | | 7054-7846 |
| | | | | | 8300-9356 |
| | | | | | 9438-10410 |
| | | | | | 10940-11538 |
| HHFGT10 | 184 | 968109 | AC006312 | 1599 | 1-276 |
| | | | | | 499-1675 |
| | | | | | 2091-2333 |
| | | | | | 4232-4282 |
| | | | | | 4455-5232 |
| | | | | | 6242-6970 |
| | | | | | 7182-7481 |
| | | | | | 7977-8098 |
| | | | | | 8744-8899 |
| | | | | | 9163-9247 |
| | | | | | 10920-10984 |
| | | | | | 12504-12581 |
| | | | | | 13430-13629 |
| | | | | | 14388-14696 |
| | | | | | 15345-15477 |
| | | | | | 16954-17086 |
| | | | | | 17114-17792 |
| HHFHA44 | 191 | 573498 | AL049870 | 1600 | 1-262 |
| HHFHA44 | 191 | 573498 | AL049870 | 1601 | 1-300 |
| HHFHA44 | 191 | 573498 | AL049870 | 1602 | 1-399 |
| HHPHC02 | 192 | 920510 | AC005940 | 1603 | 1-463 |
| HHFHC02 | 192 | 920510 | AC005940 | 1604 | 1-1036 |
| HHFHC57 | 194 | 573506 | AC004084 | 1605 | 1-105 |
| | | | | | 839-1021 |
| | | | | | 2069-2302 |
| | | | | | 2470-2855 |
| | | | | | 3818-4265 |
| | | | | | 4371-4610 |
| | | | | | 4761-4810 |
| | | | | | 5364-5802 |
| | | | | | 5930-6517 |
| | | | | | 7073-7807 |
| | | | | | 8063-8618 |
| | | | | | 8636-8875 |
| | | | | | 9438-9537 |
| | | | | | 10568-10774 |
| | | | | | 10897-11025 |
| | | | | | 11718-12323 |
| | | | | | 13749-13849 |
| | | | | | 13978-14188 |
| | | | | | 14474-14554 |
| | | | | | 16489-16624 |
| | | | | | 16924-17019 |
| | | | | | 17239-17458 |
| | | | | | 17908-18185 |
| | | | | | 19014-19266 |
| | | | | | 19356-19451 |
| | | | | | 19620-19873 |
| | | | | | 19893-20920 |
| | | | | | 21092-21247 |
| | | | | | 21512-21579 |
| | | | | | 21621-21754 |
| | | | | | 22001-22831 |
| | | | | | 22992-23518 |
| | | | | | 23710-24370 |
| | | | | | 24426-24596 |
| | | | | | 25213-25493 |
| | | | | | 25661-26192 |
| | | | | | 26588-27433 |
| | | | | | 27598-27742 |
| | | | | | 28073-28199 |
| | | | | | 28359-28651 |
| | | | | | 28777-29249 |
| | | | | | 29379-29502 |
| | | | | | 29646-29794 |
| | | | | | 29833-30033 |
| | | | | | 30085-30630 |
| | | | | | 30702-32661 |
| | | | | | 33104-33374 |
| | | | | | 33383-33661 |
| | | | | | 33808-33871 |
| | | | | | 33978-37449 |
| | | | | | 37587-37754 |
| | | | | | 38296-38433 |
| | | | | | 38597-39343 |
| | | | | | 40047-40395 |
| | | | | | 40462-40743 |
| HHFHC57 | 194 | 573506 | AC004084 | 1606 | 1-239 |
| HHFHC57 | 194 | 573506 | AC004084 | 1607 | 1-283 |
| HHFHC72 | 195 | 766128 | AC025422 | 1608 | 1-199 |
| HHFHC72 | 195 | 766128 | AC002110 | 1609 | 1-101 |
| HHFHC72 | 195 | 766128 | AC034119 | 1610 | 1-250 |
| HHFHC72 | 195 | 766128 | AC013817 | 1611 | 1-250 |
| HHFHC72 | 195 | 766128 | AC011175 | 1612 | 1-250 |
| HHFHJ72 | 201 | 575030 | AC073330 | 1613 | 1-470 |
| HHFHJ72 | 201 | 575030 | AC073330 | 1614 | 1-294 |
| HHFHJ72 | 201 | 575030 | AC073330 | 1615 | 1-144 |
| HHFHQ86 | 204 | 572923 | AL109936 | 1616 | 1-445 |
| HHFHQ86 | 204 | 572923 | AP001456 | 1617 | 1-406 |
| HHFHX11 | 206 | 967321 | AL022476 | 1618 | 1-414 |
| HHFHX11 | 206 | 967321 | Z82199 | 1619 | 1-414 |
| HHFHX11 | 206 | 967321 | AL022476 | 1620 | 1-329 |
| HHFHX11 | 206 | 967321 | Z82199 | 1621 | 1-329 |
| HHFHX11 | 206 | 967321 | AL022476 | 1622 | 1-364 |
| HHFHX11 | 206 | 967321 | Z82199 | 1623 | 1-364 |
| HHFJL11 | 211 | 965931 | AC026672 | 1624 | 1-414 |
| HHFJL11 | 211 | 965931 | AC026672 | 1625 | 1-309 |
| HHFJM56 | 212 | 857990 | AC005998 | 1626 | 1-278 |
| HHFJM56 | 212 | 857990 | AC005586 | 1627 | 1-280 |
| HHFJM56 | 212 | 857990 | AC005998 | 1628 | 1-404 |
| HHFJM56 | 212 | 857990 | AC005586 | 1629 | 1-411 |
| HHFJN02 | 214 | 918358 | AC073932 | 1630 | 1-423 |
| HHFJN02 | 214 | 918358 | AC007064 | 1631 | 1-440 |
| HHFJN02 | 214 | 918358 | AC009590 | 1632 | 1-423 |
| HHFJN02 | 214 | 918358 | AC010632 | 1633 | 1-453 |
| HHFJN02 | 214 | 918358 | AC007064 | 1634 | 1-361 |
| | | | | | 466-3593 |
| HHFJR06 | 217 | 934093 | AC010538 | 1635 | 1-539 |
| HHFJR06 | 217 | 934093 | AC005360 | 1636 | 1-305 |
| | | | | | 333-452 |
| | | | | | 561-1005 |
| | | | | | 1635-1717 |
| HHFJR06 | 217 | 934093 | AC010538 | 1637 | 1-120 |
| HHFJR06 | 217 | 934093 | AC010538 | 1638 | 1-195 |
| HHFJR06 | 217 | 934093 | AC005360 | 1639 | 1-412 |
| HHFJX18 | 218 | 907658 | AL354671 | 1640 | 1-433 |
| HHFJX18 | 218 | 907658 | AL354671 | 1641 | 1-247 |
| | | | | | 432-558 |
| | | | | | 1491-1606 |
| | | | | | 1796-1903 |
| | | | | | 2051-2210 |
| HHFKC28 | 220 | 857948 | AC013715 | 1642 | 1-395 |
| HHFKC28 | 220 | 857948 | AC013715 | 1643 | 1-328 |
| HHFKC43 | 221 | 906903 | AC007776 | 1644 | 1-475 |
| HHFKC43 | 221 | 906903 | AC007776 | 1645 | 1-105 |
| | | | | | 3385-3585 |
| | | | | | 4362-4516 |
| | | | | | 4950-6638 |
| HHFKC43 | 221 | 906903 | AC007776 | 1646 | 1-482 |
| HHFKH82 | 223 | 857810 | AC000097 | 1647 | 1-74 |
| | | | | | 524-3302 |
| | | | | | 3495-3649 |
| | | | | | 4115-5226 |
| | | | | | 5235-5285 |
| | | | | | 5492-5923 |
| | | | | | 6531-7255 |
| | | | | | 7397-7497 |
| | | | | | 8597-10758 |
| HHFKH82 | 223 | 857810 | AC005664 | 1648 | 1-334 |
| HHFKH82 | 223 | 857810 | AC000075 | 1649 | 1-74 |
| | | | | | 524-3302 |
| | | | | | 3495-3649 |
| | | | | | 4127-4430 |
| | | | | | 4436-5227 |
| | | | | | 5236-5286 |
| | | | | | 5493-5924 |
| | | | | | 6532-7256 |
| | | | | | 7398-7498 |
| | | | | | 8598-10759 |
| HHFKH82 | 223 | 857810 | AC006547 | 1650 | 1-74 |
| | | | | | 524-3302 |
| | | | | | 3495-3649 |
| | | | | | 4115-5226 |
| | | | | | 5235-5285 |
| | | | | | 5492-5923 |
| | | | | | 6531-7255 |
| | | | | | 7397-7497 |
| | | | | | 8597-10758 |
| HHFKH82 | 223 | 857810 | AC000097 | 1651 | 1-1172 |
| HHFKH82 | 223 | 857810 | AC000075 | 1652 | 1-1175 |
| HHFKH82 | 223 | 857810 | AC006547 | 1653 | 1-1172 |
| HHFKJ68 | 225 | 934045 | AL161669 | 1654 | 1-101 |
| | | | | | 266-417 |
| | | | | | 3879-4182 |
| | | | | | 5465-5877 |
| | | | | | 7378-7616 |
| | | | | | 9205-9314 |
| | | | | | 9529-9652 |
| | | | | | 10000-10103 |
| | | | | | 10254-10332 |
| | | | | | 12045-12162 |
| | | | | | 12684-12807 |
| | | | | | 12895-13047 |
| | | | | | 13660-13779 |
| | | | | | 14848-15425 |
| HHFKK95 | 226 | 952082 | AL357149 | 1655 | 1-795 |
| HHFKU44 | 229 | 857923 | AP000487 | 1656 | 1-63 |
| | | | | | 252-919 |
| | | | | | 1070-2004 |
| | | | | | 2421-2533 |
| HHFKU44 | 229 | 857923 | AP000405 | 1657 | 1-132 |
| | | | | | 801-1028 |
| | | | | | 2210-2693 |
| | | | | | 4235-4529 |
| | | | | | 4710-4823 |
| | | | | | 5012-5680 |
| | | | | | 5831-6762 |
| | | | | | 7179-7291 |
| | | | | | 7766-8298 |
| | | | | | 9901-10176 |
| | | | | | 10267-11292 |
| | | | | | 11651-12864 |
| | | | | | 13121-13176 |
| HHFKU44 | 229 | 857923 | AP000487 | 1658 | 1-295 |
| HHFKU44 | 229 | 857923 | AP000405 | 1659 | 1-441 |
| HHFKX11 | 230 | 965874 | AC068889 | 1660 | 1-153 |
| | | | | | 638-1551 |
| | | | | | 1774-2060 |
| | | | | | 2495-3040 |
| | | | | | 3119-3469 |
| | | | | | 3654-3773 |
| HHFKX11 | 230 | 965874 | AC021103 | 1661 | 1-914 |
| HHFKX11 | 230 | 965874 | AC073611 | 1662 | 1-913 |
| HHFKX11 | 230 | 965874 | AC023509 | 1663 | 1-121 |
| | | | | | 607-1520 |
| | | | | | 1743-2029 |
| | | | | | 2043-3015 |
| | | | | | 3094-3444 |
| | | | | | 3629-3748 |
| HHFKX11 | 230 | 965874 | AC073611 | 1664 | 1-172 |
| HHFKX11 | 230 | 965874 | AC023509 | 1665 | 1-88 |
| HHFKX11 | 230 | 965874 | AC068889 | 1666 | 1-88 |
| HHFKX11 | 230 | 965874 | AC021103 | 1667 | 1-246 |
| HHFKY11 | 231 | 965876 | AC008676 | 1668 | 1-70 |
| | | | | | 646-766 |
| | | | | | 1274-1988 |
| | | | | | 2066-2374 |
| | | | | | 2827-3314 |
| | | | | | 4686-5053 |
| | | | | | 5561-5756 |
| | | | | | 6591-6879 |
| | | | | | 7931-8474 |
| | | | | | 9066-9908 |
| | | | | | 9916-10434 |
| HHFLA69 | 232 | 933869 | AL133347 | 1669 | 1-227 |
| HHFLA69 | 232 | 933869 | AC009814 | 1670 | 1-212 |
| HHFLA69 | 232 | 933869 | AC009814 | 1671 | 1-845 |
| HHFLA69 | 232 | 933869 | AL133347 | 1672 | 1-845 |
| HHFLA69 | 232 | 933869 | AC009814 | 1673 | 1-560 |
| HHFLH34 | 233 | 857907 | AC068866 | 1674 | 1-100 |
| HHFLH34 | 233 | 857907 | AL359878 | 1675 | 1-138 |
| HHFLM06 | 234 | 933868 | US1560 | 1676 | 1-432 |
| HHFLM06 | 234 | 933868 | Z80896 | 1677 | 1-432 |
| HHFLM06 | 234 | 933868 | U51560 | 1678 | 1-1118 |
| HHFLM06 | 234 | 933868 | U51560 | 1679 | 1-155 |
| HHFLM06 | 234 | 933868 | Z80896 | 1680 | 1-155 |
| HHFLM06 | 234 | 933868 | Z80896 | 1681 | 1-1118 |
| HHFLU04 | 236 | 870085 | AL121747 | 1682 | 1-118 |
| | | | | | 250-451 |
| | | | | | 1031-1281 |
| | | | | | 1334-1617 |
| | | | | | 5503-5588 |
| | | | | | 6626-6746 |
| | | | | | 11377-11537 |
| | | | | | 12155-12776 |
| | | | | | 13270-14743 |
| | | | | | 15440-15693 |
| | | | | | 18886-19237 |
| | | | | | 19438-19846 |
| HHFLU04 | 236 | 870085 | AL034548 | 1683 | 1-118 |
| | | | | | 250-451 |
| | | | | | 1031-1281 |
| | | | | | 1334-1617 |
| | | | | | 5503-5588 |
| | | | | | 6626-6746 |
| | | | | | 11377-11537 |
| | | | | | 12155-12776 |
| | | | | | 13270-14743 |
| | | | | | 15440-15693 |
| | | | | | 18886-19237 |
| | | | | | 19438-19846 |
| HHFMB01 | 238 | 914951 | AC062037 | 1684 | 1-396 |
| HHFMB01 | 238 | 914951 | AC062037 | 1685 | 1-130 |
| HHFMB01 | 238 | 914951 | AC062037 | 1686 | 1-316 |
| | | | | | 545-1725 |
| | | | | | 2109-2527 |
| | | | | | 3231-3295 |
| HHFME70 | 239 | 926497 | AL035686 | 1687 | 1-383 |
| HHFMH85 | 240 | 872838 | AJ002553 | 1688 | 1-2930 |
| | | | | | 3044-3177 |
| | | | | | 4005-4035 |
| HHFMH85 | 240 | 872838 | AP000449 | 1689 | 1-124 |
| | | | | | 200-376 |
| | | | | | 462-650 |
| | | | | | 689-4651 |
| | | | | | 4762-4898 |
| | | | | | 5724-5901 |
| | | | | | 7362-7660 |
| | | | | | 7953-8121 |
| HHFMH85 | 240 | 872838 | AC051660 | 1690 | 1-64 |
| | | | | | 334-757 |
| | | | | | 899-1050 |
| | | | | | 1198-1599 |
| | | | | | 1738-1891 |
| | | | | | 2098-2392 |
| | | | | | 2922-3049 |
| | | | | | 3142-3244 |
| | | | | | 3319-3389 |
| | | | | | 3482-3598 |
| | | | | | 3691-3857 |
| | | | | | 4138-4515 |
| | | | | | 4601-4789 |
| | | | | | 4828-8792 |
| | | | | | 8903-9039 |
| | | | | | 9865-10042 |
| | | | | | 11509-11797 |
| | | | | | 12091-12259 |
| HHFMH85 | 240 | 872838 | AP000449 | 1691 | 1-1584 |
| HHFMH85 | 240 | 872838 | AC051660 | 1692 | 1-1585 |
| HHFMO03 | 242 | 922708 | AL139329 | 1693 | 1-145 |
| | | | | | 1052-1713 |
| | | | | | 1848-1873 |
| | | | | | 3110-6111 |
| HHFMO03 | 242 | 922708 | AL139329 | 1694 | 1-1003 |
| HHFMO03 | 242 | 922708 | AL139329 | 1695 | 1-922 |
| HHFMO94 | 243 | 957955 | AC006172 | 1696 | 1-520 |
| HHFMO94 | 243 | 957955 | AC006172 | 1697 | 1-449 |
| HHFMQ70 | 244 | 840039 | AL390318 | 1698 | 1-335 |
| HHFMQ70 | 244 | 840039 | AC010161 | 1699 | 1-335 |
| HHFMQ70 | 244 | 840039 | AL390318 | 1700 | 1-764 |
| HHFMQ70 | 244 | 840039 | AC010161 | 1701 | 1-764 |
| HHFMZ40 | 245 | 974299 | AC025552 | 1702 | 1-837 |
| | | | | | 1592-1876 |
| | | | | | 1971-2505 |
| | | | | | 2544-3080 |
| HHFMZ40 | 245 | 974299 | AC023085 | 1703 | 1-837 |
| | | | | | 1592-1876 |
| | | | | | 1971-2510 |
| | | | | | 2562-3083 |
| HHFMZ40 | 245 | 974299 | AC025552 | 1704 | 1-101 |
| HHFMZ40 | 245 | 974299 | AC023085 | 1705 | 1-101 |
| HHFND10 | 247 | 963140 | AL158844 | 1706 | 1-208 |
| | | | | | 228-830 |
| HHFND10 | 247 | 963140 | AL158837 | 1707 | 1-208 |
| | | | | | 228-677 |
| | | | | | 706-803 |
| HHFND10 | 247 | 963140 | AC073965 | 1708 | 1-208 |
| | | | | | 228-830 |
| HHFND10 | 247 | 963140 | AL158844 | 1709 | 1-126 |
| HHFND10 | 247 | 963140 | AC073965 | 1710 | 1-558 |
| HHFND10 | 247 | 963140 | AL158844 | 1711 | 1-560 |
| HHFND10 | 247 | 963140 | AC073965 | 1712 | 1-166 |
| HHFNI49 | 249 | 857850 | AC009364 | 1713 | 1-312 |
| HHFNI49 | 249 | 857850 | AC018643 | 1714 | 1-312 |
| HHFOC27 | 250 | 857816 | AL049835 | 1715 | 1-440 |
| HHFOC27 | 250 | 857816 | AL049835 | 1716 | 1-135 |
| HHFOC27 | 250 | 857816 | AL049835 | 1717 | 1-114 |
| HHFOC66 | 251 | 857955 | AC019220 | 1718 | 1-292 |
| | | | | | 487-546 |
| HHFOC66 | 251 | 857955 | AC019220 | 1719 | 1-88 |
| HHFOFO7 | 252 | 952062 | AL132987 | 1720 | 1-271 |
| | | | | | 645-1063 |
| | | | | | 1112-1370 |
| | | | | | 1810-2112 |
| | | | | | 2483-2590 |
| | | | | | 2916-3117 |
| | | | | | 3613-3945 |
| | | | | | 4310-4376 |
| | | | | | 4642-4756 |
| | | | | | 4874-5203 |
| | | | | | 5480-5850 |
| | | | | | 6289-6892 |
| HHFOF40 | 253 | 930839 | AC012557 | 1721 | 1-527 |
| HHFOF40 | 253 | 930839 | AC063925 | 1722 | 1-527 |
| HHFOF40 | 253 | 930839 | AC012557 | 1723 | 1-705 |
| | | | | | 857-979 |
| | | | | | 3465-3577 |
| | | | | | 4502-4623 |
| | | | | | 5624-6761 |
| HHFOF40 | 253 | 930839 | AC063925 | 1724 | 1-703 |
| HHFOF40 | 253 | 930839 | AC012557 | 1725 | 1-177 |
| | | | | | 797-1153 |
| | | | | | 1766-2651 |
| | | | | | 2949-3031 |
| | | | | | 8066-8473 |
| HHFOF40 | 253 | 930839 | AC063925 | 1726 | 1-206 |
| HHFOJ05 | 254 | 930856 | AC010172 | 1727 | 1-262 |
| HHFOJ05 | 254 | 930856 | AC000015 | 1728 | 1-262 |
| HHFOJ05 | 254 | 930856 | AC010172 | 1729 | 1-718 |
| HHFOJ05 | 254 | 930856 | AC010172 | 1730 | 1-273 |
| HHFOJ05 | 254 | 930856 | AC000015 | 1731 | 1-273 |
| HHFOJ05 | 254 | 930856 | AC000015 | 1732 | 1-718 |
| HHFON08 | 255 | 957974 | AL031282 | 1733 | 1-125 |
| | | | | | 204-676 |
| | | | | | 2747-6745 |
| | | | | | 7623-8192 |
| | | | | | 8629-8798 |
| | | | | | 8860-9174 |
| | | | | | 10053-10226 |
| | | | | | 10735-11362 |
| | | | | | 11633-11748 |
| | | | | | 12345-12774 |
| | | | | | 13014-13179 |
| | | | | | 13685-13811 |
| | | | | | 14285-14420 |
| | | | | | 14599-15069 |
| | | | | | 16162-16271 |
| | | | | | 18792-18921 |
| | | | | | 19616-20033 |
| | | | | | 20905-21606 |
| HHFON08 | 255 | 957974 | AL031282 | 1734 | 1-1063 |
| | | | | | 1094-1253 |
| | | | | | 1441-1617 |
| | | | | | 1658-1817 |
| | | | | | 1840-1989 |
| | | | | | 2152-2649 |
| | | | | | 2805-2996 |
| | | | | | 3259-3521 |
| | | | | | 3693-5265 |
| | | | | | 5800-5870 |
| | | | | | 6414-6575 |
| | | | | | 6657-7261 |
| | | | | | 7558-7800 |
| | | | | | 8352-8943 |
| | | | | | 9884-10022 |
| | | | | | 11068-11767 |
| | | | | | 11920-12427 |
| | | | | | 12724-13300 |
| | | | | | 13754-14098 |
| | | | | | 14157-14314 |
| | | | | | 14362-14444 |
| | | | | | 14556-14768 |
| | | | | | 15311-15585 |
| | | | | | 16256-16553 |
| | | | | | 16790-17078 |
| | | | | | 17330-17431 |
| | | | | | 17894-18012 |
| | | | | | 18663-18696 |
| | | | | | 19219-19499 |
| | | | | | 20187-20735 |
| | | | | | 20926-21129 |
| HHFON19 | 257 | 910891 | AC003072 | 1735 | 1-395 |
| | | | | | 1224-1311 |
| | | | | | 2736-2904 |
| | | | | | 3775-5829 |
| | | | | | 6051-6406 |
| | | | | | 6418-7537 |
| HHFON19 | 257 | 910891 | AC003072 | 1736 | 1-314 |
| HHFON19 | 257 | 910891 | AC003072 | 1737 | 1-384 |
| HHFON32 | 258 | 858034 | AC024555 | 1738 | 1-65 |
| | | | | | 1322-1814 |
| | | | | | 1879-2084 |
| | | | | | 2488-3174 |
| | | | | | 3624-4306 |
| | | | | | 4653-4875 |
| | | | | | 5942-7911 |
| HHFON32 | 258 | 858034 | AL356796 | 1739 | 1-493 |
| HHFON32 | 258 | 858034 | AL356796 | 1740 | 1-206 |
| | | | | | 610-1296 |
| | | | | | 1746-2428 |
| | | | | | 2774-2996 |
| | | | | | 4063-5628 |
| HHFOW08 | 260 | 857772 | AC013420 | 1741 | 1-459 |
| HHFOW08 | 260 | 857772 | AC067745 | 1742 | 1-458 |
| HHFOW08 | 260 | 857772 | AC067745 | 1743 | 1-353 |
| HHFSB02 | 261 | 921364 | AC022003 | 1744 | 1-503 |
| | | | | | 1443-2058 |
| | | | | | 2808-3134 |
| | | | | | 4719-4770 |
| | | | | | 5295-5710 |
| | | | | | 5942-6141 |
| | | | | | 7267-7809 |
| HHFSB02 | 261 | 921364 | AC024059 | 1745 | 1-503 |
| | | | | | 1443-2057 |
| | | | | | 2807-3133 |
| | | | | | 4718-4769 |
| | | | | | 5294-5709 |
| | | | | | 5942-6141 |
| | | | | | 7267-7809 |
| HHFSB02 | 261 | 921364 | AC024058 | 1746 | 1-616 |
| | | | | | 1366-1692 |
| | | | | | 3277-3328 |
| | | | | | 3853-4268 |
| | | | | | 4501-4700 |
| | | | | | 5825-6055 |
| HHFSB02 | 261 | 921364 | AC024058 | 1747 | 1-81 |
| | | | | | 187-272 |
| | | | | | 932-1226 |
| | | | | | 4756-4859 |
| | | | | | 6139-6343 |
| | | | | | 6965-7071 |
| | | | | | 7760-7918 |
| | | | | | 8877-8993 |
| HHFSB02 | 261 | 921364 | AC024058 | 1748 | 1-395 |
| HHFTC88 | 262 | 500903 | AL354887 | 1749 | 1-344 |
| HHFTC88 | 262 | 500903 | AL354886 | 1750 | 1-344 |
| HHFTC88 | 262 | 500903 | AL354878 | 1751 | 1-344 |
| HHFTC88 | 262 | 500903 | AL354886 | 1752 | 1-913 |
| HHFTC88 | 262 | 500903 | AL354887 | 1753 | 1-634 |
| | | | | | 819-1731 |
| HHFTC88 | 262 | 500903 | AL354878 | 1754 | 1-634 |
| | | | | | 819-1731 |
| HHFUB23 | 264 | 928063 | AC004985 | 1755 | 1-473 |
| HHFUB23 | 264 | 928063 | AC004985 | 1756 | 1-465 |
| HHFUB77 | 265 | 772691 | AC055119 | 1757 | 1-320 |
| HHFUB77 | 265 | 772691 | AL162592 | 1758 | 1-300 |
| HHFUB77 | 265 | 772691 | AC027170 | 1759 | 1-292 |
| HHFUB77 | 265 | 772691 | AC002369 | 1760 | 1-586 |
| | | | | | 2559-2651 |
| | | | | | 3329-3426 |
| | | | | | 3756-5088 |
| HHFUB77 | 265 | 772691 | AC027170 | 1761 | 1-226 |
| HHFUB77 | 265 | 772691 | AC002369 | 1762 | 1-228 |
| HHFUC24 | 266 | 524840 | AC074086 | 1763 | 1-483 |
| HHFUC24 | 266 | 524840 | AC074086 | 1764 | 1-451 |
| HHFUC26 | 267 | 960331 | AC007686 | 1765 | 1-500 |
| HHFUC26 | 267 | 960331 | AC007686 | 1766 | 1-281 |
| HHFUC26 | 267 | 960331 | AC007686 | 1767 | 1-98 |
| HHFUC42 | 268 | 525603 | AC004836 | 1768 | 1-209 |
| | | | | | 5804-6076 |
| | | | | | 6127-7676 |
| | | | | | 7693-8144 |
| | | | | | 9341-9450 |
| | | | | | 9803-10218 |
| | | | | | 10270-11045 |
| | | | | | 12112-12455 |
| | | | | | 15673-15937 |
| | | | | | 16059-16524 |
| | | | | | 26709-26743 |
| | | | | | 28687-29151 |
| | | | | | 29659-29985 |
| | | | | | 30110-30352 |
| HHFUC42 | 268 | 525603 | AC004836 | 1769 | 1-584 |
| HHFUC47 | 270 | 525599 | AC069489 | 1770 | 1-547 |
| HHFUC47 | 270 | 525599 | AC008421 | 1771 | 1-599 |
| HHFUC47 | 270 | 525599 | AC010232 | 1772 | 1-599 |
| HHFUC47 | 270 | 525599 | AP002016 | 1773 | 1-597 |
| HHFUC47 | 270 | 525599 | AC069489 | 1774 | 1-741 |
| HHFUC47 | 270 | 525599 | AC008421 | 1775 | 1-740 |
| HHFUC47 | 270 | 525599 | AC010232 | 1776 | 1-741 |
| HHFUC47 | 270 | 525599 | AP002016 | 1777 | 1-741 |
| HHFUC47 | 270 | 525599 | AP002016 | 1778 | 1-102 |
| HHFUC92 | 272 | 507018 | AL390734 | 1779 | 1-136 |
| | | | | | 625-782 |
| | | | | | 902-1290 |
| | | | | | 2223-2453 |
| | | | | | 2703-3266 |
| | | | | | 4648-4818 |
| | | | | | 5418-5819 |
| HHFUC92 | 272 | 507018 | AL390734 | 1780 | 1-398 |
| HHFUK58 | 273 | 525604 | AC024585 | 1781 | 1-458 |
| HHFUK58 | 273 | 525604 | AC008474 | 1782 | 1-149 |
| | | | | | 303-522 |
| | | | | | 1014-1051 |
| | | | | | 1640-2300 |
| | | | | | 2318-2347 |
| | | | | | 2671-2899 |
| | | | | | 3010-3446 |
| | | | | | 3656-4506 |
| | | | | | 4589-6257 |
| HHFUK58 | 273 | 525604 | AC024585 | 1783 | 1-285 |
| HHFUK58 | 273 | 525604 | AC008474 | 1784 | 1-5710 |
| HHFUN56 | 275 | 530953 | AC008167 | 1785 | 1-825 |
| | | | | | 2446-2521 |
| HHFUN56 | 275 | 530953 | AC008167 | 1786 | 1-449 |
| HHFUN56 | 275 | 530953 | AC008167 | 1787 | 1-304 |
| HMEBA75 | 276 | 530303 | AC010463 | 1788 | 1-56 |
| | | | | | 380-483 |
| | | | | | 579-900 |
| | | | | | 1742-1988 |
| HMEBA75 | 276 | 530303 | AC010463 | 1789 | 1-27 |
| | | | | | 934-1247 |
| | | | | | 2557-2685 |
| | | | | | 2850-2960 |
| HMEBY61 | 277 | 947868 | AC069364 | 1790 | 1-668 |
| | | | | | 846-1170 |
| | | | | | 2965-3152 |
| | | | | | 4672-4870 |
| | | | | | 8016-8176 |
| | | | | | 10842-11293 |
| | | | | | 12213-12434 |
| | | | | | 12438-13156 |
| | | | | | 13229-13453 |
| | | | | | 13476-13904 |
| | | | | | 13964-14507 |
| | | | | | 14913-15044 |
| HMEBY61 | 277 | 947868 | AC009886 | 1791 | 1-668 |
| | | | | | 846-1170 |
| | | | | | 2965-3152 |
| | | | | | 4672-4870 |
| | | | | | 8016-8176 |
| | | | | | 10843-11294 |
| | | | | | 12214-12435 |
| | | | | | 12439-13157 |
| | | | | | 13230-13454 |
| | | | | | 13477-13905 |
| | | | | | 13965-14508 |
| | | | | | 14913-15046 |
| HMEBY61 | 277 | 947868 | AC069364 | 1792 | 1-505 |
| HMEBY61 | 277 | 947868 | AC009886 | 1793 | 1-541 |
| HMEEX61 | 281 | 742085 | AP000779 | 1794 | 1-501 |
| HMEEX61 | 281 | 742085 | AP000848 | 1795 | 1-502 |
| HMEEX61 | 281 | 742085 | AP000612 | 1796 | 1-501 |
| HMEEX61 | 281 | 742085 | AC011875 | 1797 | 1-501 |
| HMEEX61 | 281 | 742085 | AP000779 | 1798 | 1-985 |
| HMEEX61 | 281 | 742085 | AP000848 | 1799 | 1-985 |
| HMEEX61 | 281 | 742085 | AP000612 | 1800 | 1-985 |
| HMEEX61 | 281 | 742085 | AC011875 | 1801 | 1-816 |
| | | | | | 908-1405 |
| | | | | | 1931-3042 |
| HMEGF48 | 285 | 573821 | AL139183 | 1802 | 1-409 |
| HMEGF48 | 285 | 573821 | AL139183 | 1803 | 1-278 |
| HMEGG44 | 286 | 796421 | AC068938 | 1804 | 1-3356 |
| HMEGG44 | 286 | 796421 | AC073407 | 1805 | 1-3357 |
| HMEGG44 | 286 | 796421 | AC027054 | 1806 | 1-3223 |
| HMEGG44 | 286 | 796421 | AC073407 | 1807 | 1-2027 |
| | | | | | 2038-3487 |
| HMEGG44 | 286 | 796421 | AC068938 | 1808 | 1-2027 |
| | | | | | 2038-3487 |
| HMEGG44 | 286 | 796421 | AC027054 | 1809 | 1-2027 |
| | | | | | 2038-3487 |
| HMEGG44 | 286 | 796421 | AC073407 | 1810 | 1-323 |
| HMEGI07 | 288 | 953815 | AC020925 | 1811 | 1-141 |
| | | | | | 2805-2932 |
| | | | | | 3116-3196 |
| | | | | | 3786-4021 |
| | | | | | 4066-4397 |
| | | | | | 4614-4799 |
| | | | | | 5738-9513 |
| HMEGI07 | 288 | 953815 | AC008572 | 1812 | 1-39 |
| | | | | | 1415-1510 |
| | | | | | 1913-2053 |
| | | | | | 4717-4851 |
| | | | | | 5028-5109 |
| | | | | | 5699-5934 |
| | | | | | 5979-6388 |
| | | | | | 6528-6713 |
| | | | | | 7652-11427 |
| HMEIU49 | 291 | 722988 | AC009549 | 1813 | 1-374 |
| HMEJD13 | 293 | 657231 | AC015885 | 1814 | 1-267 |
| HMEJD13 | 293 | 657231 | AC041002 | 1815 | 1-267 |
| HMEJD13 | 293 | 657231 | AC041002 | 1816 | 1-267 |
| HMEJD13 | 293 | 657231 | AC041002 | 1817 | 1-267 |
| HMEJD13 | 293 | 657231 | AC074339 | 1818 | 1-266 |
| HMEJD13 | 293 | 657231 | AC027821 | 1819 | 1-50 |
| | | | | | 213-300 |
| | | | | | 859-1126 |
| | | | | | 1195-1903 |
| | | | | | 2104-2487 |
| | | | | | 2628-2737 |
| | | | | | 2791-3020 |
| | | | | | 3064-3182 |
| | | | | | 3190-4185 |
| | | | | | 4433-5145 |
| | | | | | 5857-5953 |
| | | | | | 6331-7971 |
| | | | | | 7973-8232 |
| | | | | | 8452-8515 |
| HMEJD13 | 293 | 657231 | AC041002 | 1820 | 1-267 |
| HMEJD13 | 293 | 657231 | AC036181 | 1821 | 1-84 |
| | | | | | 14 1-370 |
| | | | | | 414-532 |
| | | | | | 540-1535 |
| | | | | | 1776-2488 |
| | | | | | 3200-3296 |
| | | | | | 3674-5593 |
| | | | | | 5809-6696 |
| HMEJD13 | 293 | 657231 | AC027821 | 1822 | 1-267 |
| HMEJD13 | 293 | 657231 | AC024631 | 1823 | 1-267 |
| HMEJD13 | 293 | 657231 | AC036181 | 1824 | 1-524 |
| | | | | | 687-774 |
| | | | | | 1333-1600 |
| | | | | | 1669-2377 |
| | | | | | 2578-2962 |
| | | | | | 3103-3212 |
| | | | | | 3266-3495 |
| | | | | | 3539-3657 |
| | | | | | 3665-4659 |
| | | | | | 4905-5617 |
| | | | | | 6332-6428 |
| | | | | | 6806-8442 |
| | | | | | 8444-8703 |
| | | | | | 8918-9805 |
| HMEJD13 | 293 | 657231 | AC023133 | 1825 | 1-524 |
| | | | | | 688-775 |
| | | | | | 1333-1600 |
| | | | | | 1669-2321 |
| | | | | | 2574-2957 |
| | | | | | 3098-3207 |
| | | | | | 3261-3490 |
| | | | | | 3534-3652 |
| | | | | | 3660-4655 |
| | | | | | 4896-5608 |
| | | | | | 6320-6416 |
| | | | | | 6792-8432 |
| | | | | | 8434-8693 |
| | | | | | 8908-9796 |
| HMEJD13 | 293 | 657231 | AC067923 | 1826 | 1-104 |
| | | | | | 267-354 |
| | | | | | 913-1180 |
| | | | | | 1249-1956 |
| | | | | | 2157-2540 |
| | | | | | 2681-2790 |
| | | | | | 2844-3073 |
| | | | | | 3117-3235 |
| | | | | | 3243-4238 |
| | | | | | 4484-5196 |
| | | | | | 5908-6004 |
| | | | | | 6382-8301 |
| | | | | | 8517-9404 |
| HMEJD13 | 293 | 657231 | AC005702 | 1827 | 1-524 |
| | | | | | 687-774 |
| | | | | | 1334-1602 |
| | | | | | 1671-2379 |
| | | | | | 2640-2936 |
| | | | | | 3104-3210 |
| | | | | | 3268-3497 |
| | | | | | 3541-3954 |
| | | | | | 4023-4621 |
| | | | | | 4863-5575 |
| | | | | | 5800-6163 |
| | | | | | 6288-6384 |
| | | | | | 6762-8411 |
| | | | | | 8418-8685 |
| | | | | | 8901-9348 |
| | | | | | 9368-9831 |
| HMEJD13 | 293 | 657231 | AC021317 | 1828 | 1-88 |
| | | | | | 802-898 |
| | | | | | 1283-1346 |
| | | | | | 1808-1910 |
| | | | | | 2027-3195 |
| | | | | | 3411-3979 |
| HMEJD13 | 293 | 657231 | AC003976 | 1829 | 1-524 |
| | | | | | 688-775 |
| | | | | | 1334-1601 |
| | | | | | 1670-2378 |
| | | | | | 2579-2962 |
| | | | | | 3103-3212 |
| | | | | | 3266-3495 |
| | | | | | 3539-3657 |
| | | | | | 3665-4659 |
| | | | | | 4905-5617 |
| | | | | | 6332-6428 |
| | | | | | 6806-8442 |
| | | | | | 8444-8703 |
| | | | | | 8918-9804 |
| HMEJD13 | 293 | 657231 | AC036181 | 1830 | 1-358 |
| HMEJD13 | 293 | 657231 | AC027821 | 1831 | 1-425 |
| | | | | | 519-886 |
| HMEJD13 | 293 | 657231 | AC024631 | 1832 | 1-425 |
| | | | | | 519-886 |
| HMEJD13 | 293 | 657231 | AC036181 | 1833 | 1-371 |
| HMEJD13 | 293 | 657231 | AC036181 | 1834 | 1-371 |
| HMEJD13 | 293 | 657231 | AC023133 | 1835 | 1-243 |
| HMEJD13 | 293 | 657231 | AC036181 | 1836 | 1-243 |
| HMEJD13 | 293 | 657231 | AC023133 | 1837 | 1-371 |
| HMEJD13 | 293 | 657231 | AC067923 | 1838 | 1-371 |
| HMEJD13 | 293 | 657231 | AC005702 | 1839 | 1-242 |
| HMEJD13 | 293 | 657231 | AC005702 | 1840 | 1-400 |
| HMEJD13 | 293 | 657231 | AC021317 | 1841 | 1-125 |
| HMEJD13 | 293 | 657231 | AC021317 | 1842 | 1-87 |
| HMEJD13 | 293 | 657231 | AC003976 | 1843 | 1-371 |
| HMEJD13 | 293 | 657231 | AC003976 | 1844 | 1-243 |
| HMEJJ84 | 294 | 781983 | AC024428 | 1845 | 1-292 |
| HMEJU60 | 295 | 740392 | AC024306 | 1846 | 1-320 |
| HMEJU60 | 295 | 740392 | AC024306 | 1847 | 1-116 |
| HMEJU60 | 295 | 740392 | AC024306 | 1848 | 1-111 |
| HMEKS76 | 298 | 767517 | AC006960 | 1849 | 1-288 |
| | | | | | 1456-2100 |
| | | | | | 4234-4427 |
| | | | | | 4782-4885 |
| | | | | | 6074-6172 |
| | | | | | 9477-9608 |
| | | | | | 10804-10832 |
| | | | | | 11470-11880 |
| | | | | | 12966-13201 |
| | | | | | 13885-14036 |
| | | | | | 14317-14467 |
| | | | | | 15577-15714 |
| | | | | | 16355-16531 |
| | | | | | 17539-17670 |
| | | | | | 18267-18314 |
| | | | | | 18407-18465 |
| | | | | | 19024-19141 |
| | | | | | 19425-19452 |
| | | | | | 22505-22657 |
| | | | | | 26100-26399 |
| | | | | | 29294-29632 |
| | | | | | 32949-33012 |
| | | | | | 34781-34897 |
| | | | | | 34915-35365 |
| | | | | | 35388-35739 |
| | | | | | 36534-36674 |
| | | | | | 37470-37581 |
| | | | | | 37656-37790 |
| | | | | | 37917-38013 |
| | | | | | 38911-39273 |
| | | | | | 41140-41375 |
| | | | | | 43201-43560 |
| | | | | | 45322-45733 |
| | | | | | 46172-47513 |
| HMEKS76 | 298 | 767517 | AC008266 | 1850 | 1-288 |
| | | | | | 1456-2100 |
| | | | | | 4234-4427 |
| | | | | | 4782-4885 |
| | | | | | 6080-6178 |
| | | | | | 9481-9612 |
| | | | | | 10808-10836 |
| | | | | | 11474-11884 |
| | | | | | 12970-13069 |
| HMEKX51 | 299 | 727154 | AC016747 | 1851 | 1-317 |
| HMEKX51 | 299 | 727154 | AC074249 | 1852 | 1-317 |
| HMEKX51 | 299 | 727154 | AC016747 | 1853 | 1-303 |
| HMEKX51 | 299 | 727154 | AC074249 | 1854 | 1-303 |
| HMELC56 | 301 | 745773 | AL160286 | 1855 | 1-316 |
| HMELC56 | 301 | 745773 | AL160286 | 1856 | 1-106 |
| HMELR10 | 303 | 964629 | AC026364 | 1857 | 1-331 |
| HMELR10 | 303 | 964629 | AC026364 | 1858 | 1-536 |
| HMELV19 | 305 | 668665 | AL355433 | 1859 | 1-200 |
| | | | | | 245-325 |
| HMELV19 | 305 | 668665 | AL355433 | 1860 | 1-127 |
| HULAX31 | 308 | 868930 | AC008738 | 1861 | 1-451 |
| HULAX31 | 308 | 868930 | AC008744 | 1862 | 1-451 |
| HULAX31 | 308 | 868930 | AC008738 | 1863 | 1-173 |
| HULAX31 | 308 | 868930 | AC008744 | 1864 | 1-173 |
| HUSAY26 | 315 | 527909 | AC008758 | 1865 | 1-2593 |
| HUSAY26 | 315 | 527909 | AC008758 | 1866 | 1-87 |
| HUSCA57 | 316 | 527800 | AC026785 | 1867 | 1-259 |
| HUSCA57 | 316 | 527800 | AC026504 | 1868 | 1-259 |
| HUSCD26 | 317 | 527799 | AC011919 | 1869 | 1-362 |
| HUSCD26 | 317 | 527799 | AC013271 | 1870 | 1-362 |
| HUSCD26 | 317 | 527799 | AC020990 | 1871 | 1-362 |
| HUSCD26 | 317 | 527799 | AC011919 | 1872 | 1-114 |
| HUSCD26 | 317 | 527799 | AC011919 | 1873 | 1-761 |
| HUSCD26 | 317 | 527799 | AC013271 | 1874 | 1-761 |
| HUSCD26 | 317 | 527799 | AC020990 | 1875 | 1-761 |
| HUSCD26 | 317 | 527799 | AC013271 | 1876 | 1-114 |
| HUSCD26 | 317 | 527799 | AC020990 | 1877 | 1-114 |
| HUSGH88 | 320 | 871776 | AC069193 | 1878 | 1-730 |
| | | | | | 1039-5690 |
| HUSGH88 | 320 | 871776 | AL049629 | 1879 | 1-730 |
| | | | | | 1039-5689 |
| HUSGH88 | 320 | 871776 | AC069193 | 1880 | 1-2271 |
| HUSGH88 | 320 | 871776 | AL049629 | 1881 | 1-2271 |
| | | | | | 8698-8799 |
| | | | | | 9671-9808 |
| | | | | | 10133-10904 |
| | | | | | 13707-14024 |
| HUSHH64 | 323 | 576459 | AC008623 | 1882 | 1-646 |
| HUSHH64 | 323 | 576459 | AC008623 | 1883 | 1-126 |
| HUSHH64 | 323 | 576459 | AC008623 | 1884 | 1-45 |
| | | | | | 1042-1363 |
| | | | | | 2498-2968 |
| | | | | | 2989-3046 |
| | | | | | 3584-3866 |
| | | | | | 3894-4206 |
| HUSHJ55 | 324 | 576381 | AL358252 | 1885 | 1-331 |
| | | | | | 577-603 |
| | | | | | 1059-4966 |
| HUSHJ55 | 324 | 576381 | Z98044 | 1886 | 1-337 |
| | | | | | 577-603 |
| | | | | | 1060-7238 |
| HUSHL83 | 325 | 868883 | AC012363 | 1887 | 1-3333 |
| HUSHL83 | 325 | 868883 | AC012363 | 1888 | 1-181 |
| HUSIA43 | 327 | 575768 | AC015544 | 1889 | 1-931 |
| HUSIA43 | 327 | 575768 | AC015544 | 1890 | 1-117 |
| HUSIA43 | 327 | 575768 | AC015544 | 1891 | 1-339 |
| HUSIF23 | 328 | 862494 | AL035681 | 1892 | 1-67 |
| | | | | | 1943-2237 |
| | | | | | 3321-3500 |
| | | | | | 3934-4132 |
| | | | | | 4463-5199 |
| | | | | | 6360-7092 |
| | | | | | 7146-7569 |
| | | | | | 7910-8139 |
| | | | | | 8867-9089 |
| | | | | | 10043-10216 |
| | | | | | 11334-11457 |
| | | | | | 11871-12002 |
| | | | | | 12058-12143 |
| | | | | | 13195-13465 |
| | | | | | 13653-13857 |
| | | | | | 15161-15304 |
| | | | | | 17040-17157 |
| | | | | | 17748-18435 |
| | | | | | 18710-18835 |
| | | | | | 20818-21106 |
| | | | | | 21357-23130 |
| HUSIF23 | 328 | 862494 | AL035681 | 1893 | 1-90 |
| | | | | | 752-1239 |
| HUSIS60 | 329 | 727153 | AP001488 | 1894 | 1-141 |
| | | | | | 722-819 |
| | | | | | 5028-5139 |
| HUSIS60 | 329 | 727153 | AP001488 | 1895 | 1-364 |
| HUSJW78 | 331 | 772956 | AC006425 | 1896 | 1-394 |
| HUSYA63 | 335 | 928021 | AC024423 | 1897 | 1-156 |
| | | | | | 626-1487 |
| HUSYA63 | 335 | 928021 | AC025019 | 1898 | 1-156 |
| | | | | | 626-1487 |
| HUSYA63 | 335 | 928021 | AC012202 | 1899 | 1-156 |
| | | | | | 626-1487 |
| HUSYB16 | 336 | 868843 | AC008975 | 1900 | 1-425 |
| HUSYB16 | 336 | 868843 | AC008975 | 1901 | 1-542 |
| HUSYO46 | 338 | 868827 | AL158830 | 1902 | 1-656 |
| | | | | | 1895-2173 |
| | | | | | 4714-4962 |
| HUSYO46 | 338 | 868827 | AL138834 | 1903 | 1-656 |
| | | | | | 1895-2173 |
| | | | | | 4714-4962 |
| HUSYO46 | 338 | 868827 | AL158830 | 1904 | 1-151 |
| HUSYO46 | 338 | 868827 | AL138834 | 1905 | 1-151 |
| HUSZV72 | 340 | 851170 | AC007962 | 1906 | 1-912 |
| HUSZV72 | 340 | 851170 | AC007962 | 1907 | 1-2776 |
| HUSYX03 | 342 | 922840 | AC023659 | 1908 | 1-126 |
| | | | | | 217-777 |
| | | | | | 2352-2507 |
| | | | | | 3465-3709 |
| | | | | | 3896-3995 |
| | | | | | 4541-4906 |
| | | | | | 5086-7803 |
| HUSYX03 | 342 | 922840 | AC009303 | 1909 | 1-126 |
| | | | | | 217-777 |
| | | | | | 2350-2506 |
| | | | | | 3464-3708 |
| | | | | | 3895-3994 |
| | | | | | 4540-4905 |
| | | | | | 5085-7803 |
| HUSYN33 | 344 | 651293 | AC008435 | 1910 | 1-828 |
| | | | | | 1842-3253 |
| HUSYN33 | 344 | 651293 | AC008435 | 1911 | 1-843 |
| HUSYN33 | 344 | 651293 | AC008435 | 1912 | 1-1640 |
| HUSYI13 | 348 | 657288 | AC074043 | 1913 | 1-1316 |
| HUSYI13 | 348 | 657288 | AC009651 | 1914 | 1-1773 |
| HUSYL13 | 348 | 657288 | AC074043 | 1915 | 1-493 |
| HUSYI13 | 348 | 657288 | AC009651 | 1916 | 1-424 |
| HUSYI13 | 348 | 657288 | AC009651 | 1917 | 1-493 |
| HUSYG24 | 349 | 677258 | AC068373 | 1918 | 1-500 |
| | | | | | 537-1234 |
| HUSYG24 | 349 | 677258 | AC068373 | 1919 | 1-1086 |
| HUSYF74 | 350 | 554723 | AL136531 | 1920 | 1-511 |
| HUSYF74 | 350 | 554723 | AL136531 | 1921 | 1-1457 |
| HUSYF74 | 350 | 554723 | AL136531 | 1922 | 1-651 |
| | | | | | 825-1223 |
| | | | | | 1944-2538 |
| | | | | | 2613-2793 |
| | | | | | 3366-3657 |
| | | | | | 4544-5302 |
| | | | | | 7419-7761 |
| | | | | | 8345-8448 |
| | | | | | 9618-9689 |
| | | | | | 10389-10461 |
| | | | | | 15614-15734 |
| HUSYA27 | 351 | 934423 | AL139413 | 1923 | 1-1045 |
| HUSYA27 | 351 | 934423 | AL138789 | 1924 | 1-116 |
| | | | | | 1044-1320 |
| | | | | | 1755-2624 |
| | | | | | 4375-4548 |
| | | | | | 4612-5585 |
| | | | | | 6092-6277 |
| | | | | | 6751-8806 |
| | | | | | 8868-9912 |
| HUSYA27 | 351 | 934423 | AL138789 | 1925 | 1-445 |
| HUSXW61 | 352 | 741856 | AC006425 | 1926 | 1-643 |
| HUSXW61 | 352 | 741856 | AC006425 | 1927 | 1-248 |
| | | | | | 2024-2526 |
| | | | | | 3079-3186 |
| | | | | | 3565-4006 |
| | | | | | 4406-4849 |
| | | | | | 4944-6043 |
| | | | | | 6188-7728 |
| HUSXH57 | 355 | 859907 | AC011890 | 1928 | 1-943 |
| | | | | | 1079-1636 |
| | | | | | 2154-2473 |
| | | | | | 3555-4008 |
| | | | | | 4292-4439 |
| | | | | | 6963-7154 |
| | | | | | 8254-8537 |
| | | | | | 8592-8985 |
| HUSXH57 | 355 | 859907 | AC011890 | 1929 | 1-478 |
| HUSKA86 | 356 | 784887 | AC069351 | 1930 | 1-1358 |
| | | | | | 1586-1688 |
| | | | | | 2017-2092 |
| HUSKA65 | 357 | 868860 | AC021811 | 1931 | 1-1031 |
| HUSKA65 | 357 | 868860 | AC021811 | 1932 | 1-210 |
| HUSKA65 | 357 | 868860 | AC021811 | 1933 | 1-470 |
| HUSJW03 | 358 | 923035 | AC072049 | 1934 | 1-778 |
| HUSJW03 | 358 | 923035 | AC072049 | 1935 | 1-325 |
| HUSJW03 | 358 | 923035 | AC072049 | 1936 | 1-404 |
| HUSIR04 | 364 | 709228 | AC016274 | 1937 | 1-686 |
| HUSIN12 | 365 | 970759 | AL356489 | 1938 | 1-497 |
| HUSIN12 | 365 | 970759 | AL139008 | 1939 | 1-497 |
| HUSIN12 | 365 | 970759 | AL356489 | 1940 | 1-284 |
| HUSIN12 | 365 | 970759 | AL356489 | 1941 | 1-551 |
| HUSIN12 | 365 | 970759 | AL139008 | 1942 | 1-284 |
| HUSIE95 | 366 | 967176 | AC008622 | 1943 | 1-1265 |
| | | | | | 2254-2644 |
| | | | | | 2731-2835 |
| | | | | | 2905-3445 |
| | | | | | 3608-3796 |
| | | | | | 5301-5425 |
| | | | | | 5825-5873 |
| | | | | | 5966-6142 |
| | | | | | 6830-7216 |
| | | | | | 7946-8063 |
| | | | | | 8386-8503 |
| | | | | | 8800-8850 |
| | | | | | 9112-9273 |
| | | | | | 11226-11369 |
| | | | | | 13533-13731 |
| | | | | | 14588-14790 |
| | | | | | 15163-15458 |
| | | | | | 16207-16462 |
| | | | | | 17318-17398 |
| | | | | | 18661-18734 |
| | | | | | 19282-19345 |
| HUSIE95 | 366 | 967176 | AC025983 | 1944 | 1-1265 |
| | | | | | 2254-2644 |
| | | | | | 2731-2835 |
| | | | | | 2905-3445 |
| | | | | | 3608-3796 |
| | | | | | 5296-5420 |
| | | | | | 5820-5868 |
| | | | | | 5961-6137 |
| | | | | | 6825-7210 |
| | | | | | 7940-8057 |
| | | | | | 8379-8496 |
| | | | | | 8793-8843 |
| | | | | | 9105-9266 |
| | | | | | 11219-11362 |
| | | | | | 13525-13723 |
| | | | | | 14580-14782 |
| | | | | | 15155-15450 |
| | | | | | 16199-16454 |
| | | | | | 17308-17388 |
| | | | | | 18651-18724 |
| | | | | | 19271-19334 |
| HUSIE95 | 366 | 967176 | AC008635 | 1945 | 1-1265 |
| | | | | | 2254-2644 |
| | | | | | 2731-2835 |
| | | | | | 2905-3445 |
| | | | | | 3608-3796 |
| | | | | | 5301-5425 |
| | | | | | 5825-5873 |
| | | | | | 5966-6142 |
| | | | | | 6830-7216 |
| | | | | | 7946-8063 |
| | | | | | 8386-8503 |
| | | | | | 8800-8850 |
| | | | | | 9112-9273 |
| | | | | | 11226-11369 |
| | | | | | 13532-13730 |
| | | | | | 14587-14789 |
| | | | | | 15162-15449 |
| | | | | | 16206-16461 |
| | | | | | 17317-17397 |
| HUSIE18 | 367 | 666523 | AC012202 | 1946 | 1-390 |
| HUSIE18 | 367 | 666523 | AC025019 | 1947 | 1-390 |
| HUSIE18 | 367 | 666523 | AC012202 | 1948 | 1-291 |
| HUSIE18 | 367 | 666523 | AC025019 | 1949 | 1-291 |
| HUSIE18 | 367 | 666523 | AC012202 | 1950 | 1-648 |
| HUSIE18 | 367 | 666523 | AC025019 | 1951 | 1-648 |
| HUSHL86 | 369 | 960355 | AC024060 | 1952 | 1-34 |
| | | | | | 629-1217 |
| | | | | | 1422-1504 |
| | | | | | 1960-2505 |
| | | | | | 2765-4239 |
| | | | | | 4518-6834 |
| | | | | | 7022-7142 |
| | | | | | 7275-8801 |
| | | | | | 9628-9839 |
| | | | | | 10556-11423 |
| | | | | | 11545-11672 |
| | | | | | 12454-12814 |
| | | | | | 15287-15399 |
| | | | | | 15533-15745 |
| | | | | | 16789-17216 |
| | | | | | 18802-18998 |
| HUSHL86 | 369 | 960355 | AC020751 | 1953 | 1-441 |
| | | | | | 2592-2921 |
| | | | | | 3789-4244 |
| | | | | | 4432-4539 |
| | | | | | 5444-5647 |
| | | | | | 6379-6482 |
| | | | | | 6779-7519 |
| | | | | | 8350-8894 |
| | | | | | 9797-10391 |
| | | | | | 10434-11002 |
| | | | | | 11220-11907 |
| | | | | | 11916-12371 |
| | | | | | 13221-14147 |
| | | | | | 21571-22104 |
| | | | | | 23458-23491 |
| | | | | | 24086-24674 |
| | | | | | 24879-24961 |
| | | | | | 25417-25962 |
| | | | | | 26222-30311 |
| | | | | | 30499-32297 |
| | | | | | 33124-33335 |
| | | | | | 34052-34919 |
| | | | | | 35041-35168 |
| | | | | | 35950-36309 |
| | | | | | 38826-38946 |
| | | | | | 39104-39176 |
| HUSHL86 | 369 | 960355 | AC068314 | 1954 | 1-441 |
| | | | | | 2592-2921 |
| | | | | | 3789-4244 |
| | | | | | 4432-4539 |
| | | | | | 5444-5647 |
| | | | | | 6379-6482 |
| | | | | | 6779-7519 |
| | | | | | 8350-8894 |
| | | | | | 9797-10391 |
| | | | | | 10434-11002 |
| | | | | | 11220-11907 |
| | | | | | 11916-12371 |
| | | | | | 13221-14147 |
| | | | | | 21571-22104 |
| | | | | | 23458-23491 |
| | | | | | 24086-24674 |
| | | | | | 24879-24961 |
| | | | | | 25417-25962 |
| | | | | | 26222-30311 |
| | | | | | 30499-32297 |
| | | | | | 33124-33275 |
| HUSHL86 | 369 | 960355 | AC018812 | 1955 | 1-441 |
| | | | | | 2592-2921 |
| | | | | | 3789-4244 |
| | | | | | 4431-4538 |
| | | | | | 5439-5642 |
| | | | | | 6374-6477 |
| | | | | | 6774-7514 |
| | | | | | 8345-8889 |
| | | | | | 9792-10386 |
| | | | | | 10429-10997 |
| | | | | | 11215-11901 |
| | | | | | 11910-12365 |
| | | | | | 13215-14141 |
| | | | | | 21566-22099 |
| | | | | | 23453-23486 |
| | | | | | 24081-24669 |
| | | | | | 24874-24956 |
| | | | | | 25411-25956 |
| | | | | | 26216-30308 |
| | | | | | 30496-32294 |
| | | | | | 33121-33332 |
| | | | | | 34049-34915 |
| | | | | | 35037-35164 |
| | | | | | 35946-36304 |
| | | | | | 38777-38889 |
| | | | | | 39023-39235 |
| | | | | | 40280-40707 |
| | | | | | 42292-42488 |
| HUSHL86 | 369 | 960355 | AC024060 | 1956 | 1-534 |
| HUSHL86 | 369 | 960355 | AC068314 | 1957 | 1-191 |
| HUSHE34 | 370 | 703409 | AC021801 | 1958 | 1-519 |
| HUSHE34 | 370 | 703409 | AC009627 | 1959 | 1-559 |
| HUSHE34 | 370 | 703409 | AC009627 | 1960 | 1-505 |
| | | | | | 651-1073 |
| HUSHB60 | 372 | 746560 | AL136109 | 1961 | 1-3030 |
| | | | | | 3212-3814 |
| | | | | | 9089-9408 |
| | | | | | 11724-12242 |
| | | | | | 12308-12959 |
| | | | | | 23153-23254 |
| | | | | | 24314-26013 |
| HUSHB60 | 372 | 746560 | AC023147 | 1962 | 1-3041 |
| | | | | | 3223-3825 |
| | | | | | 9096-9415 |
| | | | | | 11730-12248 |
| | | | | | 12314-12965 |
| | | | | | 23152-23259 |
| | | | | | 24319-26018 |
| HUSHB60 | 372 | 746560 | AC022219 | 1963 | 1-3030 |
| | | | | | 3212-3814 |
| | | | | | 9084-9403 |
| | | | | | 11717-12235 |
| | | | | | 12301-12952 |
| | | | | | 23145-23246 |
| | | | | | 24307-26006 |
| HUSHB60 | 372 | 746560 | AL136109 | 1964 | 1-344 |
| HUSHB60 | 372 | 746560 | AL136109 | 1965 | 1-174 |
| HUSHB60 | 372 | 746560 | AC023147 | 1966 | 1-122 |
| HUSHB60 | 372 | 746560 | AC022219 | 1967 | 1-191 |
| HUSHB60 | 372 | 746560 | AC022219 | 1968 | 1-344 |
| HUSGW06 | 373 | 935574 | AL138902 | 1969 | 1-723 |
| HUSGW06 | 373 | 935574 | AL031431 | 1970 | 1-723 |
| HUSGW06 | 373 | 935574 | AL031431 | 1971 | 1-65 |
| | | | | | 2139-2595 |
| | | | | | 4317-4509 |
| HUSGW06 | 373 | 935574 | AL138902 | 1972 | 1-457 |
| HUSGW06 | 373 | 935574 | AL031431 | 1973 | 1-102 |
| HUSGT01 | 376 | 916620 | AC009549 | 1974 | 1-562 |
| HUSGT01 | 376 | 916620 | AC015805 | 1975 | 1-562 |
| HUSGS35 | 377 | 707777 | AL121991 | 1976 | 1-76 |
| | | | | | 193-325 |
| | | | | | 1939-2401 |
| | | | | | 2845-2988 |
| | | | | | 3059-3370 |
| HUSGS35 | 377 | 707777 | AC022307 | 1977 | 1-76 |
| | | | | | 193-325 |
| | | | | | 1940-2402 |
| | | | | | 2846-2989 |
| | | | | | 3059-3370 |
| HUSGS35 | 377 | 707777 | AL121991 | 1978 | 1-463 |
| HUSGS35 | 377 | 707777 | AC022307 | 1979 | 1-463 |
| HUSGS35 | 377 | 707777 | AC022307 | 1980 | 1-825 |
| HUSGQ62 | 378 | 745727 | AC005021 | 1981 | 1-1276 |
| | | | | | 2698-3169 |
| | | | | | 3411-4696 |
| | | | | | 4739-5868 |
| | | | | | 6038-6892 |
| | | | | | 7133-8106 |
| | | | | | 9050-9660 |
| | | | | | 10094-10596 |
| | | | | | 11421-12539 |
| | | | | | 12909-13168 |
| | | | | | 13283-15173 |
| HUSGQ62 | 378 | 745727 | AC005021 | 1982 | 1-1198 |
| HUSGQ62 | 378 | 745727 | AC005021 | 1983 | 1-682 |
| HUSGH09 | 381 | 625647 | AC022760 | 1984 | 1-858 |
| HUSGH09 | 381 | 625647 | AC022760 | 1985 | 1-406 |
| HUSGH09 | 381 | 625647 | AC022760 | 1986 | 1-1117 |
| | | | | | 1273-3564 |
| HUSGE79 | 382 | 775309 | AL135924 | 1987 | 1-1865 |
| | | | | | 2137-3262 |
| HUSGF79 | 382 | 775309 | AL135924 | 1988 | 1-242 |
| HUSGF79 | 382 | 775309 | AL135924 | 1989 | 1-752 |
| HUSGF10 | 384 | 964844 | AC068343 | 1990 | 1-692 |
| HUSGF10 | 384 | 964844 | AC016701 | 1991 | 1-568 |
| HUSGF10 | 384 | 964844 | AC068343 | 1992 | 1-88 |
| HUSGF10 | 384 | 964844 | AC016701 | 1993 | 1-88 |
| HUSGB36 | 386 | 572924 | AC004099 | 1994 | 1-469 |
| HUSGB36 | 386 | 572924 | AC004099 | 1995 | 1-98 |
| | | | | | 239-606 |
| | | | | | 1233-1898 |
| | | | | | 2052-2151 |
| | | | | | 2509-2746 |
| | | | | | 3158-3664 |
| | | | | | 4346-4810 |
| HUSGB36 | 386 | 572924 | AC004099 | 1996 | 1-459 |
| HUSGB01 | 387 | 916804 | AL109824 | 1997 | 1-2092 |
| | | | | | 2686-3225 |
| | | | | | 5694-5765 |
| | | | | | 6067-6501 |
| | | | | | 9860-9894 |
| | | | | | 10118-10417 |
| | | | | | 11352-11782 |
| | | | | | 12468-12905 |
| | | | | | 13228-13325 |
| | | | | | 13732-14551 |
| | | | | | 15046-15490 |
| | | | | | 17951-18365 |
| | | | | | 21892-22312 |
| | | | | | 27084-27681 |
| HUSGB01 | 387 | 916804 | AL118520 | 1998 | 1-2092 |
| | | | | | 2686-3225 |
| | | | | | 5694-5765 |
| | | | | | 6067-6501 |
| | | | | | 6800-6936 |
| | | | | | 9860-9894 |
| | | | | | 10118-10417 |
| | | | | | 11365-11782 |
| | | | | | 12468-12905 |
| | | | | | 13228-13325 |
| | | | | | 13732-14095 |
| | | | | | 14134-14551 |
| | | | | | 15046-15490 |
| | | | | | 17951-18365 |
| | | | | | 21892-22312 |
| | | | | | 27084-27681 |
| HUSGB01 | 387 | 916804 | AL109824 | 1999 | 1-3383 |
| | | | | | 3917-3977 |
| HUSGB01 | 387 | 916804 | AL109824 | 2000 | 1-498 |
| HUSGB01 | 387 | 916804 | AL118520 | 2001 | 1-3383 |
| | | | | | 3917-3977 |
| HUSGB01 | 387 | 916804 | AL118520 | 2002 | 1-498 |
| HUSFH89 | 388 | 786970 | AL161787 | 2003 | 1-518 |
| HUSFH89 | 388 | 786970 | AC007847 | 2004 | 1-518 |
| HUSFH89 | 388 | 786970 | AL161787 | 2005 | 1-378 |
| HUSFH89 | 388 | 786970 | AC007847 | 2006 | 1-430 |
| HUSFH89 | 388 | 786970 | AL161787 | 2007 | 1-430 |
| HUSFH89 | 388 | 786970 | AC007847 | 2008 | 1-383 |
| HUSFE05 | 390 | 932106 | AC009754 | 2009 | 1-809 |
| | | | | | 1261-2223 |
| NUSFE05 | 390 | 932106 | AC009754 | 2010 | 1-165 |
| HUSDA09 | 391 | 461656 | AC010310 | 2011 | 1-481 |
| | | | | | 1208-1257 |
| | | | | | 2679-2913 |
| | | | | | 3250-3292 |
| | | | | | 3997-4495 |
| HUSDA09 | 391 | 461656 | AC010358 | 2012 | 1-481 |
| | | | | | 1208-1257 |
| | | | | | 2678-2912 |
| | | | | | 3249-3291 |
| | | | | | 3996-4494 |
| HUSDA09 | 391 | 461656 | AC010308 | 2013 | 1-481 |
| HUSDA09 | 391 | 461656 | AC010473 | 2014 | 1-481 |
| | | | | | 1208-1257 |
| | | | | | 2678-2912 |
| | | | | | 3249-3291 |
| | | | | | 3996-4409 |
| HUSDA09 | 391 | 461656 | AC010310 | 2015 | 1-764 |
| | | | | | 1731-1852 |
| | | | | | 2379-2680 |
| | | | | | 6120-6247 |
| | | | | | 6688-6920 |
| HUSDA09 | 391 | 461656 | AC010358 | 2016 | 1-763 |
| | | | | | 1730-1851 |
| | | | | | 2382-2676 |
| | | | | | 4434-4521 |
| | | | | | 6687-6932 |
| | | | | | 10024-10108 |
| | | | | | 10183-10309 |
| | | | | | 11384-11479 |
| | | | | | 12563-12667 |
| | | | | | 13757-14058 |
| | | | | | 14653-14751 |
| | | | | | 15469-15566 |
| | | | | | 17367-17421 |
| | | | | | 19200-19434 |
| | | | | | 19799-19996 |
| | | | | | 20868-21361 |
| | | | | | 22650-23107 |
| | | | | | 23645-23886 |
| | | | | | 25147-25272 |
| | | | | | 26153-26451 |
| | | | | | 27411-27623 |
| | | | | | 28475-28614 |
| | | | | | 29767-29903 |
| | | | | | 30328-30783 |
| | | | | | 32311-32724 |
| | | | | | 32838-33033 |
| | | | | | 34513-36008 |
| HUSDA09 | 391 | 461656 | AC010473 | 2017 | 1-763 |
| | | | | | 1730-1851 |
| | | | | | 2386-2680 |
| | | | | | 4598-4711 |
| | | | | | 6687-6932 |
| | | | | | 10021-10312 |
| | | | | | 11383-11478 |
| | | | | | 12562-12666 |
| | | | | | 13756-14057 |
| | | | | | 14655-14753 |
| | | | | | 15471-15568 |
| | | | | | 17375-17429 |
| | | | | | 19207-19441 |
| | | | | | 19806-20003 |
| | | | | | 20875-21368 |
| | | | | | 22656-23110 |
| | | | | | 23649-23887 |
| | | | | | 25151-25276 |
| | | | | | 26157-26455 |
| | | | | | 27002-27124 |
| | | | | | 27415-27627 |
| | | | | | 28479-28618 |
| | | | | | 29771-29907 |
| | | | | | 30332-30787 |
| | | | | | 32010-32222 |
| | | | | | 32315-32728 |
| | | | | | 32842-33037 |
| | | | | | 34517-36012 |
| | | | | | 36375-36754 |
| | | | | | 36988-37175 |
| | | | | | 37498-37988 |
| HUSAM87 | 394 | 529783 | AC027372 | 2018 | 1-207 |
| HUSAM22 | 396 | 523674 | AL353597 | 2019 | 1-254 |
| HUSAM22 | 396 | 523674 | AL353597 | 2020 | 1-402 |
| HUSAM22 | 396 | 523674 | AL353597 | 2021 | 1-358 |
| HUSAL04 | 397 | 927719 | AL162492 | 2022 | 1-399 |
| HUSAL04 | 397 | 927719 | AC004547 | 2023 | 1-326 |
| HUSAL04 | 397 | 927719 | AL162492 | 2024 | 1-108 |
| HUSAL04 | 397 | 927719 | AL162492 | 2025 | 1-435 |
| HUSAL04 | 397 | 927719 | AC004547 | 2026 | 1-434 |
| HUSAL04 | 397 | 927719 | AC004547 | 2027 | 1-108 |
| HUSAJ57 | 398 | 678932 | AC026432 | 2028 | 1-399 |
| HUSAJ57 | 398 | 678932 | AC027332 | 2029 | 1-399 |
| HUSAJ57 | 398 | 678932 | AC026432 | 2030 | 1-655 |
| HUSAJ57 | 398 | 678932 | AC027332 | 2031 | 1-655 |
| HMELM86 | 404 | 784702 | AL138904 | 2032 | 1-296 |
| HMELM86 | 404 | 784702 | AL354990 | 2033 | 1-296 |
| HMELI57 | 407 | 734769 | AL354988 | 2034 | 1-165 |
| | | | | | 1557-1835 |
| | | | | | 1925-2828 |
| | | | | | 3023-4548 |
| HMELI57 | 407 | 734769 | AL136382 | 2035 | 1-548 |
| | | | | | 2077-2183 |
| | | | | | 2834-3263 |
| | | | | | 4272-5297 |
| | | | | | 5304-5714 |
| | | | | | 5740-6077 |
| | | | | | 6112-6209 |
| | | | | | 6275-6444 |
| | | | | | 7836-8113 |
| | | | | | 8204-9110 |
| | | | | | 9370-11724 |
| | | | | | 11925-12566 |
| HMELI57 | 407 | 734769 | AL354988 | 2036 | 1-338 |
| HMEL157 | 407 | 734769 | AL136382 | 2037 | 1-297 |
| HMELI57 | 407 | 734769 | AL136382 | 2038 | 1-788 |
| HMEKQ19 | 411 | 668659 | AC034295 | 2039 | 1-1147 |
| HMEKO03 | 412 | 924172 | AC017079 | 2040 | 1-532 |
| | | | | | 831-2091 |
| | | | | | 3985-4071 |
| HMEKO03 | 412 | 924172 | AC017079 | 2041 | 1-87 |
| HMEKJ40 | 413 | 711187 | AC076959 | 2042 | 1-328 |
| HMEKJ40 | 413 | 711187 | AC026342 | 2043 | 1-328 |
| HMEKJ40 | 413 | 711187 | AC022336 | 2044 | 1-328 |
| HMEKC72 | 415 | 760637 | AC073177 | 2045 | 1-699 |
| HMEKC72 | 415 | 760637 | AC016905 | 2046 | 1-699 |
| HMEKC72 | 415 | 760637 | AC073177 | 2047 | 1-440 |
| HMEKC72 | 415 | 760637 | AC073177 | 2048 | 1-361 |
| HMEKC72 | 415 | 760637 | AC016905 | 2049 | 1-440 |
| HMEJW50 | 416 | 724396 | AC021412 | 2050 | 1-301 |
| HMEJW50 | 416 | 724396 | AC021420 | 2051 | 1-314 |
| HMEJW50 | 416 | 724396 | AC018603 | 2052 | 1-314 |
| HMEJW50 | 416 | 724396 | AC021420 | 2053 | 1-417 |
| | | | | | 425-556 |
| | | | | | 573-681 |
| | | | | | 1097-1351 |
| | | | | | 2554-2660 |
| | | | | | 2815-3022 |
| HMEJW50 | 416 | 724396 | AC018603 | 2054 | 1-395 |
| HMEJF25 | 418 | 678131 | AC018805 | 2055 | 1-438 |
| HMEJF25 | 418 | 678131 | AC061707 | 2056 | 1-438 |
| | | | | | 580-1572 |
| HMEJF25 | 418 | 678131 | AC018805 | 2057 | 1-153 |
| HMEJF25 | 418 | 678131 | AC061707 | 2058 | 1-174 |
| HMEJF25 | 418 | 678131 | AC018805 | 2059 | 1-132 |
| HMEJF25 | 418 | 678131 | AC061707 | 2060 | 1-153 |
| HMEIV22 | 419 | 674611 | AL109923 | 2061 | 1-839 |
| HMEIV22 | 419 | 674611 | AL109923 | 2062 | 1-531 |
| HMEIV22 | 419 | 674611 | AL109923 | 2063 | 1-108 |
| HMEGK14 | 422 | 796443 | AC025552 | 2064 | 1-143 |
| | | | | | 194-465 |
| | | | | | 672-978 |
| | | | | | 1683-3496 |
| | | | | | 5420-5721 |
| | | | | | 6695-7437 |
| | | | | | 7667-7813 |
| | | | | | 8044-8212 |
| | | | | | 8296-8435 |
| | | | | | 9411-9724 |
| | | | | | 9728-10374 |
| | | | | | 11393-12347 |
| | | | | | 12818-13273 |
| | | | | | 14310-14466 |
| | | | | | 15836-16511 |
| HMEGK14 | 422 | 796443 | AC025552 | 2065 | 1-224 |
| HMEGH92 | 423 | 790629 | AL139412 | 2066 | 1-79 |
| | | | | | 1102-1268 |
| | | | | | 1574-1674 |
| | | | | | 2124-2233 |
| HMEGH92 | 423 | 790629 | AL390756 | 2067 | 1-79 |
| | | | | | 1110-1276 |
| | | | | | 1582-1682 |
| | | | | | 2131-2240 |
| HMEGH92 | 423 | 790629 | AL390756 | 2068 | 1-107 |
| HMEGH92 | 423 | 790629 | AL139412 | 2069 | 1-95 |
| HMEFD72 | 424 | 766185 | AC023886 | 2070 | 1-625 |
| HMEFD72 | 424 | 766185 | AC023886 | 2071 | 1-436 |
| HMEEL38 | 425 | 733649 | AC011934 | 2072 | 1-777 |
| | | | | | 1512-1768 |
| | | | | | 2556-3544 |
| | | | | | 3903-4196 |
| | | | | | 4251-4362 |
| | | | | | 5124-6394 |
| | | | | | 6496-6623 |
| | | | | | 6795-7436 |
| | | | | | 7955-7995 |
| | | | | | 8050-9669 |
| HMEEL38 | 425 | 733649 | AC025287 | 2073 | 1-41 |
| | | | | | 96-868 |
| HMEEL38 | 425 | 733649 | AC011934 | 2074 | 1-166 |
| HMEDR76 | 426 | 529897 | AC002357 | 2075 | 1-172 |
| HMEDR76 | 426 | 529897 | AC002357 | 2076 | 1-248 |
| HMECH43 | 428 | 715568 | AL161779 | 2077 | 1-299 |
| HMECH43 | 428 | 715568 | AC004390 | 2078 | 1-299 |
| HMECH43 | 428 | 715568 | AL161779 | 2079 | 1-722 |
| | | | | | 1211-3695 |
| HMECH43 | 428 | 715568 | AL161779 | 2080 | 1-450 |
| HMECH43 | 428 | 715568 | AC004390 | 2081 | 1-450 |
| HMECH43 | 428 | 715568 | AC004390 | 2082 | 1-722 |
| | | | | | 1211-3695 |
| HMEBY95 | 429 | 796058 | AC026406 | 2083 | 1-457 |
| | | | | | 622-1235 |
| HMEBY95 | 429 | 796058 | AC012609 | 2084 | 1-457 |
| | | | | | 622-1235 |
| HMEBY95 | 429 | 796058 | AC026406 | 2085 | 1-427 |
| HMEBY95 | 429 | 796058 | AC012609 | 2086 | 1-276 |
| HMEBY95 | 429 | 796058 | AC012609 | 2087 | 1-427 |
| HMEBG01 | 430 | 921763 | AC009822 | 2088 | 1-3423 |
| | | | | | 3514-3705 |
| | | | | | 3918-7347 |
| HMEBG01 | 430 | 921763 | AC019299 | 2089 | 1-2183 |
| | | | | | 2274-2465 |
| | | | | | 2678-6107 |
| HMEBG01 | 430 | 921763 | AC025918 | 2090 | 1-3424 |
| | | | | | 3515-3706 |
| | | | | | 3921-7351 |
| HMEAN12 | 431 | 655220 | AC018850 | 2091 | 1-2639 |
| HMEAN12 | 431 | 655220 | AC012057 | 2092 | 1-2640 |
| HMEAN12 | 431 | 655220 | AC012342 | 2093 | 1-2447 |
| HMEAN12 | 431 | 655220 | AC018850 | 2094 | 1-585 |
| HMEAN12 | 431 | 655220 | AC012057 | 2095 | 1-585 |
| HMEAN12 | 431 | 655220 | AC012342 | 2096 | 1-585 |
| HMEAH31 | 433 | 698403 | AL162262 | 2097 | 1-603 |
| HMEAH31 | 433 | 698403 | AC026577 | 2098 | 1-603 |
| HMEAE24 | 434 | 880925 | AC009095 | 2099 | 1-229 |
| | | | | | 833-1956 |
| | | | | | 2114-2687 |
| HMEAE24 | 434 | 880925 | AC010530 | 2100 | 1-229 |
| | | | | | 833-1956 |
| | | | | | 2114-2687 |
| HMEAE24 | 434 | 880925 | AC020827 | 2101 | 1-161 |
| HMEAE24 | 434 | 880925 | AC009095 | 2102 | 1-84 |
| HMEAE24 | 434 | 880925 | AC009095 | 2103 | 1-881 |
| HMEAE24 | 434 | 880925 | AC010530 | 2104 | 1-881 |
| HMEAE24 | 434 | 880925 | AC010530 | 2105 | 1-84 |
| HMEAE24 | 434 | 880925 | AC020827 | 2106 | 1-435 |
| HMEAE01 | 435 | 916744 | AC069380 | 2107 | 1-238 |
| HMEAE01 | 435 | 916744 | AL162583 | 2108 | 1-130 |
| HHFUB83 | 439 | 800580 | AC015651 | 2109 | 1-2097 |
| | | | | | 5308-5495 |
| | | | | | 5696-5742 |
| | | | | | 5890-6249 |
| | | | | | 7370-7525 |
| | | | | | 7850-8236 |
| | | | | | 8359-8463 |
| | | | | | 8597-8770 |
| | | | | | 8919-9028 |
| | | | | | 9213-9353 |
| | | | | | 9517-9639 |
| | | | | | 9765-9874 |
| | | | | | 9944-11023 |
| | | | | | 11124-11219 |
| | | | | | 11315-11613 |
| | | | | | 11708-12241 |
| | | | | | 12431-12666 |
| | | | | | 12744-12802 |
| | | | | | 12976-13087 |
| | | | | | 13374-13914 |
| | | | | | 14728-15500 |
| HHFUB83 | 439 | 800580 | AC015651 | 2110 | 1-35 |
| | | | | | 159-252 |
| | | | | | 410-783 |
| | | | | | 786-830 |
| | | | | | 953-1035 |
| | | | | | 1452-1553 |
| | | | | | 1651-2071 |
| | | | | | 2161-2264 |
| | | | | | 2352-2454 |
| | | | | | 2494-2758 |
| | | | | | 2847-3006 |
| | | | | | 3135-3272 |
| | | | | | 3477-4138 |
| | | | | | 4907-5738 |
| | | | | | 5972-6059 |
| | | | | | 6132-6367 |
| | | | | | 6650-6834 |
| | | | | | 6915-7010 |
| | | | | | 7091-7658 |
| | | | | | 7662-9457 |
| | | | | | 10122-10222 |
| | | | | | 11415-11534 |
| | | | | | 12386-12418 |
| | | | | | 13253-13584 |
| | | | | | 13635-13867 |
| | | | | | 14881-15326 |
| | | | | | 15851-16013 |
| | | | | | 16529-16816 |
| | | | | | 17430-17529 |
| | | | | | 18140-18269 |
| | | | | | 18634-18734 |
| | | | | | 19189-19369 |
| | | | | | 20434-21105 |
| | | | | | 21912-22008 |
| HHFOK10 | 442 | 961346 | AC006995 | 2111 | 1-114 |
| | | | | | 459-1252 |
| | | | | | 1604-1917 |
| | | | | | 2187-2469 |
| | | | | | 3571-3755 |
| | | | | | 4170-4602 |
| | | | | | 4741-4841 |
| | | | | | 5040-5082 |
| | | | | | 5857-5958 |
| | | | | | 6253-6340 |
| | | | | | 7112-8041 |
| | | | | | 8231-8368 |
| | | | | | 8774-10894 |
| HHFOK10 | 442 | 961346 | AC005098 | 2112 | 1-114 |
| | | | | | 553-988 |
| | | | | | 1601-1926 |
| | | | | | 2188-2470 |
| | | | | | 3568-3753 |
| | | | | | 4168-4600 |
| | | | | | 5038-5080 |
| | | | | | 5881-5976 |
| | | | | | 6271-6358 |
| | | | | | 7128-8058 |
| | | | | | 8786-10907 |
| HHFOK10 | 442 | 961346 | AC004166 | 2113 | 1-77 |
| | | | | | 541-951 |
| | | | | | 1564-1889 |
| | | | | | 2151-2235 |
| | | | | | 3531-3716 |
| | | | | | 4131-4563 |
| | | | | | 4702-4802 |
| | | | | | 5001-5043 |
| | | | | | 5844-5939 |
| | | | | | 6234-6321 |
| | | | | | 7115-7476 |
| | | | | | 7548-8020 |
| | | | | | 8745-10867 |
| HHFOK10 | 442 | 961346 | AC006995 | 2114 | 1-89 |
| HHFOK10 | 442 | 961346 | AC005098 | 2115 | 1-509 |
| HHFOK10 | 442 | 961346 | AC004166 | 2116 | 1-509 |
| HHFNJ05 | 443 | 930899 | AC015980 | 2117 | 1-444 |
| HHFNJ05 | 443 | 930899 | AL121657 | 2118 | 1-125 |
| | | | | | 139-1354 |
| HHFNJ05 | 443 | 930899 | AC015980 | 2119 | 1-318 |
| HHFNJ05 | 443 | 930899 | AL121657 | 2120 | 1-183 |
| | | | | | 1297-1615 |
| HHFMX34 | 444 | 945385 | AC068499 | 2121 | 1-255 |
| | | | | | 649-898 |
| | | | | | 1564-1640 |
| | | | | | 1742-1872 |
| | | | | | 2784-3528 |
| HHFMX34 | 444 | 945385 | AC068499 | 2122 | 1-181 |
| HHFMX34 | 444 | 945385 | AC068499 | 2123 | 1-861 |
| | | | | | 1666-1889 |
| | | | | | 1923-2050 |
| | | | | | 2743-2845 |
| | | | | | 3525-3649 |
| | | | | | 4171-4355 |
| | | | | | 4660-4760 |
| | | | | | 5305-6319 |
| | | | | | 7098-7233 |
| HHFLU06 | 445 | 857884 | AL096870 | 2124 | 1-68 |
| | | | | | 218-379 |
| | | | | | 706-840 |
| | | | | | 1000-1180 |
| | | | | | 1505-2004 |
| | | | | | 2014-2301 |
| | | | | | 3897-3942 |
| | | | | | 4074-4162 |
| | | | | | 4353-4422 |
| | | | | | 4764-4865 |
| | | | | | 4941-5356 |
| | | | | | 5850-5932 |
| | | | | | 6040-6181 |
| | | | | | 6664-6917 |
| | | | | | 7152-7337 |
| | | | | | 7431-7624 |
| | | | | | 8016-8175 |
| | | | | | 8346-8525 |
| | | | | | 9445-9926 |
| | | | | | 10349-10496 |
| | | | | | 10802-10912 |
| | | | | | 10949-11881 |
| HHFLU06 | 445 | 857884 | AL096870 | 2125 | 1-262 |
| HHFLJ51 | 448 | 857898 | Z80897 | 2126 | 1-83 |
| | | | | | 445-925 |
| | | | | | 1105-1728 |
| | | | | | 3829-3949 |
| | | | | | 4113-4310 |
| | | | | | 4851-4962 |
| | | | | | 5196-5510 |
| | | | | | 5739-6151 |
| | | | | | 6188-6735 |
| | | | | | 6764-7120 |
| | | | | | 7155-9664 |
| HHFLJ51 | 448 | 857898 | Z80897 | 2127 | 1-435 |
| HHFLJ51 | 448 | 857898 | Z80897 | 2128 | 1-428 |
| HHFLI10 | 449 | 963162 | AC025145 | 2129 | 1-631 |
| HHFLI10 | 449 | 963162 | AC025145 | 2130 | 1-102 |
| | | | | | 1188-1294 |
| | | | | | 1395-1671 |
| | | | | | 2450-2912 |
| | | | | | 2957-4002 |
| | | | | | 5146-5499 |
| | | | | | 5831-6235 |
| | | | | | 6978-7038 |
| | | | | | 7222-7295 |
| | | | | | 9054-10739 |
| HHFLH62 | 451 | 857908 | AC009260 | 2131 | 1-655 |
| HHFLH62 | 451 | 857908 | AC069240 | 2132 | 1-655 |
| | | | | | 693-1132 |
| | | | | | 1637-1983 |
| | | | | | 2129-2540 |
| HHFLH62 | 451 | 857908 | AL080279 | 2133 | 1-655 |
| | | | | | 693-1132 |
| | | | | | 1637-1983 |
| | | | | | 2129-2540 |
| HHFLH62 | 451 | 857908 | AC009260 | 2134 | 1-364 |
| HHFLH62 | 451 | 857908 | AC069240 | 2135 | 1-69 |
| | | | | | 154-406 |
| | | | | | 641-789 |
| | | | | | 1249-1488 |
| | | | | | 1646-2009 |
| HHFLH62 | 451 | 857908 | AL080279 | 2136 | 1-277 |
| HHFLH62 | 451 | 857908 | AC009260 | 2137 | 1-440 |
| HHFLH62 | 451 | 857908 | AC069240 | 2138 | 1-277 |
| HHFLH62 | 451 | 857908 | AL080279 | 2139 | 1-69 |
| | | | | | 154-406 |
| | | | | | 641-789 |
| | | | | | 1249-1488 |
| | | | | | 1646-2009 |
| HHFLE12 | 452 | 969531 | AC016769 | 2140 | 1-159 |
| | | | | | 582-1086 |
| HHFLE12 | 452 | 969531 | AC016769 | 2141 | 1-31 |
| | | | | | 286-1049 |
| HHFIA58 | 456 | 858011 | AC011782 | 2142 | 1-172 |
| | | | | | 285-514 |
| | | | | | 731-1209 |
| | | | | | 2624-2993 |
| | | | | | 3007-3112 |
| | | | | | 4226-6800 |
| HHFIA58 | 456 | 858011 | AC011782 | 2143 | 1-454 |
| HHFLA58 | 456 | 858011 | AC011782 | 2144 | 1-486 |
| HHFIA13 | 457 | 657405 | AP001093 | 2145 | 1-875 |
| HHFIA13 | 457 | 657405 | AP001890 | 2146 | 1-419 |
| HHFIA13 | 457 | 657405 | AC011720 | 2147 | 1-875 |
| HHFIA13 | 457 | 657405 | AC009551 | 2148 | 1-875 |
| HHFIA13 | 457 | 657405 | AP001093 | 2149 | 1-303 |
| HHFHY95 | 458 | 795053 | AC005839 | 2150 | 1-1417 |
| HHFHY95 | 458 | 795053 | AC005839 | 2151 | 1-104 |
| HHFHY95 | 458 | 795053 | AC005839 | 2152 | 1-453 |
| HHFHM22 | 462 | 674841 | AC006487 | 2153 | 1-477 |
| HHFHM22 | 462 | 674841 | AC015656 | 2154 | 1-428 |
| HHFHM22 | 462 | 674841 | AC060233 | 2155 | 1-428 |
| HHFHM22 | 462 | 674841 | AC006487 | 2156 | 1-342 |
| HHFHM22 | 462 | 674841 | AC060233 | 2157 | 1-342 |
| HHFHM22 | 462 | 674841 | AC060233 | 2158 | 1-913 |
| HHFHJ90 | 463 | 675218 | AC025605 | 2159 | 1-357 |
| | | | | | 443-919 |
| HHFHJ90 | 463 | 675218 | AC025605 | 2160 | 1-653 |
| HHFHD38 | 464 | 709082 | AL161651 | 2161 | 1-312 |
| HHFHD38 | 464 | 709082 | AL355542 | 2162 | 1-312 |
| HHFHD38 | 464 | 709082 | AL158037 | 2163 | 1-312 |
| HHFHD38 | 464 | 709082 | AL158037 | 2164 | 1-897 |
| | | | | | 971-2743 |
| | | | | | 2892-4334 |
| | | | | | 4530-5979 |
| HHFHD38 | 464 | 709082 | AL161651 | 2165 | 1-897 |
| | | | | | 971-2743 |
| | | | | | 2891-4333 |
| | | | | | 4529-5979 |
| HHFHD38 | 464 | 709082 | AL355542 | 2166 | 1-898 |
| | | | | | 972-2744 |
| | | | | | 2892-4334 |
| | | | | | 4530-5980 |
| HHFGX03 | 466 | 924753 | AL359815 | 2167 | 1-962 |
| | | | | | 1420-1815 |
| | | | | | 2091-2328 |
| | | | | | 3095-3210 |
| | | | | | 3693-3824 |
| HHFGX03 | 466 | 924753 | AL359815 | 2168 | 1-391 |
| HHFGR30 | 468 | 692887 | AC025857 | 2169 | 1-425 |
| HHFGR30 | 468 | 692887 | AF285442 | 2170 | 1-129 |
| | | | | | 1834-2165 |
| | | | | | 3005-3269 |
| | | | | | 3419-3802 |
| | | | | | 4272-4470 |
| | | | | | 4516-6168 |
| | | | | | 8490-8670 |
| | | | | | 9026-9540 |
| | | | | | 9759-10042 |
| | | | | | 10490-10799 |
| | | | | | 11249-11673 |
| | | | | | 12087-12508 |
| | | | | | 12947-13289 |
| | | | | | 13383-14422 |
| | | | | | 15702-16013 |
| | | | | | 16205-17581 |
| HHFGR30 | 468 | 692887 | AC025857 | 2171 | 1-143 |
| | | | | | 499-1013 |
| | | | | | 1237-1515 |
| | | | | | 1963-2272 |
| HHFGR30 | 468 | 692887 | AC025857 | 2172 | 1-422 |
| HHFGR30 | 468 | 692887 | AF285442 | 2173 | 1-240 |
| HHFFR95 | 477 | 796677 | AC027518 | 2174 | 1-429 |
| HHFFR95 | 477 | 796677 | AC027518 | 2175 | 1-592 |
| HHFFP17 | 480 | 880667 | AL357497 | 2176 | 1-451 |
| HHFFP17 | 480 | 880667 | AL024498 | 2177 | 1-451 |
| HHFFP17 | 480 | 880667 | AL357497 | 2178 | 1-266 |
| HHFFP17 | 480 | 880667 | AL357497 | 2179 | 1-113 |
| HHFFP17 | 480 | 880667 | AL024498 | 2180 | 1-266 |
| HHFFP17 | 480 | 880667 | AL024498 | 2181 | 1-113 |
| HHFFO46 | 481 | 530501 | AC073075 | 2182 | 1-324 |
| HHFFO46 | 481 | 530501 | AL391056 | 2183 | 1-324 |
| HHFFO46 | 481 | 530501 | AC073075 | 2184 | 1-652 |
| HHFFO46 | 481 | 530501 | AC073075 | 2185 | 1-686 |
| HHFFO46 | 481 | 530501 | AL391056 | 2186 | 1-686 |
| HHFFO46 | 481 | 530501 | AL391056 | 2187 | 1-652 |
| HHFFK30 | 484 | 858051 | AC074244 | 2188 | 1-549 |
| HHFFK30 | 484 | 858051 | AL365495 | 2189 | 1-549 |
| HHFFF92 | 489 | 790572 | AC008267 | 2190 | 1-1586 |
| | | | | | 2346-3145 |
| HHFFF92 | 489 | 790572 | AC008267 | 2191 | 1-118 |
| HHFFF92 | 489 | 790572 | AC008267 | 2192 | 1-458 |
| HHFDA13 | 496 | 667804 | AC073237 | 2193 | 1-436 |
| HHFDA13 | 496 | 667804 | AC073347 | 2194 | 1-436 |
| HHFDA13 | 496 | 667804 | AC073237 | 2195 | 1-167 |
| HHFDA13 | 496 | 667804 | AC073347 | 2196 | 1-167 |
| HHFDA13 | 496 | 667804 | AC073237 | 2197 | 1-387 |
| HHFDA13 | 496 | 667804 | AC073347 | 2198 | 1-98 |
| HHFCT63 | 497 | 572784 | AC021037 | 2199 | 1-272 |
| HHFCT63 | 497 | 572784 | AC021037 | 2200 | 1-42 |
| | | | | | 67-197 |
| HHFCT63 | 497 | 572784 | AC021037 | 2201 | 1-368 |
| HHFCP39 | 498 | 429442 | AL365197 | 2202 | 1-1022 |
| HHFCP39 | 498 | 429442 | AL360295 | 2203 | 1-3499 |
| HHFCP39 | 498 | 429442 | AL035705 | 2204 | 1-3498 |
| HHFCP39 | 498 | 429442 | AL360295 | 2205 | 1-529 |
| HHFCP39 | 498 | 429442 | AL035705 | 2206 | 1-529 |
| HHFCN59 | 500 | 739657 | AL136171 | 2207 | 1-558 |
| HHFCN59 | 500 | 739657 | AL136171 | 2208 | 1-708 |
| HHFCN13 | 501 | 667805 | AC011324 | 2209 | 1-572 |
| | | | | | 671-925 |
| | | | | | 1087-1466 |
| | | | | | 1816-2216 |
| | | | | | 2498-2991 |
| | | | | | 7984-8314 |
| | | | | | 14041-14139 |
| | | | | | 17879-18271 |
| | | | | | 18532-18703 |
| | | | | | 18858-19140 |
| | | | | | 19597-20052 |
| | | | | | 20677-20765 |
| | | | | | 22029-22547 |
| | | | | | 22751-23694 |
| | | | | | 25142-25457 |
| | | | | | 27691-28945 |
| | | | | | 31825-32122 |
| | | | | | 32489-32604 |
| HHFCN13 | 501 | 667805 | AC022080 | 2210 | 1-380 |
| | | | | | 730-1130 |
| HHFCN13 | 501 | 667805 | AC068293 | 2211 | 1-381 |
| | | | | | 731-1131 |
| HHFCN13 | 501 | 667805 | AC022080 | 2212 | 1-494 |
| HNFCN13 | 501 | 667805 | AC068293 | 2213 | 1-254 |
| HNFCN13 | 501 | 667805 | AC022080 | 2214 | 1-255 |
| HHFCN13 | 501 | 667805 | AC068293 | 2215 | 1-494 |
| HHFCM51 | 502 | 509631 | AL139193 | 2216 | 1-192 |
| HHFCH52 | 503 | 911570 | AC009469 | 2217 | 1-345 |
| HHFCH52 | 503 | 911570 | AC009469 | 2218 | 1-138 |
| HHFCE73 | 505 | 764763 | AC011236 | 2219 | 1-1187 |
| HHFCE73 | 505 | 764763 | AC011236 | 2220 | 1-388 |
| HHFCE73 | 505 | 764763 | AC011236 | 2221 | 1-712 |
| HHFCE40 | 506 | 712866 | AL138706 | 2222 | 1-50 |
| | | | | | 166-221 |
| | | | | | 1953-2025 |
| | | | | | 3258-3677 |
| | | | | | 4973-4998 |
| | | | | | 5552-5583 |
| | | | | | 6350-6836 |
| | | | | | 6918-7452 |
| | | | | | 7594-9776 |
| | | | | | 10184-10341 |
| | | | | | 11085-11577 |
| | | | | | 11979-12219 |
| | | | | | 12391-12435 |
| HHFCD43 | 507 | 714353 | AC069165 | 2223 | 1-6088 |
| | | | | | 6581-7107 |
| | | | | | 7238-7612 |
| HHFCD43 | 507 | 714353 | AC069165 | 2224 | 1-79 |
| | | | | | 176-448 |
| | | | | | 1406-1701 |
| | | | | | 2708-2957 |
| | | | | | 3004-3130 |
| | | | | | 3532-4127 |
| | | | | | 4248-4536 |
| | | | | | 5587-5675 |
| | | | | | 8104-9589 |
| | | | | | 9689-9809 |
| | | | | | 10850-10949 |
| | | | | | 11111-11687 |
| | | | | | 13731-13968 |
| HHFCD43 | 507 | 714353 | AC069165 | 2225 | 1-296 |
| HHFCC60 | 508 | 739669 | AC024035 | 2226 | 1-472 |
| HHFCC60 | 508 | 739669 | AC013693 | 2227 | 1-472 |
| HHFCC60 | 508 | 739669 | AC024035 | 2228 | 1-502 |
| HHFCC60 | 508 | 739669 | AC013693 | 2229 | 1-338 |
| HHFCC60 | 508 | 739669 | AC013693 | 2230 | 1-502 |
| HHFBU63 | 512 | 745661 | AL161784 | 2231 | 1-702 |
| HHFBU63 | 512 | 745661 | AC011969 | 2232 | 1-702 |
| HHFBU63 | 512 | 745661 | AC006558 | 2233 | 1-704 |
| HHFBU63 | 512 | 745661 | AL161784 | 2234 | 1-348 |
| HHFBU63 | 512 | 745661 | AC011969 | 2235 | 1-348 |
| HHFBU63 | 512 | 745661 | AC011969 | 2236 | 1-300 |
| | | | | | 891-1330 |
| | | | | | 1365-1850 |
| | | | | | 2053-2512 |
| HHFBU63 | 512 | 745661 | AC006558 | 2237 | 1-302 |
| | | | | | 895-1337 |
| | | | | | 2067-2529 |
| HHFBU07 | 513 | 954478 | AC011271 | 2238 | 1-565 |
| HHFBU07 | 513 | 954478 | AC008741 | 2239 | 1-565 |
| HHFBQ94 | 515 | 796838 | AC073389 | 2240 | 1-616 |
| | | | | | 1011-1677 |
| | | | | | 2444-2728 |
| | | | | | 2831-3372 |
| | | | | | 3913-4145 |
| | | | | | 5401-5519 |
| HHFBQ94 | 515 | 796838 | AC073389 | 2241 | 1-457 |
| HHFBQ94 | 515 | 796838 | AC073389 | 2242 | 1-327 |
| HHFBP29 | 516 | 710894 | AP002420 | 2243 | 1-1113 |
| | | | | | 1314-1622 |
| | | | | | 1654-1913 |
| | | | | | 2085-2325 |
| | | | | | 2828-3393 |
| | | | | | 4312-4385 |
| HHFBP29 | 516 | 710894 | AC009052 | 2244 | 1-1113 |
| | | | | | 1314-1622 |
| | | | | | 1654-1913 |
| | | | | | 2085-2325 |
| | | | | | 2830-3396 |
| | | | | | 4315-4391 |
| | | | | | 5871-6041 |
| | | | | | 8072-8343 |
| | | | | | 8483-8561 |
| | | | | | 11009-11161 |
| HHFBP29 | 516 | 710894 | AC004382 | 2245 | 1-1113 |
| | | | | | 1320-1622 |
| | | | | | 1654-1913 |
| | | | | | 2085-2325 |
| | | | | | 2830-3396 |
| | | | | | 4312-4391 |
| | | | | | 5877-6047 |
| | | | | | 8493-8571 |
| | | | | | 11015-11171 |
| | | | | | 11411-11604 |
| | | | | | 11737-12079 |
| | | | | | 12352-13598 |
| HHFBP29 | 516 | 710894 | AC004382 | 2246 | 1-555 |
| HHFBM11 | 518 | 968002 | AC008026 | 2247 | 1-517 |
| HHFBM11 | 518 | 968002 | AC010964 | 2248 | 1-1737 |
| HHFBM11 | 518 | 968002 | AC007996 | 2249 | 1-1796 |
| HHFBM11 | 518 | 968002 | AC007996 | 2250 | 1-869 |
| HHFBM11 | 518 | 968002 | AC007996 | 2251 | 1-59 |
| | | | | | 98-1081 |
| HHFBD83 | 519 | 781525 | AC005343 | 2252 | 1-96 |
| | | | | | 784-1143 |
| | | | | | 1734-1849 |
| | | | | | 2133-2401 |
| | | | | | 3742-5557 |
| HHFBA11 | 522 | 967991 | AL356915 | 2253 | 1-375 |
| HHFBA11 | 522 | 967991 | AL356915 | 2254 | 1-410 |
| HHFBA11 | 522 | 967991 | AL356915 | 2255 | 1-159 |
| HHBGN74 | 524 | 765214 | AC010344 | 2256 | 1-627 |
| | | | | | 1004-4346 |
| HHBGN74 | 524 | 765214 | AC010344 | 2257 | 1-377 |
| HHBGJ53 | 525 | 909912 | AC024740 | 2258 | 1-160 |
| | | | | | 497-598 |
| | | | | | 882-1177 |
| | | | | | 2484-2930 |
| | | | | | 3412-3474 |
| | | | | | 4974-5279 |
| | | | | | 5401-5511 |
| | | | | | 7287-7408 |
| | | | | | 7618-7741 |
| | | | | | 8122-8503 |
| | | | | | 9322-9392 |
| | | | | | 9508-9613 |
| | | | | | 9792-9880 |
| | | | | | 10554-10663 |
| | | | | | 11328-11539 |
| | | | | | 11871-12149 |
| HHBGJ53 | 525 | 909912 | AC026803 | 2259 | 1-522 |
| | | | | | 979-1066 |
| | | | | | 2563-2870 |
| | | | | | 2993-3103 |
| | | | | | 5037-5169 |
| | | | | | 5211-5334 |
| | | | | | 5715-6053 |
| | | | | | 6915-6985 |
| | | | | | 7101-7206 |
| | | | | | 8147-8256 |
| | | | | | 8922-9137 |
| | | | | | 9467-9745 |
| HHBGJ53 | 525 | 909912 | AC024740 | 2260 | 1-37 |
| | | | | | 713-1145 |
| HHBGJ53 | 525 | 909912 | AC026803 | 2261 | 1-291 |
| HHBGG10 | 526 | 963849 | AC011374 | 2262 | 1-477 |
| HHBGG10 | 526 | 963849 | AC011337 | 2263 | 1-477 |
| HHBFT06 | 528 | 934826 | AC009506 | 2264 | 1-1319 |
| HHBFT06 | 528 | 934826 | AC009506 | 2265 | 1-403 |
| HHBFM77 | 529 | 771816 | AC044809 | 2266 | 1-1731 |
| HHBEG80 | 533 | 951688 | AL355885 | 2267 | 1-75 |
| | | | | | 188-497 |
| | | | | | 613-693 |
| | | | | | 766-3364 |
| HHBEG80 | 533 | 951688 | AL355885 | 2268 | 1-455 |
| HHBEG72 | 534 | 761150 | AL365197 | 2269 | 1-1022 |
| HHBEG72 | 534 | 761150 | AL360295 | 2270 | 1-3499 |
| HHBEG72 | 534 | 761150 | AL035705 | 2271 | 1-3498 |
| HHBEG72 | 534 | 761150 | AL360295 | 2272 | 1-529 |
| HHBEG72 | 534 | 761150 | AL035705 | 2273 | 1-529 |
| HEMGX57 | 536 | 872083 | AC026532 | 2274 | 1-1402 |
| HEMGX57 | 536 | 872083 | AL133375 | 2275 | 1-1402 |
| HEMGX57 | 536 | 872083 | AL355385 | 2276 | 1-1402 |
| HEMGX57 | 536 | 872083 | AC026532 | 2277 | 1-63 |
| | | | | | 35 1-440 |
| | | | | | 653-831 |
| | | | | | 1091-1225 |
| | | | | | 1550-1914 |
| | | | | | 1987-2093 |
| | | | | | 2169-2663 |
| | | | | | 3247-3384 |
| HEMGX57 | 536 | 872083 | AC026532 | 2278 | 1-593 |
| HEMGX57 | 536 | 872083 | AL133375 | 2279 | 1-232 |
| | | | | | 1484-1579 |
| | | | | | 1716-1889 |
| | | | | | 2574-2832 |
| | | | | | 3771-3878 |
| | | | | | 4166-4255 |
| | | | | | 4468-4646 |
| | | | | | 4906-5040 |
| | | | | | 5365-5729 |
| | | | | | 5802-5908 |
| | | | | | 5984-6478 |
| | | | | | 7062-7199 |
| HEMGX57 | 536 | 872083 | AL355385 | 2280 | 1-593 |
| HEMGX57 | 536 | 872083 | AL133375 | 2281 | 1-586 |
| HEMGX57 | 536 | 872083 | AL355385 | 2282 | 1-96 |
| | | | | | 233-406 |
| | | | | | 1042-1347 |
| | | | | | 2288-2395 |
| | | | | | 2683-2772 |
| | | | | | 2985-3163 |
| | | | | | 3423-3557 |
| | | | | | 3882-4246 |
| | | | | | 4319-4425 |
| | | | | | 4501-4995 |
| | | | | | 5579-5716 |
| HEMFN30 | 539 | 692818 | AL138828 | 2283 | 1-1045 |
| HEMFN30 | 539 | 692818 | AC022654 | 2284 | 1-1045 |
| HEMFN30 | 539 | 692818 | AL138828 | 2285 | 1-304 |
| | | | | | 767-1440 |
| | | | | | 2390-2488 |
| | | | | | 4487-4781 |
| | | | | | 8192-8273 |
| | | | | | 12771-12988 |
| HEMFN30 | 539 | 692818 | AL138828 | 2286 | 1-273 |
| HEMFN30 | 539 | 692818 | AC022654 | 2287 | 1-94 |
| | | | | | 5044-5347 |
| | | | | | 5810-6483 |
| | | | | | 7433-7531 |
| | | | | | 9535-9829 |
| | | | | | 13240-13324 |
| | | | | | 17819-18036 |
| HEMFN30 | 539 | 692818 | AC022654 | 2288 | 1-273 |
| HEMFF16 | 540 | 576539 | AC027272 | 2289 | 1-653 |
| HEMFF16 | 540 | 576539 | AC016586 | 2290 | 1-397 |
| HEMFF16 | 540 | 576539 | AC027272 | 2291 | 1-169 |
| HEMFF16 | 540 | 576539 | AC016586 | 2292 | 1-81 |
| | | | | | 1174-1224 |
| | | | | | 1309-1436 |
| | | | | | 1836-1904 |
| | | | | | 2233-2616 |
| | | | | | 3041-3257 |
| | | | | | 4501-4940 |
| | | | | | 5112-5176 |
| | | | | | 7004-7423 |
| | | | | | 7957-8002 |
| | | | | | 8214-8644 |
| | | | | | 9821-10063 |
| | | | | | 10981-11092 |
| | | | | | 11741-11869 |
| HEMFF16 | 540 | 576539 | AC027272 | 2293 | 1-112 |
| HEMFF16 | 540 | 576539 | AC016586 | 2294 | 1-169 |
| HEMEA03 | 542 | 921922 | AL162730 | 2295 | 1-419 |
| HEMEA03 | 542 | 921922 | AL162730 | 2296 | 1-202 |
| HEMEA03 | 542 | 921922 | AL162730 | 2297 | 1-355 |
| HEMCV44 | 544 | 574321 | AC067756 | 2298 | 1-424 |
| HEMCV44 | 544 | 574321 | AC021837 | 2299 | 1-424 |
| HEMCV44 | 544 | 574321 | AC011308 | 2300 | 1-424 |
| HEMCV44 | 544 | 574321 | AC067756 | 2301 | 1-475 |
| HEMCV44 | 544 | 574321 | AC021837 | 2302 | 1-475 |
| HEMCV44 | 544 | 574321 | AC067756 | 2303 | 1-156 |
| HEMCV44 | 544 | 574321 | AC011308 | 2304 | 1-156 |
| HEMCV44 | 544 | 574321 | AC021837 | 2305 | 1-156 |
| HEMCV44 | 544 | 574321 | AC011308 | 2306 | 1-475 |
| HEMCI41 | 547 | 712614 | AC068637 | 2307 | 1-993 |
| HEMCI41 | 547 | 712614 | AC008120 | 2308 | 1-993 |
| HEMCI41 | 547 | 712614 | AC068637 | 2309 | 1-1424 |
| HEMCI4I | 547 | 712614 | AC008120 | 2310 | 1-1424 |
| HEMCC38 | 548 | 707453 | AC007616 | 2311 | 1-283 |
| | | | | | 1585-3443 |
| | | | | | 3686-4902 |
| | | | | | 5558-5704 |
| | | | | | 6041-6150 |
| HEMCC38 | 548 | 707453 | AC007613 | 2312 | 1-283 |
| | | | | | 1585-3443 |
| | | | | | 3686-4902 |
| | | | | | 5558-5704 |
| | | | | | 6036-6151 |
| | | | | | 8423-8526 |
| | | | | | 9199-10562 |
| | | | | | 12224-12577 |
| | | | | | 13496-13996 |
| | | | | | 14166-17946 |
| HEMAL61 | 551 | 851106 | AL356124 | 2313 | 1-532 |
| | | | | | 1491-2021 |
| | | | | | 6384-6477 |
| | | | | | 7549-7576 |
| HELHJ74 | 553 | 765696 | AC007279 | 2314 | 1-108 |
| | | | | | 609-761 |
| | | | | | 3108-3562 |
| | | | | | 4639-4820 |
| | | | | | 5667-5787 |
| | | | | | 8416-8496 |
| | | | | | 11327-11405 |
| | | | | | 13714-14015 |
| | | | | | 15679-16042 |
| | | | | | 18174-18630 |
| | | | | | 25423-25699 |
| | | | | | 25789-25900 |
| | | | | | 25962-26240 |
| | | | | | 26738-27049 |
| | | | | | 33446-33649 |
| | | | | | 34051-34334 |
| | | | | | 37491-37775 |
| | | | | | 38208-38363 |
| | | | | | 39524-39655 |
| | | | | | 39680-40045 |
| | | | | | 40177-40743 |
| | | | | | 43779-43858 |
| | | | | | 44056-44205 |
| | | | | | 44914-45142 |
| | | | | | 49029-49117 |
| | | | | | 50868-51004 |
| | | | | | 51950-51979 |
| | | | | | 52641-53034 |
| | | | | | 53289-53447 |
| | | | | | 53454-53986 |
| HELHJ74 | 553 | 765696 | AC007279 | 2315 | 1-1654 |
| HELHJ74 | 553 | 765696 | AC007279 | 2316 | 1-159 |
| | | | | | 555-909 |
| | | | | | 2593-2625 |
| | | | | | 4471-5067 |
| | | | | | 6631-6770 |
| | | | | | 10086-10210 |
| | | | | | 11310-11468 |
| | | | | | 13666-13784 |
| | | | | | 14092-14289 |
| | | | | | 15370-15442 |
| | | | | | 16104-16150 |
| HELHC59 | 555 | 769404 | AC073610 | 2317 | 1-2422 |
| | | | | | 2490-2790 |
| | | | | | 3039-3077 |
| | | | | | 3371-3544 |
| | | | | | 3585-3774 |
| | | | | | 3860-3927 |
| | | | | | 4112-4357 |
| HELHC59 | 555 | 769404 | AC073610 | 2318 | 1-696 |
| HELGY42 | 556 | 713019 | AC012202 | 2319 | 1-648 |
| HELGY42 | 556 | 713019 | AC025019 | 2320 | 1-648 |
| HELGY42 | 556 | 713019 | AC012202 | 2321 | 1-390 |
| HELGY42 | 556 | 713019 | AC025019 | 2322 | 1-390 |
| HELGK56 | 561 | 925698 | AC023789 | 2323 | 1-732 |
| HELGG21 | 562 | 671071 | AC023225 | 2324 | 1-472 |
| HELGG21 | 562 | 671071 | AC023225 | 2325 | 1-869 |
| | | | | | 991-1462 |
| HELGG21 | 562 | 671071 | AL138846 | 2326 | 1-304 |
| | | | | | 423-553 |
| | | | | | 1434-2199 |
| | | | | | 3430-3470 |
| | | | | | 6425-6910 |
| | | | | | 7169-7453 |
| | | | | | 7726-8594 |
| | | | | | 8716-9187 |
| | | | | | 9274-9340 |
| | | | | | 10220-10323 |
| | | | | | 10333-10484 |
| | | | | | 10770-10868 |
| | | | | | 12169-12276 |
| | | | | | 12626-12744 |
| | | | | | 12959-13087 |
| | | | | | 13628-13739 |
| | | | | | 14496-14592 |
| | | | | | 15842-17239 |
| HELGG21 | 562 | 671071 | AC023225 | 2327 | 1-63 |
| | | | | | 949-1052 |
| | | | | | 1062-1217 |
| | | | | | 1500-1598 |
| | | | | | 2892-2999 |
| | | | | | 3350-3468 |
| | | | | | 3685-3811 |
| | | | | | 4351-4478 |
| | | | | | 5217-5305 |
| | | | | | 6563-7960 |
| HELGG21 | 562 | 671071 | AC023225 | 2328 | 1-426 |
| HELGG21 | 562 | 671071 | AL138846 | 2329 | 1-442 |
| HELGG21 | 562 | 671071 | AL138846 | 2330 | 1-638 |
| HELGD47 | 563 | 851143 | AP001320 | 2331 | 1-964 |
| HELGD47 | 563 | 851143 | AP000848 | 2332 | 1-459 |
| HELGD47 | 563 | 851143 | AP000929 | 2333 | 1-964 |
| HELGD47 | 563 | 851143 | AP001320 | 2334 | 1-454 |
| HELGD47 | 563 | 851143 | AP000848 | 2335 | 1-416 |
| HELGD47 | 563 | 851143 | AP000929 | 2336 | 1-453 |
| HELFQ55 | 564 | 732224 | AF267167 | 2337 | 1-869 |
| | | | | | 883-1439 |
| | | | | | 1680-2082 |
| HELFQ55 | 564 | 732224 | AF165145 | 2338 | 1-869 |
| | | | | | 883-1439 |
| | | | | | 1680-2082 |
| HELFQ55 | 564 | 732224 | AF267167 | 2339 | 1-592 |
| HELFQ55 | 564 | 732224 | AF267167 | 2340 | 1-288 |
| HELFQ55 | 564 | 732224 | AF165145 | 2341 | 1-592 |
| HELFQ55 | 564 | 732224 | AF165145 | 2342 | 1-288 |
| HELFJ35 | 566 | 506277 | AC026558 | 2343 | 1-370 |
| HELFJ35 | 566 | 506277 | AC023973 | 2344 | 1-370 |
| HELFJ35 | 566 | 506277 | AC026558 | 2345 | 1-530 |
| HELFJ35 | 566 | 506277 | AC023973 | 2346 | 1-530 |
| HELFJ35 | 566 | 506277 | AC026558 | 2347 | 1-871 |
| | | | | | 1399-1797 |
| HELFJ35 | 566 | 506277 | AC023973 | 2348 | 1-873 |
| | | | | | 1403-1801 |
| HELEZ81 | 568 | 571340 | AL049712 | 2349 | 1-813 |
| | | | | | 1243-2039 |
| | | | | | 2304-3038 |
| | | | | | 3047-3450 |
| | | | | | 3473-3638 |
| | | | | | 3800-4012 |
| | | | | | 4383-8646 |
| | | | | | 8760-9748 |
| | | | | | 9758-10031 |
| | | | | | 10041-10310 |
| | | | | | 12504-12632 |
| | | | | | 12709-13273 |
| HELEZ81 | 568 | 571340 | AL049712 | 2350 | 1-133 |
| HELET68 | 569 | 800029 | AC008267 | 2351 | 1-433 |
| HELET68 | 569 | 800029 | AC008267 | 2352 | 1-513 |
| HELEO42 | 570 | 579016 | AC010674 | 2353 | 1-110 |
| | | | | | 3938-4022 |
| | | | | | 5339-5881 |
| HELEO42 | 570 | 579016 | AC010674 | 2354 | 1-114 |
| | | | | | 3201-3287 |
| | | | | | 5782-6912 |
| HELEO42 | 570 | 579016 | AC010674 | 2355 | 1-1038 |
| | | | | | 2072-2350 |
| | | | | | 2444-2783 |
| | | | | | 3079-3144 |
| | | | | | 4658-5350 |
| | | | | | 6459-6639 |
| | | | | | 7394-7624 |
| | | | | | 10010-10103 |
| | | | | | 10404-10463 |
| | | | | | 10557-10641 |
| | | | | | 10928-11380 |
| | | | | | 11817-11998 |
| | | | | | 12307-12468 |
| | | | | | 14217-14314 |
| | | | | | 15654-15714 |
| HELEH76 | 571 | 506674 | AL360298 | 2356 | 1-944 |
| HELEH76 | 571 | 506674 | AL358072 | 2357 | 1-972 |
| HELEH76 | 571 | 506674 | AC053494 | 2358 | 1-972 |
| HELEH76 | 571 | 506674 | AC022671 | 2359 | 1-972 |
| HELEH76 | 571 | 506674 | AC053494 | 2360 | 1-470 |
| | | | | | 766-1174 |
| HELDL08 | 575 | 959919 | AC073595 | 2361 | 1-453 |
| | | | | | 819-1737 |
| HELDL08 | 575 | 959919 | AC027288 | 2362 | 1-454 |
| | | | | | 820-1738 |
| HELDL08 | 575 | 959919 | AC027288 | 2363 | 1-584 |
| HELDG91 | 578 | 790371 | AC026562 | 2364 | 1-774 |
| HELDG91 | 578 | 790371 | AC069256 | 2365 | 1-774 |
| HELDG91 | 578 | 790371 | AC026562 | 2366 | 1-255 |
| HELDG91 | 578 | 790371 | AC069256 | 2367 | 1-255 |
| HELDG91 | 578 | 790371 | AC026562 | 2368 | 1-544 |
| HELDG91 | 578 | 790371 | AC069256 | 2369 | 1-544 |
| HELCW51 | 579 | 531073 | AC078913 | 2370 | 1-165 |
| HELCI30 | 580 | 691024 | AC016697 | 2371 | 1-510 |
| HELCI30 | 580 | 691024 | AC012362 | 2372 | 1-140 |
| | | | | | 2160-2746 |
| | | | | | 2944-3409 |
| | | | | | 3461-3941 |
| HELCI30 | 580 | 691024 | AC016697 | 2373 | 1-126 |
| HELCI30 | 580 | 691024 | AC012362 | 2374 | 1-484 |
| HELCI30 | 580 | 691024 | AC012362 | 2375 | 1-108 |
| HELCG36 | 581 | 655045 | AL133377 | 2376 | 1-1464 |
| HELCG36 | 581 | 655045 | AL136164 | 2377 | 1-1563 |
| HELCG36 | 581 | 655045 | AL136164 | 2378 | 1-277 |
| HELCG36 | 581 | 655045 | AL133377 | 2379 | 1-277 |
| HELCG36 | 581 | 655045 | AL136164 | 2380 | 1-1285 |
| HELBU11 | 582 | 967661 | AC010209 | 2381 | 1-697 |
| HELBU11 | 582 | 967661 | AC010209 | 2382 | 1-396 |
| HELBU11 | 582 | 967661 | AC010209 | 2383 | 1-284 |
| HELBC83 | 583 | 781412 | AL139328 | 2384 | 1-515 |
| | | | | | 1506-1971 |
| HELBC83 | 583 | 781412 | AC018379 | 2385 | 1-515 |
| | | | | | 1506-1971 |
| HELBC83 | 583 | 781412 | AL136527 | 2386 | 1 -515 |
| | | | | | 1506-1971 |
| HELBC83 | 583 | 781412 | AL139328 | 2387 | 1-413 |
| HELBC83 | 583 | 781412 | AC018379 | 2388 | 1-631 |
| | | | | | 637-1252 |
| HELBC83 | 583 | 781412 | AL139328 | 2389 | 1-631 |
| | | | | | 637-1252 |
| HELBC83 | 583 | 781412 | AL136527 | 2390 | 1-631 |
| | | | | | 637-1252 |
| HELBC83 | 583 | 781412 | AL136527 | 2391 | 1-413 |
| HELAZ48 | 584 | 864515 | AL162734 | 2392 | 1-2089 |
| HELAZ48 | 584 | 864515 | AL162734 | 2393 | 1-1074 |
| HELAZ48 | 584 | 864515 | AL162734 | 2394 | 1-310 |
| HELAM32 | 587 | 699661 | AC008079 | 2395 | 1-295 |
| | | | | | 428-875 |
| | | | | | 892-945 |
| | | | | | 1563-1700 |
| | | | | | 2084-2191 |
| | | | | | 5109-5504 |
| | | | | | 6802-7282 |
| | | | | | 9658-9809 |
| | | | | | 9818-10338 |
| | | | | | 10350-11130 |
| | | | | | 11158-15251 |
| | | | | | 15262-15836 |
| | | | | | 15909-16774 |
| HELAM32 | 587 | 699661 | AC008101 | 2396 | 1-295 |
| | | | | | 428-875 |
| | | | | | 892-945 |
| | | | | | 1563-1700 |
| | | | | | 2032-2191 |
| | | | | | 5109-5504 |
| | | | | | 6801-7281 |
| | | | | | 9657-9808 |
| | | | | | 9817-10337 |
| | | | | | 10349-11129 |
| | | | | | 11157-15257 |
| | | | | | 15269-15843 |
| HELAM32 | 587 | 699661 | AC016830 | 2397 | 1-145 |
| | | | | | 433-1745 |
| HELAM32 | 587 | 699661 | AC016027 | 2398 | 1-295 |
| | | | | | 428-875 |
| | | | | | 892-945 |
| | | | | | 1563-1700 |
| | | | | | 2084-2191 |
| | | | | | 5109-5504 |
| | | | | | 6028-6128 |
| | | | | | 6802-7282 |
| | | | | | 9658-9809 |
| | | | | | 9818-10338 |
| | | | | | 10350-11130 |
| | | | | | 11158-15836 |
| | | | | | 15909-16774 |
| HELAM32 | 587 | 699661 | AC008079 | 2399 | 1-287 |
| HELAM32 | 587 | 699661 | AC008079 | 2400 | 1-297 |
| HELAM32 | 587 | 699661 | AC008101 | 2401 | 1-287 |
| HELAM32 | 587 | 699661 | AC008101 | 2402 | 1-802 |
| HELAM32 | 587 | 699661 | AC016830 | 2403 | 1-687 |
| HELAM32 | 587 | 699661 | AC016830 | 2404 | 1-284 |
| | | | | | 574-1700 |
| | | | | | 2012-2132 |
| HELAM32 | 587 | 699661 | AC016027 | 2405 | 1-287 |
| HELAM32 | 587 | 699661 | AC016027 | 2406 | 1-304 |
| HCMSY80 | 589 | 526182 | AC069028 | 2407 | 1-255 |
| HCMSQ63 | 590 | 745584 | AC025975 | 2408 | 1-52 |
| | | | | | 752-1355 |
| HCMSQ63 | 590 | 745584 | AC008681 | 2409 | 1-52 |
| | | | | | 757-1360 |
| HCMSQ63 | 590 | 745584 | AC025975 | 2410 | 1-530 |
| | | | | | 837-919 |
| | | | | | 1945-3561 |
| HCMSQ63 | 590 | 745584 | AC008681 | 2411 | 1-530 |
| | | | | | 837-919 |
| | | | | | 1944-3560 |
| HAHFE11 | 594 | 965293 | AL008718 | 2412 | 1-466 |
| | | | | | 554-874 |
| | | | | | 2846-2933 |
| | | | | | 4193-4484 |
| | | | | | 4853-5225 |
| | | | | | 5311-5727 |
| | | | | | 6015-9575 |
| HAHFE11 | 594 | 965293 | AC062010 | 2413 | 1-373 |
| | | | | | 459-875 |
| | | | | | 1166-2221 |
| HAHFE11 | 594 | 965293 | AL008718 | 2414 | 1-440 |
| HAHCU22 | 596 | 848831 | AC021054 | 2415 | 1-62 |
| | | | | | 909-1442 |
| | | | | | 1984-4152 |
| HAHCU22 | 596 | 848831 | AC006205 | 2416 | 1-54 |
| | | | | | 796-950 |
| | | | | | 1203-1275 |
| | | | | | 1695-1850 |
| | | | | | 2485-2616 |
| | | | | | 3454-3987 |
| | | | | | 4529-6698 |
| HAHCU22 | 596 | 848831 | AC021054 | 2417 | 1-395 |
| | | | | | 928-1113 |
| | | | | | 1661-1885 |
| HAHCU22 | 596 | 848831 | AC006205 | 2418 | 1-130 |
| HAHCU22 | 596 | 848831 | AC006205 | 2419 | 1-395 |
| | | | | | 928-1113 |
| | | | | | 1661-1885 |
| HAHAD95 | 600 | 865104 | AC026149 | 2420 | 1-338 |
| HAHAD95 | 600 | 865104 | AC026149 | 2421 | 1-154 |
| HAHAD95 | 600 | 865104 | AC026149 | 2422 | 1-1125 |
| HAFBG30 | 601 | 693363 | AC010264 | 2423 | 1-577 |
| HAFBG30 | 601 | 693363 | AC005740 | 2424 | 1-2469 |
| | | | | | 2938-3229 |
| | | | | | 5273-5782 |
| | | | | | 6611-6709 |
| | | | | | 7387-7969 |
| | | | | | 8404-8801 |
| | | | | | 9433-9896 |
| | | | | | 12391-13237 |
| HAFBG30 | 601 | 693363 | AC010264 | 2425 | 1-477 |
| | | | | | 743-1093 |
| | | | | | 1601-1973 |
| | | | | | 2653-3336 |
| | | | | | 3487-6292 |
| | | | | | 6493-6735 |
| HAFBG30 | 601 | 693363 | AC010264 | 2426 | 1-257 |
| HAFBG30 | 601 | 693363 | AC005740 | 2427 | 1-477 |
| | | | | | 743-1093 |
| | | | | | 1601-1973 |
| | | | | | 2653-3336 |
| | | | | | 3487-6735 |
| | | | | | 6910-7038 |
| | | | | | 7213-7317 |
| | | | | | 7329-8051 |
| | | | | | 9152-10208 |
| | | | | | 10293-11443 |
| | | | | | 11593-12545 |
| | | | | | 12811-13152 |
| | | | | | 13422-13481 |
| | | | | | 13601-14334 |
| | | | | | 14418-14524 |
| | | | | | 14625-14713 |
| | | | | | 14958-15119 |
| | | | | | 15309-15446 |
| | | | | | 16402-16558 |
| | | | | | 19172-19292 |
| | | | | | 19680-19767 |
| | | | | | 20000-20121 |
| | | | | | 20728-20869 |
| HAFAY37 | 602 | 928705 | AC073264 | 2428 | 1-338 |
| | | | | | 804-3157 |
| HAFAY37 | 602 | 928705 | AC024155 | 2429 | 1-340 |
| | | | | | 808-1235 |
| | | | | | 1241-3169 |
| HAFAY37 | 602 | 928705 | AC073264 | 2430 | 1-488 |
| | | | | | 1407-2258 |
| | | | | | 2342-3262 |
| HAFAY37 | 602 | 928705 | AC073264 | 2431 | 1-534 |
| HAFAY37 | 602 | 928705 | AC024155 | 2432 | 1-535 |
| HAFAY37 | 602 | 928705 | AC024155 | 2433 | 1-488 |
| | | | | | 1407-2258 |
| | | | | | 2342-3262 |
| HAECA04 | 604 | 932993 | AC012419 | 2434 | 1-401 |
| | | | | | 1140-1492 |
| | | | | | 1588-2434 |
| HAECA04 | 604 | 932993 | AC068288 | 2435 | 1-401 |
| | | | | | 1140-1492 |
| | | | | | 1588-2433 |
| HAECA04 | 604 | 932993 | AC015971 | 2436 | 1-401 |
| | | | | | 1140-1492 |
| | | | | | 1588-2433 |
| HAECA04 | 604 | 932993 | AC012419 | 2437 | 1-803 |
| HAECA04 | 604 | 932993 | AC068288 | 2438 | 1-465 |
| HAECA04 | 604 | 932993 | AC068288 | 2439 | 1-781 |
| | | | | | 1537-2119 |
| HAECA04 | 604 | 932993 | AC015971 | 2440 | 1-362 |
| | | | | | 408-802 |
| | | | | | 1558-2142 |
| HAECA04 | 604 | 932993 | AC015971 | 2441 | 1-465 |
| HAEAM82 | 605 | 781539 | AC009790 | 2442 | 1-1057 |
| | | | | | 1129-1711 |

[0070] Table 1B summarizes additional polynucleotides encompassed by the invention (including cDNA clones related to the sequences (Clone ID NO:Z), contig sequences (contig identifier (Contig ID:) contig nucleotide sequence identifiers (SEQ ID NO:X)), and genomic sequences (SEQ ID NO:B). The first column provides a unique clone identifier, “Clone ID NO:Z”, for a cDNA clone related to each contig sequence. The second column provides the sequence identifier, “SEQ ID NO:X”, for each contig sequence. The third column provides a unique contig identifier, “Contig ID:” for each contig sequence. The fourth column, provides a BAC identifier “BAC ID NO:A” for the BAC clone referenced in the corresponding row of the table. The fifth column provides the nucleotide sequence identifier, “SEQ ID NO:B” for a fragment of the BAC clone identified in column four of the corresponding row of the table. The sixth column, “Exon From-To”, provides the location (i.e., nucleotide position numbers) within the polynucleotide sequence of SEQ ID NO:B which delineate certain polynucleotides of the invention that are also exemplary members of polynucleotide sequences that encode polypeptides of the invention (e.g., polypeptides containing amino acid sequences encoded by the polynucleotide sequences delineated in column six, and fragments and variants thereof).

TABLE 2

| | | SEQ | | | | Score/ | | |
|---|---|---|---|---|---|---|---|---|
| Clone ID | Contig | ID | Analysis | | PFam/NR Accession | Percent | | |
| NO : Z | ID: | NO : X | Method | PFam/NR Description | Number | Identity | NT From | NT To |
| HAHEE05 | 928673 | 20 | blastx.2 | (AC005531) similar to | gb\|AAD04728.1\| | 100% | 39 | 422 |
| | | | | mouse homeodomain- | | | | |
| | | | | interacting protein 1 | | | | |
| HAHHE12 | 969107 | 24 | blastx.14 | N-RAP [Mus musculus] | gi\|2351568\|gb\|AAC5 | 76% | 307 | 621 |
| | | | | | 3323.1\| | 67% | 139 | 333 |
| | | | | | | 54% | 460 | 612 |
| | | | | | | 78% | 667 | 762 |
| | | | | | | 35% | 514 | 708 |
| | | | | | | 75% | 673 | 759 |
| | | | | | | 59% | 481 | 576 |
| | | | | | | 32% | 526 | 708 |
| | | | | | | 37% | 598 | 717 |
| | | | | | | 34% | 541 | 705 |
| | | | | | | 40% | 601 | 705 |
| | | | | | | 34% | 547 | 675 |
| | | | | | | 27% | 457 | 621 |
| | | | | | | 27% | 514 | 708 |
| | | | | | | 85% | 762 | 803 |
| | | | | | | 26% | 619 | 756 |
| | | | | | | 31% | 541 | 693 |
| | | | | | | 55% | 703 | 769 |
| | | | | | | 29% | 544 | 675 |
| | | | | | | 30% | 460 | 585 |
| | | | | | | 38% | 619 | 696 |
| | | | | | | 34% | 598 | 693 |
| | | | | | | 38% | 619 | 696 |
| | | | | | | 47% | 526 | 588 |
| | | | | | | 29% | 598 | 690 |
| | | | | | | 29% | 607 | 717 |
| | | | | | | 66% | 457 | 492 |
| | | | | | | 47% | 526 | 576 |
| | | | | | | 75% | 627 | 662 |
| | | | | | | 40% | 526 | 585 |
| | | | | | | 33% | 616 | 696 |
| | | | | | | 36% | 649 | 705 |
| | | | | | | 23% | 460 | 585 |
| | | | | | | 37% | 637 | 708 |
| | | | | | | 37% | 637 | 708 |
| | | | | | | 56% | 526 | 573 |
| | | | | | | 39% | 723 | 791 |
| | | | | | | 57% | 532 | 573 |
| | | | | | | 50% | 762 | 797 |
| | | | | | | 50% | 762 | 797 |
| | | | | | | 28% | 711 | 794 |
| | | | | | | 27% | 592 | 702 |
| | | | | | | 26% | 526 | 594 |
| | | | | | | 29% | 720 | 800 |
| | | | | | | 30% | 415 | 483 |
| HELEA45 | 954371 | 49 | blastx.14 | exopolyphosphatase | gi\|147343\|gb\|AAA24 | 89% | 86 | 169 |
| | | | | [Escherichia coli] | 415.1\| | 100% | 66 | 98 |
| HELHF07 | 949067 | 78 | HMMER | PFAM: | PF00202 | 38.85 | 95 | 295 |
| | | | 1.8 | Aminotransferases class- | | | | |
| | | | | III pyridoxal-phosphate | | | | |
| | | | blastx.14 | 4-aminobutyrate | gi\|1742132\|dbj\|BAA1 | 85% | 83 | 295 |
| | | | | aminotransferase (EC | 4871.1\| | 92% | 21 | 98 |
| | | | | 2.6.1.19) 1 1 | | 45% | 246 | 311 |
| | | | | aminotransferase). | | 100% | 1 | 18 |
| | | | | [Escherichia coli] | | | | |
| HEMEK19 | 574209 | 92 | HMMER | PFAM: TonB dependent | PF00593 | 46.8 | 81 | 233 |
| | | | 2.1.1 | receptor C-terminal region | | | | |
| HEMEU54 | 947801 | 94 | blastx.14 | samaphorin G [Mus | gi\|1418942\|emb\|CAA | 96% | 11 | 325 |
| | | | | musculus] | 66398.1\| | 50% | 122 | 280 |
| | | | | | | 42% | 128 | 298 |
| | | | | | | 51% | 122 | 238 |
| | | | | | | 54% | 14 | 112 |
| | | | | | | 35% | 68 | 235 |
| | | | | | | 33% | 134 | 328 |
| | | | | | | 42% | 29 | 112 |
| | | | | | | 30% | 122 | 238 |
| | | | | | | 41% | 343 | 429 |
| | | | | | | 44% | 248 | 301 |
| | | | | | | 55% | 302 | 328 |
| | | | | | | 62% | 305 | 328 |
| | | | | | | 45% | 296 | 328 |
| | | | | | | 62% | 305 | 328 |
| HHBEM7O | 756949 | 107 | HMMER | PFAM: Core histones | PF00125 | 13.08 | 144 | 215 |
| | | | 1.8 | H2A, H2B, H3 and H4 | | | | |
| HHBHO63 | 906947 | 121 | HMMER | PFAM: Phorbol esters/ | PF00130 | 2.21 | 188 | 217 |
| | | | 1.8 | diacylglycerol binding | | | | |
| | | | | domain | | | | |
| HHFBX77 | 959805 | 136 | blastx.14 | (AB012308) B2HC | gi\|4033608\|dbj\|BAA3 | 83% | 13 | 366 |
| | | | | [Anthocidaris crassispina] | 5136.1\| | | | |
| HHFCA64 | 720849 | 137 | HMMER | PFAM: Zinc-binding | PF00099 | 3.2 | 287 | 267 |
| | | | 1.8 | metalloprotease domain | | | | |
| HHFGN31 | 908508 | 177 | HMMER | PFAM:KRAB box | PF01352 | 64.1 | 93 | 215 |
| | | | 2.1.1 | | | | | |
| HHFHC02 | 920510 | 192 | HMMER | PFAM: Eukaryotic protein | PF00069 | 13.11 | 118 | 183 |
| | | | 1.8 | kinase domain | | | | |
| | | | blastx.14 | (AB023658) | gi\|4512334\|dbj\|BAA7 | 94% | 70 | 183 |
| | | | | Ca/calmodulin-dependent | 5246.1\| | | | |
| | | | | protein kinase 1 | | | | |
| HHFJN02 | 918358 | 214 | blastx.14 | retrovirus-related reverse | pir\|B25313\|GNLRL1\| | 53% | 297 | 208 |
| | | | | transcriptase pseudogene - | | 54% | 390 | 286 |
| | | | | slow loris | | | | |
| HHFON19 | 910891 | 257 | HMMER | PFAM: Dual specificity | PF00782 | 154.8 | 316 | 732 |
| | | | 2.1.1 | phosphatase, catalytic | | | | |
| | | | | domain | | | | |
| | | | blastx.14 | (AF143321) unknown | gi\|4929222\|gb\|AAD3 | 68% | 298 | 825 |
| | | | | [Homo sapiens] | 3910.1\|AF143321_1 | | | |
| HHFUC26 | 960331 | 267 | HMMER | PFAM: Src homology | PF00018 | 3.21 | 343 | 375 |
| | | | 1.8 | domain 3 | | | | |
| HMEGH46 | 887791 | 287 | HMMER | PFAM: C2 domain | PF00168 | 12.81 | 10 | 78 |
| | | | 1.8 | | | | | |
| HULAI37 | 708923 | 307 | HMMER | PFAM: Core histones | PF00125 | 13.48 | 99 | 173 |
| | | | 1.8 | H2A, H2B, H3 and H4 | | | | |
| HULFB76 | 767873 | 313 | HMMER | PFAM: HIT family | PF01230 | 24.6 | 67 | 147 |
| | | | 2.1.1 | | | | | |
| HUSIW10 | 963324 | 330 | blastx.14 | (AF098499) No definition | gi\|3786408\|gb\|AAC6 | 48% | 234 | 320 |
| | | | | line found [Caenorhabditis | 7396.1\| | 41% | 149 | 241 |
| | | | | elegans] | | | | |
| HUSYA63 | 928021 | 335 | blastx.14 | (AF116865) hedgehog- | gi\|4868122\|gb\|AAD3 | 88% | 251 | 439 |
| | | | | interacting protein [Mus | 1172.1\|AF116865_1 | | | |
| | | | | musculus] | | | | |
| HUSZH03 | 922852 | 341 | blastx.14 | C06A6.3 gene product | gi\|1086626\|gb\|AAA8 | 34% | 367 | 633 |
| | | | | [Caenorhabditis elegans] | 2295.1\| | 61% | 259 | 297 |
| HUSYN11 | 943237 | 345 | HMMER | PFAM: Core histones | PF00125 | 13.67 | 238 | 315 |
| | | | 1.8 | H2A, H2B, H3 and H4 | | | | |
| | | | blastx.2 | (AL137556) hypothetical | emb\|CAB7O810.1\| | 67% | 137 | 319 |
| | | | | protein [Homo sapiens] | | 96% | 240 | 320 |
| | | | | | | 96% | 241 | 321 |
| HUSIE95 | 967176 | 366 | blastx.14 | GS2NA [Homo sapiens] | gi\|805095\|gb\|AAB81 | 56% | 229 | 5 |
| | | | | | 551.1\| | 53% | 496 | 413 |
| | | | | | | 37% | 121 | 11 |
| | | | | | | 31% | 388 | 332 |
| | | | | | | 33% | 484 | 431 |
| HUSIE08 | 908574 | 368 | blastx.14 | (AB024005) KRAB- | gi\|4514561\|dbj\|BAA7 | 70% | 38 | 229 |
| | | | | containing zinc-finger | 5468.1\| | | | |
| | | | | protein KRAZ2 [Mus | | | | |
| | | | | musculus] | | | | |
| HUSHL86 | 960355 | 369 | blastx.14 | (AF151805) CGI-47 | gi\|4929563\|gb\|AAD3 | 96% | 1142 | 882 |
| | | | | protein [Homo sapiens] | 4042.1\|AF151805_1 | 100% | 1413 | 1330 |
| HUSFF03 | 924616 | 389 | blastx.14 | (AF033276) A kinase | gi\|2852701\|gb\|AAC0 | 83% | 266 | 535 |
| | | | | anchor protein [Mus | 2208.1\| | 47% | 541 | 591 |
| | | | | musculus] | | | | |
| HHFLU06 | 857884 | 445 | HMMER | PFAM: Adenylate and | PF00211 | 108.8 | 17 | 268 |
| | | | 2.1.1 | Guanylate cyclase | | | | |
| | | | | catalytic domain | | | | |
| HHFKX28 | 971102 | 453 | blastx.14 | Similarity to Yeast | gi\|3881836\|emb\|CAB | 76% | 858 | 619 |
| | | | | LPG22P protein | 01454.1\| | 65% | 495 | 409 |
| | | | | (TR:G1151240); 1 1 | | 91% | 617 | 546 |
| | | | | cDNA EST | | | | |
| | | | | EMBL:C10626 comes | | | | |
| | | | | from this gene; cDNA | | | | |
| | | | | EST EMBL:C10848 | | | | |
| HHFJM64 | 958384 | 455 | blastx.2 | (AF026504) SPA-1 like | gb\|AAB81526.1\| | 83% | 3 | 287 |
| | | | | protein p1294 [Rattus | | 43% | 323 | 664 |
| | | | | norvegicus] | | 29% | 799 | 1266 |
| | | | | | | 28% | 847 | 1344 |
| HHFCH52 | 911570 | 503 | blastx.14 | INSERTIN=TENSIN | sp\|G256713\|G256713 | 95% | 15 | 77 |
| | | | | HOMOLOG. | | | | |
| HHBGJ53 | 909912 | 525 | HMMER | PFAM: PH domain | PF00169 | 38.3 | 160 | 267 |
| | | | 2.1.1 | | | | | |
| HHBGG10 | 963849 | 526 | blastx.14 | (AB011527) MEGF1 | gi\|3449286\|dbj\|BAA3 | 90% | 98 | 3 |
| | | | | [Rattus norvegicus] | 2458.1\| | 75% | 210 | 112 |
| | | | | | | 45% | 210 | 151 |
| | | | | | | 41% | 219 | 184 |
| HHBEG80 | 951688 | 533 | HMMER | PFAM: Core histones | PF00125 | 12.4 | 371 | 436 |
| | | | 1.8 | H2A, H2B, H3 and H4 | | | | |
| HEMGL56 | 767669 | 538 | HMMER | PFAM: Filamin/ABP280 | PF00630 | 84.1 | 45 | 209 |
| | | | 2.1.1 | repeat. | | | | |
| HEMDX96 | 935963 | 543 | blastx.14 | (AF111170) unknown | gi\|4314286\|gb\|AAD1 | 79% | 491 | 255 |
| | | | | [Homo sapiens] | 5563.1\| | | | |
| HEMBT61 | 939957 | 550 | HMMER | PFAM: Eukaryotic protein | PF00069 | 76.6 | 16 | 285 |
| | | | | 2.1.1 | kinase domain | | | |
| | | | blastx.2 | (AD000092) hypothetical | gb\|AAB51171.1\| | 71% | 13 | 441 |
| | | | | human serine-threonine | | | | |
| | | | | protein kinase R31240_1 | | | | |
| | | | | [Homo sapiens] | | | | |
| HELGY02 | 948302 | 557 | blastx.2 | Similar to sulfatase | gb\|AAA83618.1\| | 59% | 383 | 523 |
| | | | | [Caenorhabditis elegans] | | | | |
| HELGW31 | 610003 | 558 | HMMER | PFAM: Cytocbrome C | PF01578 | 216.5 | 672 | 1286 |
| | | | 2.1.1 | assembly protein | | | | |
| | | | blastx.2 | (AE000309) heme | gb\|AAC75259.1\| | 100% | 603 | 1337 |
| | | | | exporter protein C | | | | |
| | | | | [Escherichia coli] | | | | |
| HELGW31 | 957568 | 622 | HMMER | PFAM: Cytochrome C | PF01578 | 200.9 | 990 | 421 |
| | | | 2.1.1 | assembly protein | | | | |
| | | | blastx.2 | (AE000309) heme | gb\|AAC75259.1\| | 99% | 5 | 619 |
| | | | | exporter protein C | | 100% | 621 | 713 |
| | | | | [Escherichia coli] | | | | |
| HELGW31 | 964303 | 623 | blastx.2 | yejV [Escherichia coli] | gb\|AAA16392.1\| | 93% | 39 | 449 |
| | | | | | | 60% | 1 | 75 |
| HELGK56 | 925698 | 561 | HMMER | PFAM: Pyruvate kinase | PF00224 | 406.9 | 147 | 731 |
| | | | 2.1.1 | | | | | |
| | | | blastx.14 | pyruvate kinase type II | gi\|147459\|gb\|AAA24 | 98% | 147 | 731 |
| | | | | [Escherichia coli] | 473.1\| | 65% | 21 | 107 |
| HELFN75 | 658681 | 565 | blastx.2 | Molybdenum transport | dbj\|BAA35428.1\| | 100% | 288 | 635 |
| | | | | system permease protein | | | | |
| | | | | ModB. [Escherichia coli] | | | | |
| HAHFS80 | 954432 | 593 | blastx.14 | (AJ010306) human | gi\|4128006\|emb\|CAA | 73% | 3 | 275 |
| | | | | smoothelin, large isoform | 09077.1\| | | | |
| | | | | [Homo sapiens] | | | | |
| HAECA04 | 932993 | 604 | blastx.14 | (AF097473) ORF1 [Mus | gi\|4204569\|gb\|AAD1 | 37% | 106 | 216 |
| | | | | musculus] | 0771.1\| | 53% | 239 | 322 |
| | | | | | | 35% | 40 | 99 |
| | | | | | | 61% | 178 | 216 |
| | | | | | | 57% | 94 | 135 |

[0071] Table 2 further characterizes certain encoded polypeptides of the invention, by providing the results of comparisons to protein and protein family databases. The first column provides a unique clone identifier, “Clone ID NO:”, corresponding to a cDNA clone disclosed in Table 1A. The second column provides the unique contig indentifier, “Contig ID:” which allows correlation with the information in Table 1A. The third column provides the sequence identifier, “SEQ ID NO:X”, for the contig polynucleotide sequences. The fourth column provides the analysis method by which the homology/identity disclosed in the row was determined. The fifth column provides a description of PFam/NR hits having significant matches identified by each analysis. Column six provides the accession number of the PFam/NR hit disclosed in the fifth column. Column seven, “Score/Percent Identity”, provides a quality score or the percent identity, of the hit disclosed in column five. Comparisons were made between polypeptides encoded by polynucleotides of the invention and a non-redundant protein database (herein referred to as “NR”), or a database of protein families (herein referred to as “PFam”), as described below.

[0072] The NR database, which comprises the NBRF PIR database, the NCBI GenPept database, and the SIB SwissProt and TrEMBL databases, was made non-redundant using the computer program nrdb2 (Warren Gish, Washington University in Saint Louis). Each of the polynucleotides shown in Table 1A, column 3 (e.g., SEQ ID NO:X or the ‘Query’ sequence) was used to search against the NR database. The computer program BLASTX was used to compare a 6-frame translation of the Query sequence to the NR database (for information about the BLASTX algorithm please see Altshul et al., J. Mol. Biol. 215:403-410 (1990), and Gish et al., Nat. Genet. 3:266-272 (1993)). A description of the sequence that is most similar to the Query sequence (the highest scoring ‘Subject’) is shown in column five of Table 2 and the database accession number for that sequence is provided in column six. The highest scoring ‘Subject’ is reported in Table 2 if (a) the estimated probability that the match occurred by chance alone is less than 1.0e-07, and (b) the match was not to a known repetitive element. BLASTX returns alignments of short polypeptide segments of the Query and Subject sequences which share a high degree of similarity; these segments are known as High-Scoring Segment Pairs or HSPs. Table 2 reports the degree of similarity between the Query and the Subject for each HSP as a percent identity in Column 7. The percent identity is determined by dividing the number of exact matches between the two aligned sequences in the HSP, dividing by the number of Query amino acids in the HSP and multiplying by 100. The polynucleotides of SEQ ID NO:X which encode the polypeptide sequence that generates an HSP are delineated by columns 8 and 9 of Table 2.

[0073] The PFam database, PFam version 5.2, (Sonnhammer et al., Nucl. Acids Res., 26:320-322, (1998)) consists of a series of multiple sequence alignments; one alignment for each protein family. Each multiple sequence alignment is converted into a probability model called a Hidden Markov Model, or HMM, that represents the position-specific variation among the sequences that make up the multiple sequence alignment (see, e.g., R. Durbin et al., Biological sequence analysis: probabilistic models of proteins and nucleic acids, Cambridge University Press, 1998 for the theory of HMMs). The program HMMER version 1.8 (Sean Eddy, Washington University in Saint Louis) was used to compare the predicted protein sequence for each Query sequence (SEQ ID NO:Y in Table 1A) to each of the HMMs derived from PFam version 5.2. A HMM derived from PFam version 5.2 was said to be a significant match to a polypeptide of the invention if the score returned by HMMER 1.8 was greater than 0.8 times the HMMER 1.8 score obtained with the most distantly related known member of that protein family. The description of the PFam family which shares a significant match with a polypeptide of the invention is listed in column 5 of Table 2, and the database accession number of the PFam hit is provided in column 6. Column 7 provides the score returned by HMMER version 1.8 for the alignment. Columns 8 and 9 delineate the polynucleotides of SEQ ID NO:X which encode the polypeptide sequence which shows a significant match to a PFam protein family.

[0074] As mentioned, columns 8 and 9 in Table 2, “NT From” and “NT To”, delineate the polynucleotides of “SEQ ID NO:X” that encode a polypeptide having a significant match to the PFam/NR database as disclosed in the fifth column of Table 2. In one embodiment, the invention provides a protein comprising, or alternatively consisting of, a polypeptide encoded by the polynucleotides of SEQ ID NO:X delineated in columns 8 and 9 of Table 2. Also provided are polynucleotides encoding such proteins, and the complementary strand thereto.

[0075] The nucleotide sequence SEQ ID NO:X and the translated SEQ ID NO:Y are sufficiently accurate and otherwise suitable for a variety of uses well known in the art and described further below. For instance, the nucleotide sequences of SEQ ID NO:X are useful for designing nucleic acid hybridization probes that will detect nucleic acid sequences contained in SEQ ID NO:X or the cDNA contained in Clone ID NO:Z. These probes will also hybridize to nucleic acid molecules in biological samples, thereby enabling immediate applications in chromosome mapping, linkage analysis, tissue identification and/or typing, and a variety of forensic and diagnostic methods of the invention. Similarly, polypeptides identified from SEQ ID NO:Y may be used to generate antibodies which bind specifically to these polypeptides, or fragments thereof, and/or to the polypeptides encoded by the cDNA clones identified in, for example, Table 1A.

[0076] Nevertheless, DNA sequences generated by sequencing reactions can contain sequencing errors. The errors exist as misidentified nucleotides, or as insertions or deletions of nucleotides in the generated DNA sequence. The erroneously inserted or deleted nucleotides cause frame shifts in the reading frames of the predicted amino acid sequence. In these cases, the predicted amino acid sequence diverges from the actual amino acid sequence, even though the generated DNA sequence may be greater than 99.9% identical to the actual DNA sequence (for example, one base insertion or deletion in an open reading frame of over 1000 bases).

[0077] Accordingly, for those applications requiring precision in the nucleotide sequence or the amino acid sequence, the present invention provides not only the generated nucleotide sequence identified as SEQ ID NO:X, and a predicted translated amino acid sequence identified as SEQ ID NO:Y, but also a sample of plasmid DNA containing cDNA Clone ID NO:Z (deposited with the ATCC on Oct. 5, 2000, and receiving ATCC designation numbers PTA 2574 and PTA 2575; deposited with the ATCC on Jan. 5, 2001, having the depositor reference numbers TS-1, TS-2, AC-1, and AC-2; and/or as set forth, for example, in Table 1A, 6 and 7). The nucleotide sequence of each deposited clone can readily be determined by sequencing the deposited clone in accordance with known methods. Further, techniques known in the art can be used to verify the nucleotide sequences of SEQ ID NO:X.

[0078] The predicted amino acid sequence can then be verified from such deposits. Moreover, the amino acid sequence of the protein encoded by a particular clone can also be directly determined by peptide sequencing or by expressing the protein in a suitable host cell containing the deposited human cDNA, collecting the protein, and determining its sequence.

[0079] RACE Protocol For Recovery of Full-Length Genes

[0080] Partial cDNA clones can be made full-length by utilizing the rapid amplification of cDNA ends (RACE) procedure described in Frohman, M. A., et al., Proc. Nat'l. Acad. Sci. USA, 85:8998-9002 (1988). A cDNA clone missing either the 5′ or 3′ end can be reconstructed to include the absent base pairs extending to the translational start or stop codon, respectively. In some cases, cDNAs are missing the start codon of translation. The following briefly describes a modification of this original 5′ RACE procedure. Poly A+ or total RNA is reverse transcribed with Superscript II (Gibco/BRL) and an antisense or complementary primer specific to the cDNA sequence. The primer is removed from the reaction with a Microcon Concentrator (Amicon). The first-strand cDNA is then tailed with dATP and terminal deoxynucleotide transferase (Gibco/BRL). Thus, an anchor sequence is produced which is needed for PCR amplification. The second strand is synthesized from the dA-tail in PCR buffer, Taq DNA polymerase (Perkin-Elmer Cetus), an oligo-dT primer containing three adjacent restriction sites (XhoI, SalI and ClaI) at the 5′ end and a primer containing just these restriction sites. This double-stranded cDNA is PCR amplified for 40 cycles with the same primers as well as a nested cDNA-specific antisense primer. The PCR products are size-separated on an ethidium bromide-agarose gel and the region of gel containing cDNA products the predicted size of missing protein-coding DNA is removed. cDNA is purified from the agarose with the Magic PCR Prep kit (Promega), restriction digested with XhoI or SalI, and ligated to a plasmid such as pBluescript SKII (Stratagene) at XhoI and EcoRV sites. This DNA is transformed into bacteria and the plasmid clones sequenced to identify the correct protein-coding inserts. Correct 5′ ends are confirmed by comparing this sequence with the putatively identified homologue and overlap with the partial cDNA clone. Similar methods known in the art and/or commercial kits are used to amplify and recover 3′ ends.

[0081] Several quality-controlled kits are commercially available for purchase. Similar reagents and methods to those above are supplied in kit form from Gibco/BRL for both 5′ and 3′ RACE for recovery of full length genes. A second kit is available from Clontech which is a modification of a related technique, SLIC (single-stranded ligation to single-stranded cDNA), developed by Dumas et al., Nucleic Acids Res., 19:5227-32 (1991). The major differences in procedure are that the RNA is alkaline hydrolyzed after reverse transcription and RNA ligase is used to join a restriction site-containing anchor primer to the first-strand cDNA. This obviates the necessity for the dA-tailing reaction which results in a polyT stretch that is difficult to sequence past.

[0082] An alternative to generating 5′ or 3′ cDNA from RNA is to use cDNA library double-stranded DNA. An asymmetric PCR-amplified antisense cDNA strand is synthesized with an antisense cDNA-specific primer and a plasmid-anchored primer. These primers are removed and a symmetric PCR reaction is performed with a nested cDNA-specific antisense primer and the plasmid-anchored primer.

[0083] RNA Ligase Protocol For Generating The 5′ or 3′ End Sequences To Obtain Full Length Genes

[0084] Once a gene of interest is identified, several methods are available for the identification of the 5′ or 3′ portions of the gene which may not be present in the original cDNA plasmid. These methods include, but are not limited to, filter probing, clone enrichment using specific probes and protocols similar and identical to 5′ and 3′ RACE. While the full length gene may be present in the library and can be identified by probing, a useful method for generating the 5′ or 3′ end is to use the existing sequence information from the original cDNA to generate the missing information. A method similar to 5′ RACE is available for generating the missing 5′ end of a desired full-length gene. (This method was published by Fromont-Racine et al., Nucleic Acids Res., 21(7):1683-1684 (1993)). Briefly, a specific RNA oligonucleotide is ligated to the 5′ ends of a population of RNA presumably containing full-length gene RNA transcript. A primer set containing a primer specific to the ligated RNA oligonucleotide and a primer specific to a known sequence of the gene of interest, is used to PCR amplify the 5′ portion of the desired full length gene which may then be sequenced and used to generate the full length gene. This method starts with total RNA isolated from the desired source, poly A RNA may be used but is not a prerequisite for this procedure. The RNA preparation may then be treated with phosphatase if necessary to eliminate 5′ phosphate groups on degraded or damaged RNA, which may interfere with the later RNA ligase step. The phosphatase, if used, is then inactivated and the RNA is treated with tobacco acid pyrophosphatase in order to remove the cap structure present at the 5′ ends of messenger RNAs. This reaction leaves a 5′ phosphate group at the 5′ end of the cap cleaved RNA which can then be ligated to an RNA oligonucleotide using T4 RNA ligase. This modified RNA preparation can then be used as a template for first strand cDNA synthesis using a gene specific oligonucleotide. The first strand synthesis reaction can then be used as a template for PCR amplification of the desired 5′ end using a primer specific to the ligated RNA oligonucleotide and a primer specific to the known sequence of the cardiovascular system antigen of interest. The resultant product is then sequenced and analyzed to confirm that the 5′ end sequence belongs to the relevant cardiovascular system antigen.

[0085] The present invention also relates to vectors or plasmids, which include such DNA sequences, as well as the use of the DNA sequences. The material deposited with the ATCC (deposited with the ATCC on Oct. 5, 2000, and receiving ATCC designation numbers PTA 2574 and PTA 2575; deposited with the ATCC on Jan. 5, 2001, having the depositor reference numbers TS-1, TS-2, AC-1, and AC-2; and/or as set forth, for example, in Table 1A, 6 and 7) is a mixture of cDNA clones derived from a variety of human tissue and cloned in either a plasmid vector or a phage vector, as shown, for example, in Table 7. These deposits are referred to as “the deposits” herein. The tissues from which some of the clones were derived are listed in Table 7, and the vector in which the corresponding cDNA is contained is also indicated in Table 7. The deposited material includes cDNA clones corresponding to SEQ ID NO:X described, for example, in Table 1A (Clone ID NO:Z). A clone which is isolatable from the ATCC Deposits by use of a sequence listed as SEQ ID NO:X, may include the entire coding region of a human gene or in other cases such clone may include a substantial portion of the coding region of a human gene. Furthermore although the sequence listing may in some instances list only a portion of the DNA sequence in a clone included in the ATCC Deposits, it is well within the ability of one skilled in the art to sequence the DNA included in a clone contained in the ATCC Deposits by use of a sequence (or portion thereof) described in, for example Tables 1A or 2 by procedures hereinafter further described, and others apparent to those skilled in the art.

[0086] Also provided in Table 7 is the name of the vector which contains the cDNA clone. Each vector is routinely used in the art. The following additional information is provided for convenience.

[0087] Vectors Lambda Zap (U.S. Pat. Nos. 5,128,256 and 5,286,636), Uni-Zap XR (U.S. Pat. Nos. 5,128,256 and 5,286,636), Zap Express (U.S. Pat. Nos. 5,128,256 and 5,286,636), pBluescript (pBS) (Short, J. M. et al., Nucleic Acids Res. 16:7583-7600 (1988); Alting-Mees, M. A. and Short, J. M., Nucleic Acids Res. 17:9494 (1989)) and pBK (Alting-Mees, M. A. et al., Strategies 5:58-61 (1992)) are commercially available from Stratagene Cloning Systems, Inc., 11011 N. Torrey Pines Road, La Jolla, Calif., 92037. pBS contains an ampicillin resistance gene and pBK contains a neomycin resistance gene. Phagemid pBS may be excised from the Lambda Zap and Uni-Zap XR vectors, and phagemid pBK may be excised from the Zap Express vector. Both phagemids may be transformed into E. coli strain XL-1 Blue, also available from Stratagene.

[0088] Vectors pSport1, pCMVSport 1.0, pCMVSport 2.0 and pCMVSport 3.0, were obtained from Life Technologies, Inc., P. O. Box 6009, Gaithersburg, Md. 20897. All Sport vectors contain an ampicillin resistance gene and may be transformed into E. coli strain DH10B, also available from Life Technologies. See, for instance, Gruber, C. E., et al., Focus 15:59- (1993). Vector lafmid BA (Bento Soares, Columbia University, New York, N.Y.) contains an ampicillin resistance gene and can be transformed into E. coli strain XL-1 Blue. Vector pCR®2.1, which is available from Invitrogen, 1600 Faraday Avenue, Carlsbad, Calif. 92008, contains an ampicillin resistance gene and may be transformed into E. coli strain DH10B, available from Life Technologies. See, for instance, Clark, J. M., Nuc. Acids Res. 16:9677-9686 (1988) and Mead, D. et al., Bio/Technology 9: (1991).

[0089] The present invention also relates to the genes corresponding to SEQ ID NO:X, SEQ ID NO:Y, and/or the deposited clone (Clone ID NO:Z). The corresponding gene can be isolated in accordance with known methods using the sequence information disclosed herein. Such methods include preparing probes or primers from the disclosed sequence and identifying or amplifying the corresponding gene from appropriate sources of genomic material.

[0090] Also provided in the present invention are allelic variants, orthologs, and/or species homologs. Procedures known in the art can be used to obtain full-length genes, allelic variants, splice variants, full-length coding portions, orthologs, and/or species homologs of cardiovascular system associated genes corresponding to SEQ ID NO:X or the complement thereof, polypeptides encoded by SEQ ID NO:X or the complement thereof, and/or the cDNA contained in Clone ID NO:Z, using information from the sequences disclosed herein or the clones deposited with the ATCC. For example, allelic variants and/or species homologs may be isolated and identified by making suitable probes or primers from the sequences provided herein and screening a suitable nucleic acid source for allelic variants and/or the desired homologue.

[0091] The polypeptides of the invention can be prepared in any suitable manner. Such polypeptides include isolated naturally occurring polypeptides, recombinantly produced polypeptides, synthetically produced polypeptides, or polypeptides produced by a combination of these methods. Means for preparing such polypeptides are well understood in the art.

[0092] The polypeptides may be in the form of the secreted protein, including the mature form, or may be a part of a larger protein, such as a fusion protein (see below). It is often advantageous to include an additional amino acid sequence which contains secretory or leader sequences, pro-sequences, sequences which aid in purification, such as multiple histidine residues, or an additional sequence for stability during recombinant production.

[0093] The polypeptides of the present invention are preferably provided in an isolated form, and preferably are substantially purified. A recombinantly produced version of a polypeptide, including the secreted polypeptide, can be substantially purified using techniques described herein or otherwise known in the art, such as, for example, by the one-step method described in Smith and Johnson, Gene 67:31-40 (1988). Polypeptides of the invention also can be purified from natural, synthetic or recombinant sources using techniques described herein or otherwise known in the art, such as, for example, antibodies of the invention raised against the cardiovascular system polypeptides of the present invention in methods which are well known in the art.

[0094] The present invention provides a polynucleotide comprising, or alternatively consisting of, the nucleic acid sequence of SEQ ID NO:X, and/or the cDNA sequence contained in Clone ID NO:Z. The present invention also provides a polypeptide comprising, or alternatively, consisting of, the polypeptide sequence of SEQ ID NO:Y, a polypeptide encoded by SEQ ID NO:X or a complement thereof, a polypeptide encoded by the cDNA contained in Clone ID NO:Z, and/or the polypeptide sequence encoded by a nucleotide sequence in SEQ ID NO:B as defined in column 6 of Table 1B. Polynucleotides encoding a polypeptide comprising, or alternatively consisting of the polypeptide sequence of SEQ ID NO:Y, a polypeptide encoded by SEQ ID NO:X, a polypeptide encoded by the cDNA contained in Clone ID NO:Z and/or a polypeptide sequence encoded by a nucleotide sequence in SEQ ID NO:B as defined in column 6 of Table 1B are also encompassed by the invention. The present invention further encompasses a polynucleotide comprising, or alternatively consisting of, the complement of the nucleic acid sequence of SEQ ID NO:X, a nucleic acid sequence encoding a polypeptide encoded by the complement of the nucleic acid sequence of SEQ ID NO:X, and/or the cDNA contained in Clone ID NO:Z.

[0095] Moreover, representative examples of polynucleotides of the invention comprise, or alternatively consist of, one, two, three, four, five, six, seven, eight, nine, ten, or more of the sequences delineated in Table 1B column 6, or any combination thereof. Additional, representative examples of polynucleotides of the invention comprise, or alternatively consist of, one, two, three, four, five, six, seven, eight, nine, ten, or more of the complementary strand(s) of the sequences delineated in Table 1B column 6, or any combination thereof. In further embodiments, the above-described polynucleotides of the invention comprise, or alternatively consist of, sequences delineated in Table 1B, column 6, and have a nucleic acid sequence which is different from that of the BAC fragment having the sequence disclosed in SEQ ID NO:B (see Table 1B, column 5). In additional embodiments, the above-described polynucleotides of the invention comprise, or alternatively consist of, sequences delineated in Table 1B, column 6, and have a nucleic acid sequence which is different from that published for the BAC clone identified as BAC ID NO:A (see Table 1B, column 4). In additional embodiments, the above-described polynucleotides of the invention comprise, or alternatively consist of, sequences delineated in Table 1B, column 6, and have a nucleic acid sequence which is different from that contained in the BAC clone identified as BAC ID NO:A (see Table 1B, column 4). Polypeptides encoded by these polynucleotides, other polynucleotides that encode these polypeptides, and antibodies that bind these polypeptides are also encompassed by the invention. Additionally, fragments and variants of the above-described polynucleotides and polypeptides are also encompassed by the invention.

[0096] Further, representative examples of polynucleotides of the invention comprise, or alternatively consist of, one, two, three, four, five, six, seven, eight, nine, ten, or more of the sequences delineated in column 6 of Table 1B which correspond to the same Clone ID NO:Z (see Table 1B, column 1), or any combination thereof. Additional, representative examples of polynucleotides of the invention comprise, or alternatively consist of, one, two, three, four, five, six, seven, eight, nine, ten, or more of the complementary strand(s) of the sequences delineated in column 6 of Table 1B which correspond to the same Clone ID NO:Z (see Table 1B, column 1), or any combination thereof. In further embodiments, the above-described polynucleotides of the invention comprise, or alternatively consist of, sequences delineated in column 6 of Table 1B which correspond to the same Clone ID NO:Z (see Table 1B, column 1) and have a nucleic acid sequence which is different from that of the BAC fragment having the sequence disclosed in SEQ ID NO:B (see Table 1B, column 5). In additional embodiments, the above-described polynucleotides of the invention comprise, or alternatively consist of, sequences delineated in column 6 of Table 1B which correspond to the same Clone ID NO:Z (see Table 1B, column 1) and have a nucleic acid sequence which is different from that published for the BAC clone identified as BAC ID NO:A (see Table 1B, column 4). In additional embodiments, the above-described polynucleotides of the invention comprise, or alternatively consist of, sequences delineated in column 6 of Table 1B which correspond to the same Clone ID NO:Z (see Table 1B, column 1) and have a nucleic acid sequence which is different from that contained in the BAC clone identified as BAC ID NO:A (see Table 1B, column 4). Polypeptides encoded by these polynucleotides, other polynucleotides that encode these polypeptides, and antibodies that bind these polypeptides are also encompassed by the invention. Additionally, fragments and variants of the above-described polynucleotides and polypeptides are also encompassed by the invention.

[0097] Further, representative examples of polynucleotides of the invention comprise, or alternatively consist of, one, two, three, four, five, six, seven, eight, nine, ten, or more of the sequences delineated in column 6 of Table 1B which correspond to the same contig sequence identifer SEQ ID NO:X (see Table 1B, column 2), or any combination thereof. Additional, representative examples of polynucleotides of the invention comprise, or alternatively consist of, one, two, three, four, five, six, seven, eight, nine, ten, or more of the complementary strand(s) of the sequences delineated in column 6 of Table 1B which correspond to the same contig sequence identifer SEQ ID NO:X (see Table 1B, column 2), or any combination thereof. In further embodiments, the above-described polynucleotides of the invention comprise, or alternatively consist of, sequences delineated in column 6 of Table 1B which correspond to the same contig sequence identifer SEQ ID NO:X (see Table 1B, column 2) and have a nucleic acid sequence which is different from that of the BAC fragment having the sequence disclosed in SEQ ID NO:B (see Table 1B, column 5). In additional embodiments, the above-described polynucleotides of the invention comprise, or alternatively consist of, sequences delineated in column 6 of Table 1B which correspond to the same contig sequence identifer SEQ ID NO:X (see Table 1B, column 2) and have a nucleic acid sequence which is different from that published for the BAC clone identified as BAC ID NO:A (see Table 1B, column 4). In additional embodiments, the above-described polynucleotides of the invention comprise, or alternatively consist of, sequences delineated in column 6 of Table 1B which correspond to the same contig sequence identifer SEQ ID NO:X (see Table 1B, column 2) and have a nucleic acid sequence which is different from that contained in the BAC clone identified as BAC ID NO:A (See Table 1B, column 4). Polypeptides encoded by these polynucleotides, other polynucleotides that encode these polypeptides, and antibodies that bind these polypeptides are also encompassed by the invention. Additionally, fragments and variants of the above-described polynucleotides and polypeptides are also encompassed by the invention.

[0098] Moreover, representative examples of polynucleotides of the invention comprise, or alternatively consist of, one, two, three, four, five, six, seven, eight, nine, ten, or more of the sequences delineated in the same row of Table 1B column 6, or any combination thereof. Additional, representative examples of polynucleotides of the invention comprise, or alternatively consist of, one, two, three, four, five, six, seven, eight, nine, ten, or more of the complementary strand(s) of the sequences delineated in the same row of Table 1B column 6, or any combination thereof. In preferred embodiments, the polynucleotides of the invention comprise, or alternatively consist of, one, two, three, four, five, six, seven, eight, nine, ten, or more of the complementary strand(s) of the sequences delineated in the same row of Table 1B column 6, wherein sequentially delineated sequences in the table (i.e. corresponding to those exons located closest to each other) are directly contiguous in a 5′ to 3′ orientation. In further embodiments, above-described polynucleotides of the invention comprise, or alternatively consist of, sequences delineated in the same row of Table 1B, column 6, and have a nucleic acid sequence which is different from that of the BAC fragment having the sequence disclosed in SEQ ID NO:B (see Table 1B, column 5). In additional embodiments, the above-described polynucleotides of the invention comprise, or alternatively consist of, sequences delineated in the same row of Table 1B, column 6, and have a nucleic acid sequence which is different from that published for the BAC clone identified as BAC ID NO:A (see Table 1B, column 4). In additional embodiments, the above-described polynucleotides of the invention comprise, or alternatively consist of, sequences delineated in the same row of Table 1B, column 6, and have a nucleic acid sequence which is different from that contained in the BAC clone identified as BAC ID NO:A (see Table 1B, column 4). Polypeptides encoded by these polynucleotides, other polynucleotides that encode these polypeptides, and antibodies that bind these polypeptides are also encompassed by the invention.

[0099] In additional specific embodiments, polynucleotides of the invention comprise, or alternatively consist of, one, two, three, four, five, six, seven, eight, nine, ten, or more of the sequences delineated in column 6 of Table 1B, and the polynucleotide sequence of SEQ ID NO:X (e.g., as defined in Table 1B, column 2) or fragments or variants thereof. Polypeptides encoded by these polynucleotides, other polynucleotides that encode these polypeptides, and antibodies that bind these polypeptides are also encompassed by the invention.

[0100] In additional specific embodiments, polynucleotides of the invention comprise, or alternatively consist of, one, two, three, four, five, six, seven, eight, nine, ten, or more of the sequences delineated in column 6 of Table 1B which correspond to the same Clone ID NO:Z (see Table 1B, column 1), and the polynucleotide sequence of SEQ ID NO:X (e.g., as defined in Table 1A or 1B) or fragments or variants thereof. In preferred embodiments, the delineated sequence(s) and polynucleotide sequence of SEQ ID NO:X correspond to the same Clone ID NO:Z. Polypeptides encoded by these polynucleotides, other polynucleotides that encode these polypeptides, and antibodies that bind these polypeptides are also encompassed by the invention.

[0101] In further specific embodiments, polynucleotides of the invention comprise, or alternatively consist of, one, two, three, four, five, six, seven, eight, nine, ten, or more of the sequences delineated in the same row of column 6 of Table 1B, and the polynucleotide sequence of SEQ ID NO:X (e.g., as defined in Table 1A or 1B) or fragments or variants thereof. In preferred embodiments, the delineated sequence(s) and polynucleotide sequence of SEQ ID NO:X correspond to the same row of column 6 of Table 1B. Polypeptides encoded by these polynucleotides, other polynucleotides that encode these polypeptides, and antibodies that bind these polypeptides are also encompassed by the invention.

[0102] In additional specific embodiments, polynucleotides of the invention comprise, or alternatively consist of a polynucleotide sequence in which the 3′10 polynucleotides of one of the sequences delineated in column 6 of Table 1B and the 5′10 polynucleotides of the sequence of SEQ ID NO:X are directly contiguous. Nucleic acids which hybridize to the complement of these 20 contiguous polynucleotides under stringent hybridization conditions or alternatively, under lower stringency conditions, are also encompassed by the invention. Polypeptides encoded by these polynucleotides and/or nucleic acids, other polynucleotides and/or nucleic acids that encode these polypeptides, and antibodies that bind these polypeptides are also encompassed by the invention. Additionally, fragments and variants of the above-described polynucleotides, nucleic acids, and polypeptides are also encompassed by the invention.

[0103] In additional specific embodiments, polynucleotides of the invention comprise, or alternatively consist of, a polynucleotide sequence in which the 3′10 polynucleotides of one of the sequences delineated in column 6 of Table 1B and the 5′10 polynucleotides of a fragment or variant of the sequence of SEQ ID NO:X are directly contiguous Nucleic acids which hybridize to the complement of these 20 contiguous polynucleotides under stringent hybridization conditions or alternatively, under lower stringency conditions, are also encompassed by the invention. Polypeptides encoded by these polynucleotides and/or nucleic acids, other polynucleotides and/or nucleic acids encoding these polypeptides, and antibodies that bind these polypeptides are also encompassed by the invention. Additionally, fragments and variants of the above-described polynucleotides, nucleic acids, and polypeptides are also encompassed by the invention.

[0104] In specific embodiments, polynucleotides of the invention comprise, or alternatively consist of, a polynucleotide sequence in which the 3′10 polynucleotides of the sequence of SEQ ID NO:X and the 5′10 polynucleotides of the sequence of one of the sequences delineated in column 6 of Table 1B are directly contiguous. Nucleic acids which hybridize to the complement of these 20 contiguous polynucleotides under stringent hybridization conditions or alternatively, under lower stringency conditions, are also encompassed by the invention. Polypeptides encoded by these polynucleotides and/or nucleic acids, other polynucleotides and/or nucleic acids encoding these polypeptides, and antibodies that bind these polypeptides are also encompassed by the invention. Additionally, fragments and variants of the above-described polynucleotides, nucleic acids, and polypeptides are also encompassed by the invention.

[0105] In specific embodiments, polynucleotides of the invention comprise, or alternatively consist of, a polynucleotide sequence in which the 3′10 polynucleotides of a fragment or variant of the sequence of SEQ ID NO:X and the 5′10 polynucleotides of the sequence of one of the sequences delineated in column 6 of Table 1B are directly contiguous. Nucleic acids which hybridize to the complement of these 20 contiguous polynucleotides under stringent hybridization conditions or alternatively, under lower stringency conditions, are also encompassed by the invention. Polypeptides encoded by these polynucleotides and/or nucleic acids, other polynucleotides and/or nucleic acids encoding these polypeptides, and antibodies that bind these polypeptides are also encompassed by the invention. Additionally, fragments and variants of the above-described polynucleotides, nucleic acids, and polypeptides, are also encompassed by the invention.

[0106] In further specific embodiments, polynucleotides of the invention comprise, or alternatively consist of, a polynucleotide sequence in which the 3′10 polynucleotides of one of the sequences delineated in column 6 of Table 1B and the 5′10 polynucleotides of another sequence in column 6 are directly contiguous. Nucleic acids which hybridize to the complement of these 20 contiguous polynucleotides under stringent hybridization conditions or alternatively, under lower stringency conditions, are also encompassed by the invention. Polypeptides encoded by these polynucleotides and/or nucleic acids, other polynucleotides and/or nucleic acids encoding these polypeptides, and antibodies that bind these polypeptides are also encompassed by the invention. Additionally, fragments and variants of the above-described polynucleotides, nucleic acids, and polypeptides are also encompassed by the invention.

[0107] In specific embodiments, polynucleotides of the invention comprise, or alternatively consist of, a polynucleotide sequence in which the 3′10 polynucleotides of one of the sequences delineated in column 6 of Table 1B and the 5′10 polynucleotides of another sequence in column 6 corresponding to the same Clone ID NO:Z (see Table 1B, column 1) are directly contiguous. Nucleic acids which hybridize to the complement of these 20 lower stringency conditions, are also encompassed by the invention. Polypeptides encoded by these polynucleotides and/or nucleic acids, other polynucleotides and/or nucleic acids encoding these polypeptides, and antibodies that bind these polypeptides are also encompassed by the invention. Additionally, fragments and variants of the above-described polynucleotides, nucleic acids, and polypeptides are also encompassed by the invention.

[0108] In specific embodiments, polynucleotides of the invention comprise, or alternatively consist of, a polynucleotide sequence in which the 3′10 polynucleotides of one sequence in column 6 corresponding to the same contig sequence identifer SEQ ID NO:X (see Table 1B, column 2) are directly contiguous. Nucleic acids which hybridize to the complement of these 20 contiguous polynucleotides under stringent hybridization conditions or alternatively, under lower stringency conditions, are also encompassed by the invention. Polypeptides encoded by these polynucleotides and/or nucleic acids, other polynucleotides and/or nucleic acids encoding these polypeptides, and antibodies that bind these polypeptides are also encompassed by the invention. Additionally, fragments and variants of the above-described polynucleotides, nucleic acids, and polypeptides are also encompassed by the invention.

[0109] In specific embodiments, polynucleotides of the invention comprise, or alternatively consist of a polynucleotide sequence in which the 3′10 polynucleotides of one of the sequences delineated in column 6 of Table 1B and the 5′10 polynucleotides of another sequence in column 6 corresponding to the same row are directly contiguous. In preferred embodiments, the 3′10 polynucleotides of one of the sequences delineated in column 6 of Table 1B is directly contiguous with the 5′10 polynucleotides of the next sequential exon delineated in Table 1B, column 6. Nucleic acids which hybridize to the complement of these 20 contiguous polynucleotides under stringent hybridization conditions or alternatively, under lower stringency conditions, are also encompassed by the invention. Polypeptides encoded by these polynucleotides and/or nucleic acids, other polynucleotides and/or nucleic acids encoding these polypeptides, and antibodies that bind these polypeptides are also encompassed by the invention. Additionally, fragments and variants of the above-described polynucleotides, nucleic acids, and polypeptides are also encompassed by the invention.

[0110] Many polynucleotide sequences, such as EST sequences, are publicly available and accessible through sequence databases and may have been publicly available prior to conception of the present invention. Preferably, such related polynucleotides are specifically excluded from the scope of the present invention. Accordingly, for each contig sequence (SEQ ID NO:X) listed in the third column of Table 1A, preferably excluded are one or more polynucleotides comprising a nucleotide sequence described by the general formula of a-b, where a is any integer between 1 and the final nucleotide minus 15 of SEQ ID NO:X, b is an integer of 15 to the final nucleotide of SEQ ID NO:X, where both a and b correspond to the positions of nucleotide residues shown in SEQ ID NO:X, and where b is greater than or equal to a +14. More specifically, preferably excluded are one or more polynucleotides comprising a nucleotide sequence described by the general formula of a-b, where a and b are integers as defined in columns 4 and 5, respectively, of Table 3. In specific embodiments, the polynucleotides of the invention do not consist of at least one, two, three, four, five, ten, or more of the specific polynucleotide sequences referenced by the Genbank Accession No. as disclosed in column 6 of Table 3 (including for example, published sequence in connection with a particular BAC clone). In further embodiments, preferably excluded from the invention are the specific polynucleotide sequence(s) contained in the clones corresponding to at least one, two, three, four, five, ten, or more of the available material having the accession numbers identified in the sixth column of this Table (including for example, the actual sequence contained in an identified BAC clone). In no way is this listing meant to encompass all of the sequences which may be excluded by the general formula, it is just a representative example. All references available through these accessions are hereby incorporated by reference in their entirety.

TABLE 3

| | SEQ | | | | |
|---|---|---|---|---|---|
| | ID | | EST Disclaimer | | |
| Clone ID | NO: | Contig | Range | Range | |
| NO:Z | X | ID: | of a | of b | Accession #'s |

| | | | | | | |
|---|---|---|---|---|---|---|
| HAHCL07 | 11 | 952661 | 1-1252 | 15-1266 | AI472849, AA452197, AA216015, F16124, AA249665, AA211338, R15601, | |
| | | | | | AA249623, AA404417, T82709, AA039429, AI800785, AI572463, and | |
| | | | | | AA780204. | |
| HAHCP26 | 12 | 681258 | 1-389 | 15-403 | | |
| HAHCP41 | 13 | 712086 | 1-226 | 15-240 | AC001234, and AF060568. | |
| HAHCP49 | 14 | 722659 | 1-242 | 15-256 | | |
| HAHCP55 | 15 | 865095 | 1-290 | 15-304 | AF176915. | |
| HAHCP67 | 16 | 756916 | 1-250 | 15-264 | AW246326, T66078, T08451, AW068827, T35903, T66082, F12335, AAI00537, | |
| | | | | | W76237, R19223, F08087, Z43540, AA298126, F12331, W06986, AA298141, | |
| | | | | | W07263, R47805, AC006252, Y17169, and AL136773. | |
| HAHCP91 | 17 | 789998 | 1-274 | 15-288 | AC005833. | |
| HAHCR57 | 18 | 865096 | 1-474 | 15-488 | T60981. | |
| HAHEE04 | 19 | 922257 | 1-332 | 15-346 | | |
| HAHEE05 | 20 | 928673 | 1-408 | 15-422 | AA453887, AI939557, T95411, AI369869, AW295606, AC005531, AF170301, | |
| | | | | | AF170302, AF077659, and AF144573. | |
| HAHE046 | 21 | 718772 | 1-212 | 15-226 | | |
| HAHES10 | 22 | 961594 | 1-317 | 15-331 | | |
| HAHFX20 | 23 | 925753 | 1-125 | 15-139 | | |
| HAHHE12 | 24 | 969107 | 1-792 | 15-806 | AA193162, Z24810, AAI96396, AAI94446, D58283, D80043, D80022, D80195, | |
| | | | | | D59859, C14331, D80166, D80212, D80193, D59927, D51423, D59619, D80210, | |
| | | | | | D51799, D80391, D80164, D59275, D80240, D80253, D59787, D80227, D81030, | |
| | | | | | D59502, D80188, D80196, D80219, D57483, D80269, | |
| | | | | | D80038, D80366, D50979, D59889, C14429, D50995, D59467, D59610, AW178893, | |
| | | | | | D80378, D80024, C15076, D80045, AA305409, T03269, D80241, C14389, C75259, | |
| | | | | | D51060, C14014, AA305578, AW352158, AW177440, D51022, AW179328, D80522, | |
| | | | | | D80248, AW178775, D81026, AW378532, D51250, D80134, AA514188, AW360811, | |
| | | | | | D80251, F13647, AW360834, AA514186, D80133, | |
| | | | | | AW177501, AW177511, AW375405, D80168, C05695, AW178762, AW377671, | |
| | | | | | Z19200, D58253, AI910186, D80268, AW176467, AW360817, AW366296, D80247, | |
| | | | | | C14227, AW360844, D80132, AW375406, AW378534, D52291, AW179332, AW377672, | |
| | | | | | AW179023, AW178905, D80439, D81111, AI905856, AW352170, AW352117, | |
| | | | | | AW378540, D80302, C14407, AW352171, AW177505 | |
| | | | | | AW377676, AW178906, AW177731, AW178907, AW378528, AW179019, AWI79024, | |
| | | | | | C14298, D80064, AW360841, AW179020, D51759, AW178909, AW177456, D59373, | |
| | | | | | AW179329, Z21582, AW178980, AW178914, D80157, AW178774, AW177733, | |
| | | | | | AW178908, AW178754, AW179018, D51103, T11417, AW179220, AA285331, D51097, | |
| | | | | | AW179004, AW179012, AW177728, AW378543, | |
| | | | | | AW378525, AW352120, AW178983, AI557751, T48593, AW367967, AW177722, | |
| | | | | | AW352174, AW179009, AW178781, AW178911, AW352163, C06015, D45260, D59627, | |
| | | | | | C14077, D59653, AI535850, D58246, AW367950, D80258, D80014, H67866, | |
| | | | | | AW177723, D59503, C03092. D58101, H67854, AW178986, AA809122, AI557774, | |
| | | | | | AI525923, AW378533, D60010, C14344, AW177508, C14046, T03116, AI525917, | |
| | | | | | D59317, AW177497, C14973, D51213, D59474, D45273, AW177734, D51221, | |
| | | | | | AA514184, AI525920, T02974, AI535686, D60214, C14957, D59551, AI525227, | |
| | | | | | D51231, C16955, AW378542, AI525235, AW378539, AI525912, T03048, | |
| | | | | | AI525242, Z33452, AI525925, AW360855, AI525215, H67858, C05763, | |
| | | | | | AI525222, T02868, U76618, A62300, AJ132110, A84916, A62298, AR018138, | |
| | | | | | Y17188, D26022, A25909, D34614, AF058696, X67155, A67220, D89785, | |
| | | | | | A78862, AR008278, D88547, AB028859, X82626, Y12724, AR025207, I82448, | |
| | | | | | A82595, AR060385, AB002449, A94995, AR008443, AR060138, I50126, | |
| | | | | | I50132, I50128, I50133, AB012117, AR066488, AR016514, X68127, | |
| | | | | | AR016808, A45456, A26615, AR052274, A85396, AR066482, A44171, X93549, | |
| | | | | | Y09669, A43192, A43190, AR038669, A85477, I19525, A86792, AR066487, | |
| | | | | | A30438, AR054175, D50010, Y17187, I14842, A70867, AR066490, A63261, | |
| | | | | | I18367, AR008408, AR062872, D88507, AR008277, AR008281, AR016691, | |
| | | | | | AR016690, U46128, D13509, A64136, A68321, AR060133, | |
| | | | | | AF135125, I79511, U79457, AF123263, AR032065, AR008382, and A47134. | |
| HAHHO04 | 25 | 925814 | 1-299 | 15-313 | AL133572. | |
| HAHHS01 | 26 | 913863 | 1-167 | 15-181 | | |
| HAHIK10 | 27 | 961425 | 1-158 | 15-172 | | |
| HAHIW08 | 28 | 955803 | 1-364 | 15-378 | AW291127. | |
| HAHSC42 | 29 | 695111 | 1-449 | 15-463 | Z18875, and AA311441. | |
| HCMBA95 | 30 | 508774 | 1-332 | 15-346 | | |
| HCMSC52 | 31 | 522615 | 1-110 | 15-124 | | |
| HCMSE09 | 32 | 530511 | 1-356 | 15-370 | AC006368. | |
| HCMSQ77 | 33 | 862373 | 1-297 | 15-311 | AC006463. | |
| HCMSS72 | 34 | 526183 | 1-161 | 15-175 | | |
| HCMSU37 | 35 | 706337 | 1-482 | 15-496 | AI808918, AW339979, F29562, Z24811, F24581, and AC006333. | |
| HCMSX59 | 36 | 522598 | 1-362 | 15-376 | | |
| HELAF85 | 37 | 507230 | 1-309 | 15-323 | | |
| HELAI26 | 38 | 920922 | 1-203 | 15-217 | | |
| HELAL34 | 39 | 527994 | 1-196 | 15-210 | | |
| HELAV61 | 40 | 507205 | 1-327 | 15-341 | | |
| HELBD08 | 41 | 960106 | 1-221 | 15-235 | | |
| HELBD70 | 42 | 527677 | 1-223 | 15-237 | | |
| HELBK27 | 43 | 527669 | 1-280 | 15-294 | | |
| HELBN45 | 44 | 527666 | 1-244 | 15-258 | AL031295. | |
| HELBP62 | 45 | 527533 | 1-321 | 15-335 | Z64392, and Z64391. | |
| HELDG77 | 46 | 750478 | 1-209 | 15-223 | | |
| HELDK12 | 47 | 766209 | 1-219 | 15-233 | | |
| HELDO56 | 48 | 531576 | 1-250 | 15-264 | | |
| HELEA45 | 49 | 954371 | 1-157 | 15-171 | | |
| HELEE09 | 50 | 531415 | 1-298 | 15-312 | | |
| HELEF52 | 51 | 506677 | 1-300 | 15-314 | | |
| HELEQ47 | 52 | 577187 | 1-402 | 15-416 | | |
| HELER30 | 53 | 574038 | 1-277 | 15-291 | ACQ06057. | |
| HELEU12 | 54 | 574023 | 1-703 | 15-717 | AA004637, T79961, AC005324, and AL080124. | |
| HELEU37 | 55 | 522407 | 1-182 | 15-196 | AA368196, AC005247, and AC007971. | |
| HELEU73 | 56 | 574016 | 1-391 | 15-405 | | |
| HELEU91 | 57 | 851160 | 1-323 | 15-337 | | |
| HELEW62 | 58 | 574025 | 1-292 | 15-306 | | |
| HELFF40 | 59 | 574058 | 1-188 | 15-202 | AC000119. | |
| HELFH33 | 60 | 576530 | 1-240 | 15-254 | E02347. | |
| HELFJ03 | 61 | 921943 | 1-419 | 15-433 | | |
| HELFQ54 | 62 | 728888 | 1-489 | 15-503 | AF179680, and AL022162. | |
| HELFQ79 | 63 | 577248 | 1-359 | 15-373 | | |
| HELGA54 | 64 | 576374 | 1-426 | 15-440 | | |
| HELGC24 | 65 | 576377 | 1-369 | 15-383 | | |
| HELGC32 | 66 | 699375 | 1-317 | 15-331 | W26021, and W27138. | |
| HELGC77 | 67 | 577317 | 1-230 | 15-244 | | |
| HELGG77 | 68 | 825795 | 1-917 | 15-931 | AI865213, AA857296, AI433247, AA501614, AI859834, AL037910, AW337454, AL045077, | |
| | | | | | AI049996, AI471815, AA577748, AI769271, AI445815, AL047858, AI623899, AI215778, AI890348, | |
| | | | | | R92640, F17700, H29951, F32171, H23467, AI343143, N39097, AA342681, R83097, AI246080, | |
| | | | | | AI151261, AA663966, AI053786, AI754013, AA557486, AA484143, AA297968, AI569982, AL046782, | |
| | | | | | AA652813, AW103415, AI755236, AI754923, AA219098, AA457685, AI287964, AI753951, AI282661, | |
| | | | | | H05073, AI538540, AW079809, AI431240, AI469796, AA491955, AI979005, AW407578, AI222678, | |
| | | | | | AI687750, H57826, AI216054, AI270476, AI696901, AW088049, AW192330, AI382614, AW152303, | |
| | | | | | AI733856, AI754291, AA021552, AI865988, AI609972, AI623563, AA716755, AL110405, AW272758, | |
| | | | | | U85195, AE000658, AC004067, AC006241, AL121657, AC005832, AC007845, AC006318, AC004590, | |
| | | | | | AC007298, AL049759, AC004253, AC002347, AC004019, AC012599, AC002544, AL049766, | |
| | | | | | AL049694, AC005532, AC003661, AC005046, AC016025, AC005488, AC016026, AC005859, | |
| | | | | | AL008721, AC000052, Z85986, AL 121653, AC003664, AL049845, AL031296, AL034549, AC006539, | |
| | | | | | Z93017, AC007191, AL050338, AC005839, AC003695, AC012330, AC007934, AC002454, AF053356, | |
| | | | | | AC009510, AC002394, AL008635, AF196969, AC004477, AL109963, Z82194, AC004921, U63834, | |
| | | | | | AC003029, AC004099, AL031577, AC008012, AC002316, AL022165, AC007325, AL022313, | |
| | | | | | AC005694, AJ003147, AP000509, AC004047, AC005740, AC004791, AC002039, AC002996, | |
| | | | | | AC004659, AC008132, AL034421, AC006048, AB007955, AC006160, AC006064, AC006372, | |
| | | | | | AC004448, AF001549, AC005498, AL008582, AL133163, AL034423, AL109758, AC006204, | |
| | | | | | AL133445, AC005914, D84394, AL035400, AC005722, AC007227, AC005745, AC002306, AC002301, | |
| | | | | | AC005632, AC004024, AC002980, Z97055, AC002350, AC006552, AF121781, Z98949, AC007738, | |
| | | | | | AC002470, AC005755, AL008715, Z82172, AC005887, AC005881, AL022323, AC006312, AC007637, | |
| | | | | | AC004068, AC005529, AC006130, AC006285, AC004990, AL049829, AC004386, AP000553, Z83846, | |
| | | | | | AL049776, AC001228, AF088219, AL022238, AC004682, Z84484, AC007486, AC004996, AL049869, | |
| | | | | | AL031120, U51281, AG005911, AC005922, AC002468, U95740, AL109802, AC004797, AC005837, | |
| | | | | | AL031289, AC008119, AC005531, AL031767, AP000066, Z93020, AL023803, Y18000, AL109627, | |
| | | | | | AL033518, AC005288, AC009516, AC007221, AL049758, AC004531, AC005829, AC006390, | |
| | | | | | AC002418, AC004472, AC005399, AC007055, AL096701, AC003013, AL078477, AC004963, | |
| | | | | | AP000216, AL109865, AC004675, AL035427, AC002365, AL020993, AC007750, AL035089, | |
| | | | | | AL033504, AC011718, AC006924, AC004830, AC004801, AC006449, AL049795, AB023049, | |
| | | | | | AB023052, Z84469, AC004813, AF095901, AP000356, AL121694, AC004955, AC003982, AL021877, | |
| | | | | | AC005221, AC005971, AL133448, AL050308, AC005065, Z95703, AP000339, AB023051, AC003051, | |
| | | | | | AC005682, AL133246, AC002465, AC003101, AC009498, AL021937, AL021368, AL135960, | |
| | | | | | AJ131016, AL009181, AG005412, AC007388, AL020997, AL031276, AL035045, AF001550, | |
| | | | | | AC005697, AP000513, AC008498, AP000512, AL109654, AC005017, AC007347, AL021579, | |
| | | | | | AL136295, AC005520, AC006468, Z98752, AC010197, AC008929, AC004140, AL035415, AL021997, | |
| | | | | | AC005484, AC006153, Z97054, AC006316, AL096776, Z99716, AC004910, AC005004, AC007676, | |
| | | | | | AL033527, AC011331, AF134726, AC009784, AC002558, AC006530, and AC006453. | |
| HELGH89 | 69 | 545009 | 1-635 | 15-649 | | |
| HELGN53 | 70 | 963160 | 1-356 | 15-370 | | |
| HELGP50 | 71 | 576339 | 1-351 | 15-365 | | |
| HELGQ48 | 72 | 851178 | 1-332 | 15-346 | Z86061. | |
| HELGT48 | 73 | 879483 | 1-635 | 15-649 | | |
| HELGZ48 | 74 | 721742 | 1-394 | 15-408 | | |
| HELHB12 | 75 | 970863 | 1-392 | 15-406 | AI307709, and AL020997. | |
| HELHC49 | 76 | 576292 | 1-368 | 15-382 | | |
| HELHD46 | 77 | 719129 | 1-266 | 15-280 | AB020722. | |
| HELHF07 | 78 | 949067 | 1-327 | 15-341 | | |
| HELHM29 | 79 | 883505 | 1-299 | 15-313 | | |
| HEMBC56 | 80 | 577797 | 1-404 | 15-418 | | |
| HEMB116 | 81 | 507220 | 1-207 | 15-221 | | |
| HEMBZ84 | 82 | 527989 | 1-216 | 15-230 | | |
| HEMCA89 | 83 | 527985 | 1-243 | 15-257 | | |
| HEMCM25 | 84 | 948738 | 1-483 | 15-497 | | |
| HEMDG56 | 85 | 715834 | 1-211 | 15-225 | AL022311. | |
| HEMDG83 | 86 | 576508 | 1-598 | 15-612 | AI971563, AW236461, R66941, and AI867853. | |
| HEMDK92 | 87 | 574278 | 1-291 | 15-305 | H62575, and N31620. | |
| HEMDM56 | 88 | 577251 | 1-280 | 15-294 | | |
| HEMDO24 | 89 | 577297 | 1-378 | 15-392 | | |
| HEMEA72 | 90 | 527804 | 1-297 | 15-311 | | |
| HEMEH76 | 91 | 74345 | 1-404 | 15-418 | AA329192, AW074398, AI830390, AA319218, AI061334, R91994, N71557, H16048, AA659083, | |
| | | | | | N71724, AA558697, AA457639, AI216799, AA405288, H13868, AI679379, AI679888, AI867386, | |
| | | | | | AA523490, AW008062, AI537185, AA378580, AI887768, AW271917, AF150222, AA291631, | |
| | | | | | W38648, AI246409, AA399172, AA366035, AA394147, AL037554, F31204, AA515128, AA077935, | |
| | | | | | AA584749, AA557879, AL046409, AI350211, AI581068, AA077952, AW261871, AA077817, | |
| | | | | | AI688846, AI613280, AW405016, AI474085, AA385100, AI963720, AA776236, AA332991, AI879000, | |
| | | | | | AW089789, AI608674, AI301218, AI205181, AA378886, AA310158, AA661573, AA569187, H54443, | |
| | | | | | AA079421, AA532877, AA580662, AA503258, AW303876, H55779, F37286, AW419262, AA743956, | |
| | | | | | AW193432, AI431303, AI286264, AI653886, AW029574, AI284640, AI471481, AI872216, AA516207, | |
| | | | | | AL119259, AAI00884, AW274349, AI244758, AW193265, AW303196, AW301350, AA569202, | |
| | | | | | AA225155, AI282907, F36273, AA984191, AA745410, AA494087, AI806850, AW276827, AAI79136, | |
| | | | | | AI341664, AA362440, AW273469, AI678392, AW407007, AA353408, AI287528, AI820539, R63003, | |
| | | | | | AI305766, AA112864, AW157173, AW162314, AL040913, AI110770, AW162332, AI284467, | |
| | | | | | AI890348, AA508882, AI015912, AI821387, AA508103, AI721122, AW338869, AW402864, | |
| | | | | | AA713815, AW419118, AI669443, W04195, AW264973, AA377767, AL041412, AI610159, | |
| | | | | | AA347040, AA501617, AA344959, AA327323, AI914706, AA297776, AI624024, AC008064, Z83849, | |
| | | | | | Z77894, AL049766, AF196971, AC007750, AC005815, AC000134, AC00S200, Z82205, Z69666, | |
| | | | | | X52851, AC007065, AC006511, AC003037, AL008629, AC006042, AC002564, AL031588, AC007773, | |
| | | | | | L13713, L13714, AC007206, AL031965, AL035587, AL022316, AC005040, AC007458, AF015152, | |
| | | | | | AC000100, AL023807, Z82244, AG005414, Z93241, Z93020, AL008723, AC002451, AC006213, | |
| | | | | | AC002094, AC006031, AC008372, AL022397, AC002347, AC003080, AC006043, AC000048, | |
| | | | | | AC005600, AL021579, Z82210, AC006057, AC005399, AC005102, AF001298, AC004643, Z98051, | |
| | | | | | AC004771, AC003982, AL132712, U80017, I51997, AC004193, AC005002, Z99289, AF002223, | |
| | | | | | AL080239, AF055066, U67211, AC007238, AL035668, AP000328, Z83001, AC006128, AC004088, | |
| | | | | | AP000055, AP000170, AP000123, AL080276, AL023803, AC010202, AC005215, AL033521, Z98257, | |
| | | | | | AL033403, AC002542, AF111168, Z49816, X55925, X60653, AC002559, AL023799, AL031729. | |
| | | | | | AC018769, AC002352, AL031584, AL080248, AL121658, AL121748, AL135744, AC005257, L13709, | |
| | | | | | AL117256, AC004501, AL033392, AL031777, AC005161, AC004055, AC008071. AC004552, | |
| | | | | | AC004695, AC004057, AC006989, AC006479, AC006050, AP000961, AC007656, AC004664, | |
| | | | | | AC006196, AL022476, X69951, AC000355, U69730, AL049761, AC010175, U95742, AL031904, | |
| | | | | | AC007106, AC007216, AC005084, AC005495, Z99716, AL022164, U57009, AP000294, U63630, | |
| | | | | | AC005303, AC000118, AP000111, AP000043, AF200465, AC004167, AC002073, AC004816, | |
| | | | | | AC005245, AG016027, AG005297, AG016830, AC008045, X88791, AC006044, AF078925, AF165147, | |
| | | | | | AF067122, Z73965, AF041427, Z83819, AP000252, AC005250, AP000212, AC005216, AC005660, | |
| | | | | | AL031281,AL031289, Z83846, AL009181, AP000031, AC007676, AL023280, AC007281, AC005939, | |
| | | | | | AC006040, AC006430, AC002365, AL020995, AF161351, AF131217, AF010238, Z68869, AC005253, | |
| | | | | | AL008719, Z84485, Z98752, AB020859, AL034451, AL109807, AL049643, Z99943, AC004675, | |
| | | | | | AC004520, AC006571, AL096829, AL121653, AP000432, AP000556, AL008627, AL024507, | |
| | | | | | AL021407, AC006442, AP000552, AC005345, AL009029, AG007050, AC007151, AP000459, | |
| | | | | | AC005324, AL021395, AG007437, AF088219, AC007738, and AL121823. | |
| HEMEK19 | 92 | 574209 | 1-297 | 15-311 | | |
| HEMEN63 | 93 | 578717 | 1-307 | 15-321 | | |
| HEMEU54 | 94 | 947801 | 1-438 | 15-452 | X97818. | |
| HEMFL58 | 95 | 576505 | 1-338 | 15-352 | | |
| HEMFN33 | 96 | 702564 | 1-322 | 15-336 | | |
| HEMFX20 | 97 | 840164 | 1-186 | 15-200 | | |
| HEMGL57 | 98 | 971118 | 1-302 | 15-316 | AL049569. | |
| HEMGL58 | 99 | 578091 | 1-440 | 15-454 | R73040, AA005251, AA005165, and AF176815. | |
| HHBBA47 | 100 | 720472 | 1-400 | 15-414 | AW392670, U46347, AW384394, AW363220, AL043003, AL119484, AL119497, AL119439, | |
| | | | | | AL119443, AW372827, AL119457, AL119319, AL119396, Z99396, AL119324, U46341, AL134528, | |
| | | | | | AL119363, AL119341, AL119391, AL119355, U46350, U46351, U46349, AL119444, AL119483, | |
| | | | | | U46346, AL119335, AL134533, AL119399, AL119522, AL119496, U46345, AL134531, AL042614, | |
| | | | | | AL134132, AL134527, AL134538, AL119418, AL043147, AL042450, AL042965, AL042975, | |
| | | | | | AL042542, AL042544, AL042970, AL043019, AL042984, AL043029, AI142134, AL119511, | |
| | | | | | AL042551, AL119488, ALT19464, AB026436, AR054110, A81671, AR060234, AR066494, and | |
| | | | | | AR069079. | |
| HHBB111 | 101 | 959756 | 1-401 | 15-415 | AI920923, AW016123, AI694192, AW085200, AA789137, AA563721, AI079897, R51594, AA831766, | |
| | | | | | AA782525, AW169957, AW339110, AI190317, AI910943, AA917419, AA512984, AA775828, | |
| | | | | | AI393486, AA913674, AI374931, AA716669, AI813594, N93954, AI272716, AI189330, AI827728, | |
| | | | | | AA481275, AI568483, AI340006, AA857984, AI241121, AAI29733, AI969188, AI862837, AI803017, | |
| | | | | | AA284394, AW068473, AA701544, AI096997, AW103900, AA570016, AA028141, AI249182, | |
| | | | | | AA991848, AI470495, AI354796, AI743676, T40513, AL041504, N78775, AA865611, AAI01174, | |
| | | | | | AI419551, AAI33347, AA766811, AA806671, H52242, AL044039, R41974, AA027302, AI696783, | |
| | | | | | AA058759, AA688050, AL041503, Z40289, AI915796, AA747265, D20480, AA937783, AA089759, | |
| | | | | | AW237240, AA287007, and AB007930. | |
| HHBBK65 | 102 | 588062 | 1-411 | 15-425 | | |
| HHBBL40 | 103 | 588066 | 1-541 | 15-555 | R36520. | |
| HHBBL53 | 104 | 588067 | 1-406 | 15-420 | AA526287, AI417476, AI473759, and AA604308. | |
| HHBEA32 | 105 | 927399 | 1-286 | 15-300 | | |
| HHBEE70 | 106 | 697541 | 1-492 | 15-506 | | |
| HHBEM70 | 107 | 756949 | 1-229 | 15-243 | AL119457, AL042544, AL119399, AL042382, AL079794, AL042440, AL119511, AL037081, | |
| | | | | | AL119324, AL043152, AI110828, AW235489, AW082113, AI280670, AI064830, AI610362, AI352497, | |
| | | | | | AW149925, AA809129, AL079741, AI886753, AI269862, AI364788, AL134999, AW151136, | |
| | | | | | AL121270, AL047187, AI500061, AL043168, AI345111, AI491897, AW170674, AI624543, AL119863, | |
| | | | | | AW117746, AI349598, AL041150, AW269097, AI933589, AI445992, AI922365, AL045500, AI824576, | |
| | | | | | AI309443, AW087445, AI345416, AI345612, AW163834, AI345415, AL046931, AL121328, | |
| | | | | | AW268302, AW026882, AI610307, AI567935, AW163464, AI620284, AI281772, AI445990, | |
| | | | | | AA715307, AW051258, AI921248, AI611738, AI571909, AI619502, AI680162, AI632408, AI306613, | |
| | | | | | AI677796, AI802542, AI433976, AI620089, AA449768, AI288305, AW118518, AI570807, AI635067, | |
| | | | | | AI923370, AI627988, AL110402, AL047387, AI679174, AW168650, AI537677, AI670009, AI866770, | |
| | | | | | AL047675, AI433157, AI702073, AI909696, AI554821, AW117882, AI284131, AI927755, AI174394, | |
| | | | | | AW172745, N33175, AI539771, AL079960, AI582932, AI500659, AI633125, AI805769, AI698391, | |
| | | | | | AI815232, AI801325, AI500523, AI915291, AL042628, AW071177, AI284517, AI923989, AI500706, | |
| | | | | | AI491776, AI445237, AW151138, AA580663, AI521560, AI889189, AI500662, AI284509, N80094, | |
| | | | | | AI889168, AI866573, AI633493, AL048323, AI434256, AW302973, AI289937, AI537244, AW268060, | |
| | | | | | AW072719, AI888661, AI284513, AI888118, AI344785, AI889147, AL037454, AI440252, AW302965, | |
| | | | | | AW072484, AI702019, AI634251, AI569309, AI433037, AI280732, AW071362, AW301300, AI348917, | |
| | | | | | AI343037, AI499285, AW088134, AL120300, AL048340, F27788, AI446373, AI864836, AL043981, | |
| | | | | | AI569328, AI307543, AI874166, AI307210, AI669526, AI340659, AI288285, AI801460, AI345005, | |
| | | | | | AI311892, AI307736, AI783504, AL039276, AI349266, AI273048, AL119791, AL040241, AL045163, | |
| | | | | | AI281762, AI494201, AI686554, AL042745, AI949960, AL079977, AI886123, AI524671, AL040243, | |
| | | | | | AW050522, AI917252, AW083804, AI345471, AW149221, AL041862, AI673297, AI274508, | |
| | | | | | AL039783, AL046926, AL045266, W74529, AI439745, AI922901, AI963846, AL042627, AL049085, | |
| | | | | | AW198075, AL048334, AI872711, AI587606, AI468872, AI932794, AW081255, AI886181, AI690426, | |
| | | | | | AI862142, AI873644, AI802826, AI445432, AL037582, AL037602, AL041772, AL036214, AL079963, | |
| | | | | | AI345608, AW169658, AI559737, AW410972, AL037030, AI310575, AL039132, AI889376, | |
| | | | | | AL047763, AI335363, AI538716, AW074993, AI591420, AI362580, AI499986, AI560023, R32821, | |
| | | | | | AI432218, AW051088, AL038504, AI308032, AI537515, AI934011, AL045620, AI308035, AI349276, | |
| | | | | | AI281782, AI564719, AI866510, AI909642, Y11587, U77594, AC004987, I89947, AL122049, I48978, | |
| | | | | | AL133640, AC004686, AL080159, A08913, AL133072, AF090934, Y14314, AL133077, A08916. | |
| | | | | | A08910, A08909, S68736, AL050138, AL137271, Z82022, AL050277, I48979, X82434, I89931, | |
| | | | | | AL110280, I49625, A77033, A77035, AF087943, AF183393, AL122110, AL133080, AF091084, | |
| | | | | | I09360, AL080060, U35846, AF026816, I33392, AL050149, AL133016, U80742, AL122121, E07361, | |
| | | | | | AL117460, ALT10221, AF090903, AL117435, AJ012755, AL049283, AFT18070, AL137550, | |
| | | | | | AF017152, AF146568, AL137463, AFT13019, X84990, AF090900, AL133560, AF111112, E03348, | |
| | | | | | AFT13689, AR059958, AL133075, ALT33565, AL049466, A65341, AJ000937, AR000496, U39656, | |
| | | | | | AL117583, A08912, AL117585, AL133113, X93495, AL122123, X72889, AC004594, AL049300, | |
| | | | | | AL049452, AL110197, A93350, ALT17457, AR038854, AL096744, U91329, AF003737, AL049938. | |
| | | | | | AL137557, AF106862, AP113677, U67958, E02349, AF079763, AL137538, E07108, AF113676, | |
| | | | | | AF158248, AF185576, A03736, I26207, AP118094, AF067728, AL050024, AL049430, AF113699, | |
| | | | | | ALT33557, AF125948, A45787, AF177401, S78214, AF090901, AL050393, AR011880, AL080124, | |
| | | | | | AF113690, AF118064, AL133093, AL122050, AL137560, AL137459, AJ238278, AL122098, U00763, | |
| | | | | | AL080127, L31396, AL133014, AL080137, AL137527, AF079765, L31397, X63574, U72620, A58524, | |
| | | | | | A58523, A93016, AL049382, I42402, AL050172, AF162270, AL050116, AI2297, AF057300, | |
| | | | | | AF057299, AF06T943, AF119337, AL137556, T03321, AF113691, AF1104032, AF017437, E15569, | |
| | | | | | AF113013, AL049464, AF078844, Y16645, AF097996, Y11254, AL110196, AF11T851, AF026124, | |
| | | | | | AL050108, AF090896, AL122093, X65873, U42766, AL137521, X96540, AB019565, AF113694, | |
| | | | | | AF090943, X70685, AL049314, AL137648, AJ242859, AF125949, AL050T46, AL110225, AL117394, | |
| | | | | | AL133606, AL137476, E08263, E08264, L30117, AL137533, AL137480, AF06T795, AF151685, | |
| | | | | | AL117440, AL133104, AL133067, L19437, S61953, AL137526, AF132676, AF061836, AFT 11849, | |
| | | | | | AL137523, U96683, A07647, AR038969, X87582, E04233, P02221, AF153205, X98834, AL133098, | |
| | | | | | Z37987, AL133568, AL034417, AC004383, AR013797, AF081195, AL137283, AL080074, P05822, | |
| | | | | | AL137478, Z72491, AC002464, Y09972, AL023657, I00734, M30514, P00617, P00717, E00778, | |
| | | | | | AF06198T, U78525, AL117432, U58996, AF061573, AF081197, AL034400, AL137294, AF095901, | |
| | | | | | AI8777, A90832, and P08631. | |
| HHBEN34 | 108 | 703745 | 1-368 | 15-382 | | |
| HHBFL31 | 109 | 800035 | 1-209 | 15-223 | AC007967. | |
| HHBFW44 | 110 | 716283 | 1-144 | 15-158 | | |
| HHBFW75 | 111 | 958692 | 1-437 | 15-451 | | |
| HHBGN42 | 112 | 698774 | 1-227 | 15-241 | AL119319, AL119522, AW392670, AL042551, AL119439, AL119484, AL119391, AL119401, U46350, | |
| | | | | | AW372827, AL119457, U46347, U46351, AL119324, AL119418, AI142139, U46346, U46349, | |
| | | | | | AL042614, AW363220, AI142137, AW384394, AL119363, AL119444, AL119443, Z99396, AL119497, | |
| | | | | | AL119355, AL119483, AL043019, AL134524, AL037205, AL134525, AL119335, U46341, AL119399, | |
| | | | | | AL119396, AL134518, AL134528, AL134538, AL042544, AL042542, AL119496, U46345, AL042450, | |
| | | | | | AL042896, AL042984, AL042965, AL042975, AL043029, AL043003, AL119464, AB026436, | |
| | | | | | AR069079, AR060234, AR066494, AR043113, A81671, and AR05410. | |
| HHBGN52 | 113 | 726391 | 1-266 | 15-280 | AC007377. | |
| HHBGN68 | 114 | 752745 | 1-41 | 15-55 | | |
| HHBGR37 | 115 | 708457 | 1-294 | 15-308 | | |
| HHBGT39 | 116 | 940578 | 1-54 | 15-68 | | |
| HHBGY59 | 117 | 792027 | 1-538 | 15-552 | | |
| HHBHE83 | 118 | 780875 | 1-62 | 15-76 | | |
| HHBHK08 | 119 | 958649 | 1-287 | 15-301 | AL031984. | |
| HHBHK84 | 120 | 858431 | 1-336 | 15-350 | AL031719. | |
| HHBHO63 | 121 | 906947 | 1-296 | 15-310 | | |
| HHBHP27 | 122 | 676601 | 1-433 | 15-447 | Y16241, and AF047368. | |
| HHFBD39 | 123 | 826307 | 1-219 | 15-233 | AA346547, and AA346371. | |
| HHFBD50 | 124 | 724763 | 1-287 | 15-301 | AA346559, AA428211, H56371, H56372, C16964, and AC007193. | |
| HHFBF32 | 125 | 502872 | 1-395 | 15-409 | | |
| HHFBH26 | 126 | 502843 | 1-256 | 15-270 | AA047753, AA236652, and AA234860. | |
| HHFB105 | 127 | 932961 | 1-355 | 15-369 | | |
| HHFBJ81 | 128 | 502954 | 1-344 | 15-358 | AA347517. | |
| HHFBL16 | 129 | 509237 | 1-387 | 15-401 | Z62184, and Z62183. | |
| HHFBL30 | 130 | 509238 | 1-341 | 15-355 | | |
| HHFBL32 | 131 | 509233 | 1-291 | 15-305 | AP000687, and AP000688. | |
| HHFBL36 | 132 | 707930 | 1-300 | 15-314 | AI285706. | |
| HHFBL39 | 133 | 509637 | 1-226 | 15-240 | AC005343, and AL137658. | |
| HHFBL60 | 134 | 739670 | 1-353 | 15-367 | AA421695. | |
| HHFBP60 | 135 | 503453 | 1-307 | 15-321 | AA347874, AA346832, and AC002126. | |
| HHFBX77 | 136 | 959805 | 1-411 | 15-425 | AB023161. | |
| HHFCA64 | 137 | 720849 | 1-312 | 15-326 | AA347017, AA902341, AI356882, AA346959, and AC004948. | |
| HHFGF70 | 138 | 518435 | 1-407 | 15-421 | AA347521, and AA347377. | |
| HHFCH59 | 139 | 526389 | 1-337 | 15-351 | AA347433. | |
| HHFC173 | 140 | 518427 | 1-198 | 15-212 | AA347520, and AA347376. | |
| HHFCK71 | 141 | 781725 | 1-227 | 15-241 | AA347681, and AC005829. | |
| HHFCL91 | 142 | 509628 | 1-340 | 15-354 | AA132492. | |
| HHFCP67 | 143 | 536062 | 1-281 | 15-295 | AA347928, and AA347923. | |
| HHFCZ01 | 144 | 509163 | 1-305 | 15-319 | AA347978. | |
| HHFDA67 | 145 | 509387 | 1-286 | 15-300 | | |
| HHFDG32 | 146 | 502957 | 1-312 | 15-326 | AA347334. | |
| HHFDH02 | 147 | 921297 | 1-377 | 15-391 | | |
| HHFDH38 | 148 | 536551 | 1-338 | 15-352 | AA055018, AA346973, H71821, Z80771, AL008626, Z95331, AL031177, Z69923, AC002467, | |
| | | | | | AC007161, AP000078, AL133233, AC004222, AL049767, AC004526, AC003976, Z95124, Z82210, | |
| | | | | | AC005036, AL031229, AC004614, AL031119, AP000472, AC006052, AL121871, AJ006995, | |
| | | | | | AC007372, AL049837, AC005261, AC007423, and AC005181, | |
| HUFD107 | 149 | 954404 | 1-288 | 15-302 | | |
| HHFD142 | 150 | 500877 | 1-326 | 15-340 | AA347955. | |
| HHFD162 | 151 | 745569 | 1-378 | 15-392 | AL033527. | |
| HHFD166 | 152 | 573283 | 1-387 | 15-401 | | |
| HHFDJ27 | 153 | 534909 | 1-427 | 15-441 | | |
| HHFDJ87 | 154 | 575105 | 1-338 | 15-352 | | |
| HHFDM05 | 155 | 932863 | 1-414 | 15-428 | AL037595, AA347423, and AA632734. | |
| HHFEJ18 | 156 | 525616 | 1-246 | 15-260 | AC006453. | |
| HHFEO24 | 157 | 525611 | 1-295 | 15-309 | | |
| HHFES51 | 158 | 525609 | 1-167 | 15-181 | Z72519, and AF001905. | |
| HHFFG41 | 159 | 575009 | 1-188 | 15-202 | | |
| HHFFO64 | 160 | 523769 | 1-316 | 15-330 | AI242160, AI247651, AA775915, and AW393719. | |
| HHFF066 | 161 | 500910 | 1-204 | 15-218 | AA347624, AA347709, and 145588. | |
| HHFF096 | 162 | 894076 | 1-172 | 15-186 | | |
| HHFFT69 | 163 | 662462 | 1-991 | 15-1005 | AA127759, AA121515, AI984304, AI983026, AI360098, AI239945, AA961058, AA058699, and | |
| | | | | | AB007972. | |
| HHFFX20 | 164 | 525617 | 1-104 | 15-118 | AL133312. | |
| HHFFX75 | 165 | 507394 | 1-248 | 15-262 | Z93024. | |
| HHFFY80 | 166 | 732614 | 1-386 | 15-400 | AA558357, and AA558032. | |
| HHFFZ04 | 167 | 927869 | 1-531 | 15-545 | AI091840, AI275088, AI088323, AA347574, AL132641, and AB007865, | |
| HHFFZ19 | 168 | 509630 | 1-453 | 15-467 | | |
| HHFGA21 | 169 | 573584 | 1-343 | 15-357 | AA501872, U91322, AC005387, AC004531, AC005253, AC005914, AC00S004, AL035659, AL133245, | |
| | | | | | AC005971, AC006285, AC007225, AL022163, AC002563, AL031685, AL049830, AP000359, | |
| | | | | | AC005086, AC006006, AC007444, AC002094, AC004583, AC005409, AL049760, AC006064, | |
| | | | | | AC006449, AL022721, AC010072, AC005520, AL031228, AL031729, AL035078, AC016025, | |
| | | | | | AL121595, AC005229, AP000117, Z99716, AL022323, AL133246, AC007226, Z84469, AC009516, | |
| | | | | | AC005071, AC005225, AL031390, AL096775, and AC007032. | |
| HHFGC14 | 170 | 741650 | 1-358 | 15-372 | | |
| HHFGC69 | 171 | 573491 | 1-263 | 15-277 | AC007002. | |
| HHFGC93 | 172 | 576487 | 1-338 | 15-352 | | |
| HHFGC95 | 173 | 795968 | 1-396 | 15-410 | | |
| HHFGE01 | 174 | 917137 | 1-394 | 15-408 | | |
| HHFGJ85 | 175 | 524890 | 1-280 | 15-294 | | |
| HHFGM50 | 176 | 506635 | 1-453 | 15-467 | | |
| HHFGN31 | 177 | 908508 | 1-442 | 15-456 | AC005324, and AL080124. | |
| HHFGN67 | 178 | 573509 | 1-308 | 15-322 | | |
| HHFGP71 | 179 | 573860 | 1-402 | 15-416 | Z97989. | |
| HHFGR35 | 180 | 573510 | 1-304 | 15-318 | AC005369. | |
| HHFGS09 | 181 | 526331 | 1-403 | 15-417 | AA348101, AW299437, AI640149, AW135484, AI636408, Z42797, AW969210 AI271987, AA922757. | |
| | | | | | AI765884, and AL008733. | |
| HHFGS40 | 182 | 888332 | 1-300 | 15-314 | | |
| HHFGS92 | 183 | 871899 | 1-319 | 15-333 | | |
| HHFGT10 | 184 | 968109 | 1-399 | 15-413 | AC006312. | |
| HHFGY13 | 185 | 573473 | 1-362 | 15-376 | | |
| HHFGY37 | 186 | 711364 | 1-404 | 15-418 | | |
| HHFGY75 | 187 | 573483 | 1-458 | 15-472 | | |
| HHFGZ54 | 188 | 573477 | 1-227 | 15-241 | | |
| HHFGZ63 | 189 | 661248 | 1-406 | 15-420 | | |
| HHFGZ69 | 190 | 918322 | 1-404 | 15-418 | | |
| HHFHA44 | 191 | 573498 | 1-261 | 15-275 | | |
| HHFHC02 | 192 | 920510 | 1-449 | 15-463 | AC005940. | |
| HHFHC44 | 193 | 716763 | 1-213 | 15-227 | | |
| HHFHC57 | 194 | 573506 | 1-148 | 15-162 | AA077889, and AC004084. | |
| HHFHC72 | 195 | 766128 | 1-252 | 15-266 | AA524846, AW029626, AI888050, AW169469, AA230221, AL119063, AI061158, AA809104, | |
| | | | | | AI821945, AI446618, H91711, R79396, AA385094, AA847341, AI537800, AI281622, AI002863, | |
| | | | | | AI940546, AA947352, AA834891, AA935827, AA496941, AI570067, H98162, W27084, AAI96287, | |
| | | | | | AW407007, AW022796, AA362440, AA846036, AW085811, AA665102, AI884404, AI634466, | |
| | | | | | H81012, AA364147, AI434103, AW157128, N49298, AW028376, AI567676, H86399, AI640905, | |
| | | | | | AI268465, AA353081, AW104040, AAI12864, AA349923, AW152451, N49540, AA812133, R64110, | |
| | | | | | AA828840, AI520984, AA593168, AA364082, AI801479, AA020882, R92390, A1038029, AA394283, | |
| | | | | | AI581006, AI708565, AA601336, AI890283, W02419, AAI96994, AA613189, AI805373, C75332, | |
| | | | | | AA507975, AI345256, AA761454, AA411337, AA419014, AI805556, AW131109, AW190437, | |
| | | | | | AI207534, W07542, T96411, AAI01744, AA618531, AA730795, AA581317, AI820978, H94598, | |
| | | | | | F35374, AA804838, AA419107, AA229316, AA554289, AA779599, AA230024, AI760850, AA525324, | |
| | | | | | AI174701, AA296656, AI825901, AA714190, AA436949, AI343808, AL046487, AI149177, AA828613, | |
| | | | | | AL080243, AL133371, AC004883, AC006390, Z75744, AC007731, AC00SS00, AL021332, AL035361, | |
| | | | | | AP000692, AC004812, AC004821, U85195, AE000658, AC006974, AL049780, AF139813, Z83820, | |
| | | | | | AC007055, AC008040, AL022721, Z93020, AC006538, AC002106, AC006263, AC003957, AC005911, | |
| | | | | | AC006261, AC004228, AC007011, AL139054, AC007263, AC005516, AC004000, AC006023, U65590, | |
| | | | | | AC007201, AC003092, AC004148, AL031229, AC001551, AC006315; AF111169, AC006360, Z85986, | |
| | | | | | AC005412, AC005355, AC004673, AL035464, AL021546, AL109952, Z81364, AF047825, AF12730, | |
| | | | | | AL049562, AL031121, AL117339, AF109907, AF111168, AC005245, AC002492, AC008179, | |
| | | | | | AC006468, AL034420, AC007899, AC004019, AC000075, AC005664, AL122020, AC006547, | |
| | | | | | AC008125, AC007390, AC005759, AC005581, AC003025, AC005993, AC005553, Z83826, AC005630. | |
| | | | | | AF051976, Z86090, AL133275, AP000359, AC006006, AC004921, AL132994, AL034379, AC004881, | |
| | | | | | AC006142, AF196779, AL050348, Z94801, AC005411, AL008710, AC000353, AC016026, Z95113, | |
| | | | | | AC005751, AL022313, AL049643, AC006079, AL031177, AC002395, AL117330, AC005624, | |
| | | | | | AC005102, AC002120, AL133245, Z97184, AC020663, AP000703, AC004099, AP000279, AC009399, | |
| | | | | | AC004084, AC003036, AG006001, AC006958, AL008725, AC007934, AC005189, AP000039, | |
| | | | | | AP000107, AC016025, AL109984, Z98752, AC008171, AC003999, AC005520, AL035443, AC004797, | |
| | | | | | AL121658, AL022165, AP000038, AP000106, AC004835, Z97056, AC004801, AL031295, AC004477, | |
| | | | | | AL008721, AF001975, AC004112, Z95116, AB023049, AC005484, AC007845, AL049759, AL008628, | |
| | | | | | AP000512, AC005329, AC005180, AL050333, Z98304, AC005015, AC005482, Z99571, AL121603, | |
| | | | | | AC005599, AL133448, AF001549, AF205588, AC005069, AP000247, AL023807, AL031670, | |
| | | | | | AC005781, AP000076, AC003991, AL031662, AC005264, AC006125, AC002407, AC007666, | |
| | | | | | AF003529, AC000052, AG016830, AC002044, AC005253, AC002430, AL109613, AL031848, | |
| | | | | | AL079342, AC007676, AC005730, AC007384, AC005821, AC007686, AF107885, AC005682, | |
| | | | | | AC005231, AC005066, AC012099, Z69917, AC005337, AC002558, Z84487, AC005288, AC005722, | |
| | | | | | AC005529, AC012627, AC002045, AC002465, AC007066, AC007312, AL049743, Z76735, AL080317. | |
| | | | | | AF196971, AC005585, U95742, AC005775, AP000280, Z93017, AC002563, and AL031257. | |
| HHFHE28 | 196 | 506630 | 1-348 | 15-362 | | |
| HHFHE58 | 197 | 526391 | 1-512 | 15-526 | R10859, AA347294, and H87292. | |
| HHFHE76 | 198 | 506578 | 1-423 | 15-437 | | |
| HHFHF91 | 199 | 526396 | 1-357 | 15-371 | AA346979. | |
| HHFHJ46 | 200 | 576949 | 1-658 | 15-672 | AI827607, AA007488, AA007421, H49821, H49565, AI241634, AW408635, and AC007371. | |
| HHFHJ72 | 201 | 575030 | 1-363 | 15-377 | | |
| HHFHM77 | 202 | 934027 | 1-175 | 15-189 | | |
| HHFHN54 | 203 | 506624 | 1-211 | 15-225 | | |
| HHFHQ86 | 204 | 572923 | 1-396 | 15-410 | | |
| HHFHU63 | 205 | 572871 | 1-338 | 15-352 | | |
| HHFHX11 | 206 | 967321 | 1-114 | 15-128 | AL022476. | |
| HHFHY47 | 207 | 720473 | 1-339 | 15-353 | | |
| HHFHY66 | 208 | 573294 | 1-341 | 15-355 | AL135049. | |
| HHFJC02 | 209 | 918318 | 1-389 | 15-403 | | |
| HHFJ111 | 210 | 883731 | 1-285 | 15-299 | | |
| HHFJL11 | 211 | 965931 | 1-399 | 15-413 | | |
| HHFJM56 | 212 | 857990 | 1-254 | 15-268 | AC005998. | |
| HHFJN01 | 213 | 913798 | 1-436 | 15-450 | AA348215. | |
| HHFJN02 | 214 | 918358 | 1-427 | 15-441 | AA346443, AC005301, and AC007064. | |
| HHFJO06 | 215 | 934168 | 1-492 | 15-506 | AA347342. | |
| HHFJO12 | 216 | 969624 | 1-422 | 15-436 | | |
| HHFJR06 | 217 | 934093 | 1-295 | 15-309 | AC005360. | |
| HHFJX18 | 218 | 907658 | 1-328 | 15-342 | | |
| HHFKB03 | 219 | 922803 | 1-445 | 15-459 | AL138381, AA353533, AA437014, and AW372500. | |
| HHFKC28 | 220 | 857948 | 1-364 | 15-378 | | |
| HHFKC43 | 221 | 906903 | 1-467 | 15-481 | AI051548, N54917, AI056521, and AA693909. | |
| HHFKE05 | 222 | 920550 | 1-460 | 15-474 | | |
| HHFKH82 | 223 | 857810 | 1-323 | 15-337 | AC000075, AC000097, AC006547, and AC005664. | |
| HHFK102 | 224 | 918288 | 1-408 | 15-422 | | |
| HHFKJ68 | 225 | 934045 | 1-308 | 15-322 | AW375009, and AI935760. | |
| HHFKK95 | 226 | 952082 | 1-496 | 15-510 | | |
| HHFKM10 | 227 | 963184 | 1-465 | 15-479 | | |
| HHFKU12 | 228 | 887244 | 1-408 | 15-422 | T70846, T85471, and R18037. | |
| HHFKU44 | 229 | 857923 | 1-520 | 15-534 | | |
| HHFKX11 | 230 | 965874 | 1-365 | 15-379 | | |
| HHFKY11 | 231 | 965876 | 1-455 | 15-469 | | |
| HHFLA69 | 232 | 933869 | 1-203 | 15-217 | | |
| HHFLH34 | 233 | 857907 | 1-408 | 15-422 | AA502532, AA644090, AA552586, AI687343, AI369580, AAI28511, N23913, AA501867, AA908687, | |
| | | | | | AA504818, AA704393, AW340905, AW023111, AW169038, AI334464, AW275971, H04977, H61871, | |
| | | | | | AI732151, AI366993, AI344812, AA715814, F00564, AI270559, AA427636, AA464739, AI609972, | |
| | | | | | AI440117, AA502991, AW275719, AI733856, AI859438, AW265735, AL041453, AI923052, AI554471, | |
| | | | | | AA559241, AA578621, AI742168, AA507822, AW271904, AA640410, AA640430, AW005974, | |
| | | | | | AA877992, AI049709, AA515138, AA720774, AA481887, AW268973, AA283730, R44593, T07039, | |
| | | | | | AA084609, AA570740, AA483606, H58354, AI056177, H63660, AA225406, AI580250, AI753037, | |
| | | | | | AAI27078, AA602557, AL048275, AI366902, AI223968, AL047429, AI754653, AA701080, | |
| | | | | | AA714110, AI076228, N25272, AA484208, N72170, H53217, AI144101, AI758435. AI061313, | |
| | | | | | AW150077, AW022655, AL079734, AI249683, AW007980, T06828, AA600341, AA297666, | |
| | | | | | AW020150, AA362349, AI251576, AI342183, AI933714, AA586667, AA632757, AA654778, | |
| | | | | | AI491765, H66577, F35374, AI417469, R95840, AA013168, AI792521, AW272294, AI597820, | |
| | | | | | AI583252, AI696955, AI471914, C75034, AI345418, AA477503, AA779783, AA828802, AA828781, | |
| | | | | | AW302711, AA054085, AA744018, AI446259, F05592, AA523792, AI565084, R98160, AA508809, | |
| | | | | | AL138329, AA578832, AI635440, AI270476, AI635028, AW188742, AA829036, AA351003, | |
| | | | | | AA640260, AA847395, AA584423, AA568204, AA469327, AW245354, AA749235, AC005775, | |
| | | | | | AC007263, AC005666, AL022322, AL034449, AC007161, AJ246003, AC004531, AC008033, | |
| | | | | | AC004408, L78810, AC006057, AL096791, Z84480, AL121603, AC006511, AL020995, AL031588, | |
| | | | | | AL049795, AL031575, AL022302, AL034420, AP000692, Z99716, AC002314, AC005300, AC005690, | |
| | | | | | U91326, AP000967, AC008372, AC007773, AC003971, AL121655, AC004883, AC006305, AC005988, | |
| | | | | | AC006211, AC004596, AL121658, AL022163, AC005899, AL031003, AC007225, AL049709, | |
| | | | | | AC005746, AC000353, AC004771, AC020663, AC005546, AC004966, AC006120, AC005736, | |
| | | | | | AF001549, AC005229, AC005841, AL035604, AC003007, AC004517, M87889, AF003528, AL133445, | |
| | | | | | AP000553, AC002289, U52111, AC007011, U80017, AL049779, AC002350, AC005409, AL035462, | |
| | | | | | AL035249, AC004000, AC005319, AC006946, AC005696, AC005529, AC005291, M63543, | |
| | | | | | AC002430, Z98051, AC006468, AD000812, AC005209, AL021707, AP000044, AP000112, AC005632, | |
| | | | | | M63544, AC000392, AL049869, AP000694, AC007384, AC005480, AC009516, AC005488, AC005694, | |
| | | | | | AC005335, AC004814, AG006059, AJ009610, AL023284, AC003690, AC004552, AF053356, | |
| | | | | | AC002477, AL022323, AC004598, AL034379, AC004760, AC008062, AP001060, AC004686, | |
| | | | | | AL078463, AL050341, AJ010597, AL133246, AL109827, AC006014, AC007193, AC007360, | |
| | | | | | AL031311, AG005914, AL035659, AC012384, AC007114, AC006127, AC005011, AC004678, | |
| | | | | | AF130343, AL049776, AL022238, AC006251, AC004130, AF190465, AL022165, AL121782, | |
| | | | | | AC005081, AC004217, AC002551, Z97200, Z98744, Z98752, AP000556, AL035086, AL133244, | |
| | | | | | AC007201, AC002425, AC005486, AP000552, AF196969, AC005102, AC004743, AC000134, | |
| | | | | | AL049569, AC006101, AF165926, AC016025, AC006130, AL035420, U91318, U08988, AL049759, | |
| | | | | | AC005042, AC006160, AC007191, AL035405, AC004651, AC005365, AC004491, AC007541, | |
| | | | | | AC005527, AC005231, AC004757, AC005740, AC004655, AL008723, AL049830, AC007981, | |
| | | | | | AC015853, AC006277, AP001050, AC002492, AC005940, Z83826, AC005288, AP000962, AC005520, | |
| | | | | | AF111169, AF064861, AC005256, AL021940, Z68756, AC005411, AL031662, AC005207, AC005005, | |
| | | | | | AC005031, U89335, Z97632, AF187320, AP000557, AC002984, AC003692, AC005175, AL035071, | |
| | | | | | AL117694, AF165176, AC009247, AC007686, AC002126, AL109801, AC007536, AC005187, | |
| | | | | | AC003043, AF027390, AC005500, and AC005962. | |
| HHFLM06 | 234 | 933868 | 1-405 | 15-419 | U51560, and Z80896. | |
| HHFLP28 | 235 | 857888 | 1-437 | 15-451 | D57483, D80253, D58283, D80024, D80366, D59859, C14389, D51423, D59467, D80043, D59889, | |
| | | | | | D80166, D59619, D59610, D80210, D51799, D80240, D81030, D80188, D80391, D80212, D59787, | |
| | | | | | D80022, D59275, C14331, D80219, D80195, D80164, D80227, D59502, D80196, AA305409, D80241, | |
| | | | | | D80251, C15076, D59927, D51022, D80038, AA305578, D80269, D80248, D50979, D50995, D80193, | |
| | | | | | AA514188, D81026, D80133, D80378, AW177440, D51060, AA514186, C14429, C14014, AW178893, | |
| | | | | | D80045, D80522, C75259, AW360811, AW352158, T03269, AW179328, D58253, AW375405, D80268, | |
| | | | | | C05695, AW378532, D80134, AW177501, AW178775, AW177511, AW377671, AW177731, | |
| | | | | | AW366296, AW360844, AW360817, AW375406, AW378534, AW179332, AW377672, AW179023, | |
| | | | | | AW178905, AW178762, D80132, D80247, D51250, D80439, AW369651, D80302, D51079, | |
| | | | | | AW177505, AW352171, AW377676, AW178906, AW352170, AW179024, AW178907, AW179019, | |
| | | | | | D59373, AW352117, AW176467, AW360841, F13647, AW179020, D80949, D52291, AW178909, | |
| | | | | | AW177456, AW179329, AW178980, AW177733, AW378528, AW178908, AW178754, AW179018, | |
| | | | | | D80168, AI910186, C14227, D81111, T11417, C14298, AW179004, D80064, D80157, AW179012, | |
| | | | | | D51103, AW178914, C06015, AW378525, D51759, C14407, AI905856, AW177722, AW352174, | |
| | | | | | D58246, AW179009, AW177728, AW178774, AW178911, AW378543, AW352163, Z21582, | |
| | | | | | AW360834, C14975, AW178983, D59503, AW378540, AW178781, T48593, D58101, D45260, D59653, | |
| | | | | | AW177723, AW352120, D51097, D59627, D80014, AI525235, D80258, H67854, AA285331, | |
| | | | | | AW378533, AA809122, AI535850, D50981, AW367950, C14957, C03092, AI557751, H67866, | |
| | | | | | AW367967, D80228, AW178986, AI525923, D51213, AI525917, D59474, AW177508, D51231, | |
| | | | | | D51221, T03116, AW177734, D45273, AW177497, C14973, D59317, AI525920, C14344, AA514184, | |
| | | | | | D60010, AI557774, AI535686, AI525227, D59551, AI525222, D60214, C14046, T03048, D80314, | |
| | | | | | Z33452, AI525912, AI525215, AI525242, AW378542, AI525925, AI535961, AW378539, C05763, | |
| | | | | | C16955, T02974, AI525228, AI525237, AW360855, AR018138, AR008278, A62298, AJ132110, | |
| | | | | | A62300, A84916, AF058696, AB028859, Y17188, X67155, D26022, Y12724, A25909, A67220, | |
| | | | | | D89785, A78862, D34614, D88547, A82595, X82626, I82448, A94995, AR060385, AB002449, | |
| | | | | | AR008443, AR025207, I50126, I50132, I50128, I50133, AR066488, AR016514, AR060138, A45456, | |
| | | | | | A26615, AR052274, AB012117, Y09669, A43192, A43190, AR038669, AR066487, AR066490, | |
| | | | | | AR054175, A30438, A85396, D88507, AR066482, A44171, X68127, I18367,114842, AR008277, | |
| | | | | | AR008281, A85477, I19525, A86792, D50010, Y17187, X93549, A63261, X64588, AR008408, | |
| | | | | | AR062872, A70867, AR016691, AR016690, U46128, D13509, A64136, A68321, AR060133, I79511, | |
| | | | | | AF123263, AR032065, Z82022, and AR008382. | |
| HHFLU04 | 236 | 870085 | 1-353 | 15-367 | AA578033, AI908783, T06477, AA309342, and AL034548. | |
| HHFMA58 | 237 | 853959 | 1-339 | 15-353 | D80164, C14389, D81111, AW177440, D51799, D80195, AW369651, C15076, D80227, D80038, | |
| | | | | | D59502, D80269, C14227, D81030, D80166, D59275, D59467, D58283, D80022, D59859, C14331, | |
| | | | | | D80064, D80193, D59619, D80210, D80391, T03269, D80240, Z21582, D51423, D59787, AW178893, | |
| | | | | | D80253, D80212, D80043, D80196, D57483, D80188, AA305409, D50979, D802 19, D80378, D59927, | |
| | | | | | D59610, D80366, D59889, T11417, D51022, D80024, AA305578, D80045, D50995, D80241, D51060, | |
| | | | | | D80251, C14429, C14407, AW360811, D81026, AW179328, D59695, AA514188, AI557751, D59503, | |
| | | | | | C05763, C06015, G14014, AW176467, AW375405, D58246, AW360817, AA285331, C75259, C14298, | |
| | | | | | AW377671, D80248, D80168, AW378533, AW366296, AW360844, AW378532, D58101, D80258. | |
| | | | | | D51250, D52291, D80522, AW178775, AW178762, T03116, AA514186, D80133, AW360841, | |
| | | | | | AW177508, C05695, D80949, D80268, AA809122, AW177497, D80014, AI910186, AW375406, | |
| | | | | | AW352158, D59627, AW378534, AW179332, AW377672, AW179023, AW178905, AI535686, | |
| | | | | | AW177456, AW352171, AW177734, D59551, C03092, I02974, H67854, D59653, H67866, AW178907, | |
| | | | | | AW352170, AW177731, AW177505, AW178906, C14077, D80439, AW377676, AW179019, | |
| | | | | | AW179024, AW179020, D80247, D51103, D80302, AW178909, D59317, D80157, F13647, AW179329, | |
| | | | | | AW178980, AW179018, AW178914, AI525903, AW177733, AW378528, AW178754, AW178986, | |
| | | | | | C14973, AI535961, AW179004, D45260, D51759, AW177728, AI525920, AW179012, AW378525, | |
| | | | | | D59474, D51221, C14344, D60010, AI525923, D60214, AI525917, AI525227, AW352163, AI525925, | |
| | | | | | C14957, AI557774, AW177722, AW378543, AA514184, AW179009, AW360834, C14046, AW367950, | |
| | | | | | D59373, AW178774, AI525242, AI525235, D45273, AI525912, AW178911, AW352120, AI525215, | |
| | | | | | AW378542, AW178908, T48593, C16955, Z33452, AI525237, C13958, AW178781, T02868, D31458, | |
| | | | | | Z30160, C04682, AW360855, D51213, AW378540, D51053, D59976, AI535959, AI525222, AC004477, | |
| | | | | | A84916, AJ132110, A62298, A62300, AR018138, AR008278, AB028859, I82448, AF058696, Y17188, | |
| | | | | | D26022, X67155, A67220, D89785, A78862, D34614, A25909, AR060385, AR054175, I14842, A82595, | |
| | | | | | Y12724, AB002449, AR016808, I50126, I50132, I50128, I50133, AR008277, AR008281, A94995, | |
| | | | | | AR008443, I79511, AR016514, Y17187, AR060138, A45456, A26615, AR052274, A43192, A63261, | |
| | | | | | A43190, AR038669, AR062872, A64136, A68321, A70867, AR066488, Y09669, AR066487, A30438, | |
| | | | | | X68127, AR016691, AR016690, U46128, AF123263, AR032065, AR060382, and AR008408. | |
| HHFMB01 | 238 | 914951 | 1-295 | 15-309 | | |
| HHFME70 | 239 | 926497 | 1-353 | 15-367 | AA984829, AA558487, AA492161, AA046737, AI049701, AA603558, AL035686, AC016027, | |
| | | | | | AC016830, AC002565, AC004168, AL031120, U95740, Z98941, AC007546, AC005841, AL132826, | |
| | | | | | AL035555, AC005755, AP000694, AC006088, AC002365, AC004821, AL008730, AC002375, | |
| | | | | | AC004805, AC020663, AL023575, AC006597, AC007021, AC008975, AC005182, AC006449, | |
| | | | | | AL109802, Z99758, Z74739, U85195, AC004685, AE000658, AC004701, AC003950, AL133500, | |
| | | | | | AC006480, AL021155, AC007057, AC005578, AC002404, AC005535, Z84469, AC006539, Z93017, | |
| | | | | | AB003151, AP000688, AF111168, AC005081, AC004858, AF109907, AL031311, AC005972, | |
| | | | | | AC005369, AF001548, AC009363, Z97630, AC002425, AL031602, AL109623, AL009051, AP000555, | |
| | | | | | AC007283, AC005914, AL021368, AL031774, Z73988, AF108083, AC005486, AC007444, AL050347, | |
| | | | | | AC005484, AC005934, AL034420, AC005037, AC005015, AC002546, AC002123, U78027, AL035422, | |
| | | | | | AL121595, AC005261, AP000248, AC007731, AP000045, AC005231, AC005500, AC004946, | |
| | | | | | AC002126, U95742, AC007216, AC004605, AC004409, AC005003, AC005520, AC005071, U62293, | |
| | | | | | and AC009399. | |
| HHFMH85 | 240 | 872838 | 1-277 | 15-291 | R05702, AA479449, T97899, AI040466, AAI80508, and T10419. | |
| HHFM158 | 241 | 857856 | 1-529 | 15-543 | AA077459. | |
| HHFMO03 | 242 | 922708 | 1-412 | 15-426 | H06469, R18079, AA489067, AA505171, AAS05170, AA346630, AA889356, AA629200, AA534443, | |
| | | | | | AA488820, and Z84474. | |
| HHFM094 | 243 | 957955 | 1-395 | 15-409 | AI911241, T72210, T87002, R08341, R08392, T85654, T99624, T99625, R02406, R07180, R59607, | |
| | | | | | H62539, H99689, W63788, AA083979, AA102095, AA131697, AA131541, AA148259, AA151763, | |
| | | | | | AA193069, AA220926, AA416768, AA430164, AA483282, AA613379, AA747801, C00103, | |
| | | | | | AA292662, AA401454, AA402018, AA625743, AA405177, AA773305, AA970146, AA985342, | |
| | | | | | AA985358, AI004081, T19343, F07893, AI301484, and AI190719. | |
| HHFMQ70 | 244 | 840039 | 1-320 | 15-334 | | |
| HHFMZ40 | 245 | 974299 | 1-565 | 15-579 | | |
| HHFNA49 | 246 | 914838 | 1-319 | 15-333 | | |
| HHFND10 | 247 | 963140 | 1-437 | 15-451 | AI284640, AW301350, AW303196, AW407578, AL119691, AW088202, H71429, AW103758, | |
| | | | | | AW274349, AL046409, AW029038, AL119984, AW247819, AA469451, AI076616, AW021583, | |
| | | | | | AI583466, AW276435, AA720702, AI783494, AI929531, AA584201, AA502860, AW276817, | |
| | | | | | AI339850, AI687343, AA488746, AA581903, AI358571, AI434695, AI144101, AL038785, AW265385, | |
| | | | | | AW405021, AI267818, AA584752, AI537955, AL042853, AI457397, AA491814, AL138265, | |
| | | | | | AW302013, AI017415, AI589230, AA847499, AW276827, AA323644, AI679782, AI368745, | |
| | | | | | AW304584, AI312309, AI357551, AA826303, AW103981, AI251002, AW271904, F36273, AI708009, | |
| | | | | | AW162049, AI745325, AI357288, AI364809, AI064952, AI281697, AI246119, T09071 | AW238278, |
| | | | | | AI890348, AI610607, AI653636, AW089322, AA862180, AW023270, AW028392, AI251576, | |
| | | | | | AI801600, AI821271, AL120269, AI568678, AI281754, AI903462, AI110688, AA586661, D83989, | |
| | | | | | AL121658, AP000208, AP000130, AP000247, AC005703, AC006004, AL009181, AC016831, | |
| | | | | | AC004030, AF015156, AF124523, Z98050, AF042090, AL109985, AC004986, Z82189, AC003006, | |
| | | | | | AC007666, AL031577, AL049869, AL080278, AP000313, AC004149, AC009044, AC007226, | |
| | | | | | AC005901, AL008718, AL034420, AC003962, AC005323, AC002544, AC002303, AC005899, Z97352, | |
| | | | | | AC006958, AC004895, Z69917, AL121603, AP000050, AC007262, AP000049, AC002072, AC004584, | |
| | | | | | AC005217, AL022329, AP000555, AL132987, AL133304, AC004447, AC007564, AC007462, | |
| | | | | | AP000117, AC007298, AC004832, AL035411, AC004040, AL035423, AC004593, AL078593, | |
| | | | | | AP000311, AJ239322, AL050341, AL034379, AF001549, AC005046, AC004987, AL008582, | |
| | | | | | AC002404, AL034451, AC007363, AP000245, AC008079, AP000459, AL035468, AC010722, | |
| | | | | | AC003109, AJ006996, AC005529, AL133445, AC004638, AL096805, AC005295, AC006037, | |
| | | | | | AL008629, AC004158, U66059, AC006285, AL135744, AC003684, AC006238, AC005242, AC004417, | |
| | | | | | AL031283, AC007687, AL031054, AC005694, AC002379, AL021368, AL049691, AC004386, | |
| | | | | | AC004653, AC004883, AC009247, AL079300, AC005229, AC006456, AC007128, AC004940, | |
| | | | | | AL133246, AL034373, AP000088, AL035448, AP000228, U91323, AC004692, AC009516, AC008169, | |
| | | | | | AC007537, AC008372, AC007055, AC004804, AC002429, AJ010598, AC004815, AC004884, | |
| | | | | | AC005082, AC000118, AC005197, AL023803, AL121934, AL022163, AC005907, AC004972, | |
| | | | | | AC006288, AL050348, AC004858, AC002067, AC002456, AP000140, AC007237, AL022323, | |
| | | | | | AL031584, AC006006, Z97181, AF015151, AL022238, AL031848, AC003982, Z68870, AC005527, | |
| | | | | | AC005998, AJ246003, AC007216, AC007324, AC000379, AC007685, AC007773, AF195658, U07562, | |
| | | | | | Z97195, Z84480, AC004383, AP000193, Z93023, AC005144, AC004686, AC007845, AC005520, | |
| | | | | | AL033525, AC005324, AL049570, AL122126, Z95152, U91326, AC007030, AL035089, AC002395, | |
| | | | | | AC007637, AC002369, AC005919, Z82190, AC005164, AC005228, AC003042, AC003101, AC005154, | |
| | | | | | AL133371, AC011311, AL096701, AL022328, AC005829, AC016025, AC007486, AC005562, | |
| | | | | | AC010168, AC016026, AC005799, AF109907, AL022723, AC005104, AL031446, AC002430, and | |
| | | | | | AC006442. | |
| HHFNF41 | 248 | 857825 | 1-381 | 15-395 | AP000355. | |
| HHFNI49 | 249 | 857850 | 1-304 | 15-318 | AA346789. | |
| HHFOC27 | 250 | 857816 | 1-390 | 15-404 | AL049835. | |
| HHFOC66 | 251 | 857955 | 1-228 | 15-242 | AW160814, AW452242, AI393255, AI356203, AW290992, AI640362, AI640129, AI365982, | |
| | | | | | AF088886, AF132894, AF136279, and AJ007331. | |
| HHFOF07 | 252 | 952062 | 1-210 | 15-224 | AL132987. | |
| HHFOF40 | 253 | 930839 | 1-361 | 15-375 | | |
| HHFOJ05 | 254 | 930856 | 1-225 | 15-239 | AA347058, and AC000015. | |
| HHFON08 | 255 | 957974 | 1-218 | 15-232 | AL031282. | |
| HHFON15 | 256 | 857792 | 1-245 | 15-259 | | |
| HHFON19 | 257 | 910891 | 1-1126 | 15-1140 | AA527292, AA915932, AI215158, AA926744, AI283262, AA356476, AI916043, AI470481, | |
| | | | | | AW372085, AW384295, AW372101, AW384294, AW372104, and AC003072. | |
| HHFON32 | 258 | 858034 | 1-439 | 15-453 | | |
| HHFON87 | 259 | 857783 | 1-327 | 15-341 | AA507612, and AL133245. | |
| HHFOW08 | 260 | 857772 | 1-337 | 15-351 | AA346793, AA494051, R96249, AI932599, AI672860, T16700, H09486, H07125, AA569178, | |
| | | | | | AC006449, AC004703, AC004386, AC005231, AC005274, AF031078, AF030876, AB016897, | |
| | | | | | AC006511, AC003071, AC002565, AL033547, AC005412, AC002400, AB011399, AL009181, Z95114, | |
| | | | | | AC006512, AC005529, AC002543, AC005081, Z83826, Z93023, AL049793, AC004876, AC004522, | |
| | | | | | AL139054, AC005049, AC002288, AL049758, AC006050, AC004228, AP000010, AC004953, | |
| | | | | | AF047825, AC006064, AL080243, AC005058, U47924, AC006538, AF053356, AL031680, AL049761, | |
| | | | | | AL008719, AC007011, AL049712, AC006012, AL031255, AC004882, and AC007308. | |
| HHFSB02 | 261 | 921364 | 1-297 | 15-311 | AA347106. | |
| HHFTC88 | 262 | 500903 | 1-345 | 15-359 | AA347696. | |
| HHFUB15 | 263 | 534520 | 1-300 | 15-314 | AA776649. | |
| HHFUB23 | 264 | 928063 | 1-375 | 15-389 | AC004985. | |
| HHFUB77 | 265 | 772691 | 1-291 | 15-305 | AW080134, AA515051, AA229785, AI339850, AA482711, AI929531, AI284640, F29989, AI282832, | |
| | | | | | AI205126, AW029038, AI962050, AW023672, AI358229, AI469003, AI251002, AA745582, | |
| | | | | | AA826303, AI358343, AA843450, AW088202, AW406755, AI049722, AA347927, AI049634, | |
| | | | | | AA594145, AA074130, AW440836, AI365988, AW265294, AA3 18652, AI625244, AW276827, | |
| | | | | | AI151261, AW193432, AI569086, F28576, AI919029, AA503258, AA469451, AA347930, AI206785, | |
| | | | | | T29180, AI198376, AA649642, AW162049, AW339687, AW166815, AI918421, AL138265, | |
| | | | | | AW129001, AI890923, AI688846, AA441788, AA985038, AI635272, T06828, AI133636, AI357551, | |
| | | | | | AA747276, AI567674, AA568778, AA350859, AI382614, AI350211, AA747480, AA720025, | |
| | | | | | AI053672, AW193265, AI537955, AI446464, AW440976, AW276435, AW236342, AA364456, | |
| | | | | | AA515435, AW021583, AA492132, AI298710, T06556, AA503283, AI679782, AA515751, AA713815, | |
| | | | | | AI904894, F25867, AW302450, AI445498, AW301350, AI570261, AW303196, AW274349, AI654529, | |
| | | | | | AA483068, AI580652, AI370475, AA533408, AA394271, AI079910, AA449088, AA372478, | |
| | | | | | AW243960, AA501784, T07451, AI469624, AI344844, AA309841, AA553465, AI610159, AW079659, | |
| | | | | | AI653905, AA299115, T08914, AL046409, AI917271, AW238016, AA603323, AI144055, AA654979, | |
| | | | | | AI250019, AA886584, H64777, F36273, AW438643, AI471481, AA148489, AA669251, AA244415, | |
| | | | | | AI471543, AI281697, AA533725, AA557879, AA593247, AI200051, AL120674, AA659083, | |
| | | | | | AL038785, AI286264, AA747472, AW079241, C75026, AA215929, AI431303, AW302013, AL043721, | |
| | | | | | AI192631, AI281881, AI608626, AI357288, AI902694, AI354397, H62778, AA515224, H184359, | |
| | | | | | AW265385, AW419262, AW089810, AW088058, AW173651, AA573020, AI623898, AA502155, | |
| | | | | | F28776, H64560, U63607, AI471534, AA100599, AA161181, AI061334, F18974, AA044863, | |
| | | | | | AI648558, AW265654, AI824562, F17700, AA827981, AI287651, AW089322, AI345654, AW242109, | |
| | | | | | R91994, AA364420, AW338500, AI266133, AI305547, AI312309, AW265253, AI683577, AA338486, | |
| | | | | | AW339568, AA352803, F25203, AI289067, AA601492, AI500454, AW020992, AI358813, AI351698, | |
| | | | | | F03525, AI299050, AA559290, AW419118, AI434695, AA903367, AA503454, AI866856, AA650244, | |
| | | | | | T08438, F19012, AI017024, AI364809, AA513884, U14718, U14719, U14714, AF015160, U14715, | |
| | | | | | U47924, U14713, S75337, M87916, U14717, U14711, U14712, A39972, AL049635, AF015171, | |
| | | | | | AC007436, AL049869, AC006030, U14685, U14686, AL109801, U57005, U14691, U57007, S77605, | |
| | | | | | AF020503, U14695, U14705, U14688, U14689, U14687, U14707, D83989, AC006221, X54176, | |
| | | | | | X75335, X55925, I51997, AF200465, Z73429, AC004866, Z22650, AL031224, AC005618, AL021391, | |
| | | | | | U14706, I114716, AF140763, AC007751, I114700, AC005670, U14699, U14710, U14684, U14690, | |
| | | | | | AC007845, U12580, M87919, S70694, AC016025, U57009, U18399, U18391, U57008, AC004506, | |
| | | | | | AC006116, AP000959, AF001552, U18390, AC005252, AL133445, AC005048, AF015158, U92032, | |
| | | | | | AC005041, AF015169, AL031662, AC004019, U14692, AF172277, AF015162, AL049836, AC006039, | |
| | | | | | U14702, Z80899, AP000966, AC005145, AL021878, AC003029, X54180, U18392, U57006, U18394, | |
| | | | | | Z98256, U18393, AL049554, X55928, AL022238, AF107885, AC007283, S70697, AC002984, | |
| | | | | | AF015167, Z94721, X54175, AC005401, U18398, AC005064, AC003015, Z98200, U18396, AC008282, | |
| | | | | | X55931, AC006237, AC004159, Z97198, Z30979, Z83826, AF015168, AC004030, AC006064, | |
| | | | | | AP000011, AL117693, U91321, AL031230, AL035400, AF145473, AP000126, AP000204, Z98744, | |
| | | | | | AC006115, AC004087, AL008718, Z82244, AL050305, AC006441, AC000086, AC005912, AF147277, | |
| | | | | | AL023513, AC006312, AL050318, Z84484, AC005253, AC006132, U14703, U14701, AC005776, | |
| | | | | | X54181, AC005177, U18395, AC005324, AC005696, AC006547, AP000244, U14704, AC005229, | |
| | | | | | AC006371, AL022237, AL031280, S48196, AC005255, X54178, X55924, AL021939, AC007040, | |
| | | | | | X55932, AC004534, S70707, Z98043, U12583, X53795, U80460, U02058, AC007242, U02063, | |
| | | | | | AF015170, AC004187, AC007536, AF015166, U73635, AP000337, U67221, AL139054, X55930, | |
| | | | | | AC003035, AF031078, AC00506S, AC004806, AC006539, AC006254, AF030876, AC004686, | |
| | | | | | AP000156, AC004167, Z98745, AC002429, AC006207, AC007162, AL021154, U12582, AR036572, | |
| | | | | | U91328, AL023576, Z69921, AF015163, AL035423, AC005484, AC006296, AL121852, AP000954, | |
| | | | | | AL031347, AL023494, AC005529, AC007766, AL035551, AL031427, AF095855, AC005678, | |
| | | | | | AC007684, AC001164, AC006046, AC005666, AC004825, U85195, AF141976, AL049776, AC004964, | |
| | | | | | U93163, AC005185, AJ003147, AC005858, AC006076, AF015725, AC010202, AL117355, AC004193, | |
| | | | | | AC000097, AC003001, AF077058, AL078593, X55926, Z31005, X55923, AC006127, AC004130, | |
| | | | | | Z82208, AC004887, U18387, and M87917. | |
| HHFUC24 | 266 | 524840 | 1-354 | 15-368 | | |
| HHFUC26 | 267 | 960331 | 1-371 | 15-385 | AC007686. | |
| HHFUC42 | 268 | 525603 | 1-313 | 15-327 | AW135348, AW204310, AA996205, AI697749, AC004836, and AC005069. | |
| HHFUC45 | 269 | 525600 | 1-198 | 15-212 | | |
| HHFUC47 | 270 | 525599 | 1-334 | 15-348 | | |
| HHFUC83 | 271 | 507459 | 1-488 | 15-502 | | |
| HHFUC92 | 272 | 507018 | 1-329 | 15-343 | AA347389, AA280938, AL079866, AI936976, and AB011134. | |
| HHFUK58 | 273 | 525604 | 1-191 | 15-205 | | |
| HHFUL75 | 274 | 675569 | 1-343 | 15-357 | | |
| HHFUN56 | 275 | 530953 | 1-210 | 15-224 | | |
| HMEBA75 | 276 | 530303 | 1-146 | 15-160 | | |
| HMEBY61 | 277 | 947868 | 1-385 | 15-399 | AA303737. | |
| HMEDF58 | 278 | 738427 | 1-480 | 15-494 | | |
| HMEDR48 | 279 | 529173 | 1-356 | 15-370 | | |
| HMEEF64 | 280 | 918746 | 1-377 | 15-391 | T99598. | |
| HMEEX61 | 281 | 742085 | 1-487 | 15-501 | AA173199, and AA347039. | |
| HMEFR17 | 282 | 664438 | 1-459 | 15-473 | H29936, H29845, W27872, AW380042, AF085864, and AB028981. | |
| HMEFX12 | 283 | 661951 | 1-446 | 15-460 | AA339614, and AA374928. | |
| HMEGB93 | 284 | 573814 | 1-352 | 15-366 | AF093097. | |
| HMEGF48 | 285 | 573821 | 1-404 | 15-418 | | |
| HMEGG44 | 286 | 796421 | 1-445 | 15-459 | N44889, and AL110204. | |
| HMEGH46 | 287 | 887791 | 1-363 | 15-377 | AB033054. | |
| HMEG107 | 288 | 953815 | 1-556 | 15-570 | AW363121, R24201, AW025914, and AA770692. | |
| HMEIG42 | 289 | 931114 | 1-394 | 15-408 | AW192773, AA953251, AW372190, AW274877, AI669009, and AB014592. | |
| HMEIM40 | 290 | 523589 | 1-211 | 15-225 | | |
| HME1U49 | 291 | 722988 | 1-359 | 15-373 | | |
| HME1W23 | 292 | 682863 | 1-263 | 15-277 | AL110334, AW411094, AL135489, AL135458, AAI36879, AA876722, AA719995, AI053577, R98359, | |
| | | | | | AI494405, AA381147, AA483204, AW151713, AA953228, AA834707, H96467, AA970967, | |
| | | | | | AC005156, AC005232, AC004527, AL008638, AC005477, AC006205, AC009S01, AL022165, | |
| | | | | | AP000689, AC004559, AF067845, AC007298, AF110824, AC005225, AC004821, AC006597, | |
| | | | | | AL020997, AC005520, AC004491, AC005899, AC008282, AB0 16897, AC005368, AC004542, | |
| | | | | | AC004463, Z94161, AC004217, AL022336, U95743, AL022718, AC004694, AP000557; AL135959, | |
| | | | | | AC006039, AL031257, AL035681, AC004973, AC005786, AC005523, AL008730, AC004601, | |
| | | | | | AC006044, AC005684, AC022517, AC006013, AC000134, AC005004, AC004890, AP000351, | |
| | | | | | AC004924, AC005519, AC005261, Z68162, AL079304, AC006486, AL132987, AC005081, AC004778, | |
| | | | | | AC003101, AC008009, AG005736, AC005015, M93189, U73647, AC004755, AC000387, AC005091, | |
| | | | | | AC005222, AL049747, U93305, AC006040, AC006273, AC006449, AC012384, AC006116, Z95114, | |
| | | | | | AP000270, AJ225085, AC000025, X96421, and AL133448. | |
| HMEJD13 | 293 | 657231 | 1-257 | 15-271 | AC003976, AC005702, AC005562, and AL117394. | |
| HMEJJ84 | 294 | 781983 | 1-124 | 15-138 | Z98744. | |
| HMEJU60 | 295 | 740392 | 1-322 | 15-336 | | |
| HMEKA53 | 296 | 711664 | 1-246 | 15-260 | | |
| HMEKJ43 | 297 | 715893 | 1-367 | 15-381 | H25268, and Z83309. | |
| HMEKS76 | 298 | 767517 | 1-249 | 15-263 | AA505833, and AC006960. | |
| HMEKX51 | 299 | 727154 | 1-302 | 15-316 | | |
| HMEKX89 | 300 | 786055 | 1-70 | 15-84 | | |
| HMELC56 | 301 | 745773 | 1-306 | 15-320 | | |
| HMELQ62 | 302 | 719681 | 1-359 | 15-373 | AA166769, W94197, AA166767, AA460380, T97509, N88106, AI751026, N90626, AA356483, | |
| | | | | | AW34041 1, AW407849, AA446049, W94104, AI814281, AI085368, W01030, AI762027, AI693754, | |
| | | | | | AW001517, AA704878, AI023779, AA166957, AA704992, AF083248, and AC002536. | |
| HMELR10 | 303 | 964629 | 1-322 | 15-336 | AF174601, and AB020682. | |
| HMELS59 | 304 | 720341 | 1-307 | 15-321 | | |
| HMELV19 | 305 | 668665 | 1-266 | 15-280 | | |
| HULAF89 | 306 | 791261 | 1-86 | 15-100 | | |
| HULA137 | 307 | 708923 | 1-160 | 15-174 | AW302954, AW301754, AW268302, AI345477, AW072719, AI336582, AW268122, AI308032, | |
| | | | | | AW301513, AI310575, AW074993, AW302965, AI312152, AW269097, AI344928, AL036980, | |
| | | | | | AI307543, AW301300, AI307708, AW075207, AW301505, AI343037, AI336495, AW268072, | |
| | | | | | AI335208, AI310582, AI307520, AI313320, AI336633, AI345677, AI340582, AI334450, AI312399, | |
| | | | | | AI345608, AW269083, AI251963, AI344789, AW074869, AW071417, AW071380, AW301500, | |
| | | | | | AI348897, AI345471, AI340511, AI344785, AI309401, AL036214, AI334930, AI345745, AI345347, | |
| | | | | | AW075084, AI334889, AI340533, AI349967, AI336513, AI311159, AI348895, AI336654, AI345735, | |
| | | | | | AI343030, AI345562, AI345817, AI349028, AI349637, AI345397, AI349645, AW302973, AW268060, | |
| | | | | | AI312428, AI251221, AI802833, AI345111, AI334445, AI335214, AI345224, AI366992, AI336503, | |
| | | | | | AI307210, AI345739, AI345587, AI307494, AW301375, AI366968, AW072484, AI366974, AI345737, | |
| | | | | | AI366959, AI345736, AI343062, AI343059, AI348847, AI349614, AI349933, A1340664, A1308035, | |
| | | | | | AI349256, AI345253, AI343112, AI345026, AW071412, AW268253, AW071362, AI349598, AI309431, | |
| | | | | | AI312325, AI348854, AI340659, AI335476, AI340627, AI309443, AI334884, AI345251, AI345666, | |
| | | | | | AI345156, AI344819, AI345553, AI366985, AI312143, AI310940, AI349772, AI313352, AI345746, | |
| | | | | | AI349955, AW075093, AI345114, AI307542, AI312357, AI312146, AI312339, AW303075, AI345258, | |
| | | | | | AI307569, AI310920, AI345567, AI307503, AI311604, AI334913, AI251205, AI344808, AI344826. | |
| | | | | | AI336662, AI344260, AI343091, AW301344, AW268221, AI250070, AI345148, AI312165, AW303061, | |
| | | | | | AI307446, AI311892, AI344933, AI343140, AI349276, AI348870, AW268261, AI349937, AI349246, | |
| | | | | | AI802826, AI252023, AW303238, AI310925, AI307454, AI318569, AI348969, AI345674, AI312168, | |
| | | | | | AI345315, AI340644, AI345639, AW071276, AL037521, AI335209, AI336585, AI310606, AI349960, | |
| | | | | | AI345229, AI349787, AW268067, AI348879, AI349269, AI307557, AI344817, AW303160, AI340519, | |
| | | | | | AI335235, AI340603, AI349186, AI318159, AI335449, AI349644, AI344938, AI349971, AI345551, | |
| | | | | | AI345370, AI345527, AI310927, AI349622, AI307578, AL039086, AI349266, AW301459, AI312156, | |
| | | | | | AI336506, AW268220, AI344935, AI335380, AI254251, AI348901, AI349812, AI349004, AI310945, | |
| | | | | | AI345787, AI307736, AI310592, AI307734, AI312264, AI334920, AI349738, AI334452, AI345557, | |
| | | | | | AW071349, AW271119, AI340537, AW301815, AW302854, AI349628, AI349288, AI340610, | |
| | | | | | AI307459, AI349762, AI344779, AI349245, AI613548, AI307456, AI309392, AI344780, Y11587, | |
| | | | | | AF111112, I89947, AR038854, A08913, I48978, X72889, A08916, U80742, A08910, I89931, A08909, | |
| | | | | | 149625, A65341, AF061795, AF151685, AF125948, A08912, AF008439, AF017437, A90832, A77033, | |
| | | | | | A77035, AL080074, AL080124, AL122093, AF113019, AL049452, AF185576, U35846, AF026816, | |
| | | | | | AL137292, AL137463, X82434, AL137550, AF026124, AL110280, AF162270, AF091084, Y11254, | |
| | | | | | U49434, AL133016, AF118094, AL049938, AL117460, AF113689, AL137271, I48979, AF111849, | |
| | | | | | A03736, A58524, A58523, AF113690, L19437, AF067728, AL080159, Z82022, AL110221, AF090900, | |
| | | | | | AF113691, E02221, X53587, AF079763, AJ238278, AL133565, AL050277, AF061943, S79832, | |
| | | | | | AL050024, AF113699, AL137560, AF111851, Y09972, AF113013, AL050146, AF078844, AL137556, | |
| | | | | | AF090934, AF113677, AF097996, U00763, AF087943, Z72491, AF022363, AL137459, U42766, | |
| | | | | | AL137480, X96540, AR011880, AL133067, E03348, AL137557, U67958, AL049314, U58996, Y14314, | |
| | | | | | AL117440, AL049464, AL049466, I03321, AL133640, L30117, AF090903, AF158248, S68736, | |
| | | | | | AL117435, AF061573, E02349, AF183393, A07647, AL050149, AL050116, L31396, AL137533, | |
| | | | | | U68387, AF146568, I00734, AL050092, AL137521, L31397, AL133560, U72620, AF113694, | |
| | | | | | AF090943, E04233, AL137478, AL049430, AF153205, A93350, E00617, E00717, E00778, AF177401, | |
| | | | | | U78525, AF090901, Y07905, AL050393, AL122121, AJ012755, AL137476, AL122123, AB019565. | |
| | | | | | AL133104, AF003737, AF051325, X70685, M30514, AL137648, AJ242859, AL117585, E07108, | |
| | | | | | AF125949, AL110225, AL117394, A12297, AL133606, X63574, AJ006417, U91329, AF057300, | |
| | | | | | AF057299, X98834, AL049300, I33392, X84990, AL122098, AF017152, AL133075, AL133014, | |
| | | | | | X93495, S61953, I42402, AR059958, E15569, AF113676, AF061981, AF090896, AL080148, | |
| | | | | | AL117432, AL122110, AL117583, AL137538, AL133557, S78214, AL133010, X65873, AF032666, | |
| | | | | | AL080086, AF119337, I26207, AR038969, Y16645, S36676, AL049283, AL110196, AJ000937, | |
| | | | | | AL133080, AR000496, AL049382, U39656, AF210052, AC004383, AL117457, E08631, AL023657, | |
| | | | | | AL050108, AL122118, AL133113, AL133072, AF079765, AF104032, AL080060, AR020905, | |
| | | | | | AL122049, AL137283, AL137526, Y10080, AF118064,109360, AL133093, X87582, E05822. | |
| | | | | | AF118070, AL122050, X62580, AF132676, AF061836, AL133098, X92070, AL080127, U96683, | |
| | | | | | A45787, AL096744, AL133077, AL133568, AL080137, AL137527, AL050138, AF106862. AF081197, | |
| | | | | | E08263, E08264, E07361, A93016, A08908, AL117416, AL133665, AL137488, I41145, and E06743. | |
| HULAX31 | 308 | 868930 | 1-205 | 15-219 | | |
| HULBU59 | 309 | 636253 | 1-453 | 15-467 | AA362604, AF150274, AL038735, AI348980, AL048672, AL048673, AL048657, AF150161, | |
| | | | | | AL037601, AI224190, AL038991, AF150181, AL037348, AL038038, AF174394, AR067468, | |
| | | | | | AF100694, AL080096, AF118386, AL049963, AF125570, E04157, and AL080106. | |
| HULBY15 | 310 | 659557 | 1-422 | 15-436 | | |
| HULDF69 | 311 | 754381 | 1-243 | 15-257 | AL134132, AL043003, AL043147, and U46347. | |
| HULFA03 | 312 | 918691 | 1-372 | 15-386 | | |
| HULFB76 | 313 | 767873 | 1-196 | 15-210 | | |
| HUMBE61 | 314 | 838469 | 1-400 | 15-414 | AF150274, AL038735, AI348980, AL048657, AL037601, AL048673, AL048672, AF150161, | |
| | | | | | AL038991, AI613343, AI224190, AI431323, AF174394, AF100694, AL080096, AF125570, AL049963, | |
| | | | | | AF118386, AL080106, AL133076, AL133074, and Y17793. | |
| HUSAY26 | 315 | 527909 | 1-360 | 15-374 | AI858923. | |
| HUSCA57 | 316 | 527800 | 1-250 | 15-264 | | |
| HUSGD26 | 317 | 527799 | 1-347 | 15-361 | | |
| HUSCH45 | 318 | 507197 | 1-354 | 15-368 | AL022323. | |
| HUSCH77 | 319 | 527801 | 1-117 | 15-131 | | |
| HUSGH88 | 320 | 871776 | 1-689 | 15-703 | AI653117, AA922010, AW008076, AI127949, AI655942, AI142458, AI701082, AI608993, W46422, | |
| | | | | | N37061, AI858207, AI273519, AA977111, N24696, AI985411, AA233273, AW137630, N72855, | |
| | | | | | AI919359, AA302412, Z46073, H07031, AA232970, AI742640, and F05394. | |
| HUSGK23 | 321 | 675951 | 1-303 | 15-317 | AW389364. | |
| HUSGL13 | 322 | 575798 | 1-306 | 15-320 | AA776615, AI394186, AI623747, AI473932, AI744215, N48461, N75917, AW272349, AW088808, | |
| | | | | | AI920827, AW081119, and AB011139. | |
| HUSHH64 | 323 | 576459 | 1-434 | 15-448 | | |
| HUSHJ55 | 324 | 576381 | 1-324 | 15-338 | AA985295, AJ012590, and Z98044. | |
| HUSHL83 | 325 | 868883 | 1-335 | 15-349 | | |
| HUSIA38 | 326 | 709472 | 1-421 | 15-435 | AA035379, AI494330, AA035378, AA446855, AA325787, C14480, AA487892, N91747, AW439703, | |
| | | | | | AA700664, AA809787, H16875, W73597, N23062, AA358852, AA206062, AI871691, AW341955, | |
| | | | | | AW408596, AA347237, AA085902, AA368749, AA111870, AA633039, AI680547, AL134167, | |
| | | | | | AI206078, AW151761, AI922850, AP000252, AP000212, AP000134, AP000030, AC005562, Y08864, | |
| | | | | | AC004913, AP000152, AC007298, AC005598, AC005342, AP000563, AC005193, AP000141, | |
| | | | | | AP000088, D87675, AP000133, AP000211, AL096712, AC004834, AC007510, AC006480, AC008115, | |
| | | | | | AC004922, X94912, AP000350, AC007227, AC006014, AC005488, AC007425, AC003109, AC007676. | |
| | | | | | AC002470, AL030997, AL096818, AC002115, AC002365, AF111168, AC005325, AC006120, | |
| | | | | | AL049631, Z84469, AP000227, AL079301, AP000087, AC004893, AC005756, AL117328, AC006130, | |
| | | | | | AC005207, AC002364, AC005940, AC007687, AC002094, AC005821, AC002310, AF016898, | |
| | | | | | AC004659, AC007182, AL049636, AC004962, AL034429, AP000340, AP000156, AP000014, | |
| | | | | | AC006326, Z49258, AC004799, Z69714, AC005365, AC000105, AC002558, AL023553, AL080317, | |
| | | | | | U91326, AC007057, AL049872, AC004032, AC004223, AC004983, U91323, Z98742, AC005899, | |
| | | | | | Z69921, AC003004, Z68326, AF003626, AC000066, AP000692, AC004815, AC003982, AC006343. | |
| | | | | | AC005180, AC007934, AJ010770, AC008154, AC007276, AL121577, AL080243, AC007156, | |
| | | | | | AC012384, Z95331, U95742, AC003665, AC006285, AC005666, AC004216, AC004548, AL049697, | |
| | | | | | AC007546, AC002352, AC002472, AC004383, AL049713, AC005102, AC004765, AL137191, | |
| | | | | | AL049871, Z98949, L78833, AL031680, AC006449, Y10196. AL049759, AC006000, AC003010, | |
| | | | | | AL049539, AC007540, AC006071, AC005264, AC005262, AF045555, AL009181, Z96811, AC005081, | |
| | | | | | AC005S19, AC002477, AC006080, AL049538, AL035079, AL031311, AC007011, AC005736, D84394, | |
| | | | | | AC007308, AC004106, AB000462, AF130343, AD000833, and Z68279. | |
| HUSIA43 | 327 | 575768 | 1-418 | 15-432 | | |
| HUSIF23 | 328 | 862494 | 1-433 | 15-447 | AI350419, AI563971, AI208906, AW198165, AL135224, AA974279, AI223023, AI049928, AI283630, | |
| | | | | | AI097446, AI648516, AI016385, AA324880, AW248808, AI991136, AW085678, AI937038, AI364515, | |
| | | | | | AA709404, AA639864, AW250882, AI160941, AA854011, AL135233, AA552424, AA485734, | |
| | | | | | AA583601, AA769102, AA250968, AA552593, H17500, H98072, H18108, AA678516, H38440, | |
| | | | | | AW190935, R88426, AA765348, R23499, H41112, H50888, W92991, W52172, AA151984, H52131, | |
| | | | | | AA809403, T54339, H46149, AA100930, D29154, D53226, R89522, AA678890, and AL035681. | |
| HUSIS60 | 329 | 727153 | 1-343 | 15-357 | | |
| HUS1W10 | 330 | 963324 | 1-380 | 15-394 | AI193047, AI203647, AA757210, AI130814, AI344478, AA582236, AI288858, AI148643, AI146994, | |
| | | | | | AA524479, W45709, AI168644, AA453739, AA491660, AA730161, AA557746, AI750017, AA927666, | |
| | | | | | W44356, AI610804, AI685002, AI190610, AA652628, AI141208, AA490862, AA025400, AA316493, | |
| | | | | | AI475353, AI859485, AA453820, Z99396, AL038837, AL037051, AL036725, AI859458, AL039074, | |
| | | | | | AA631969, AL039085, AL039564, AL039156, AL039108, AL039109, AL039128, AL039659, | |
| | | | | | AL038531, AL039625, AL039648, AL045337, AL039678, AL039629, AL039150, AL037526, | |
| | | | | | AL039423, AL036924, AL040992, AL042909, AL037726, AL036858, AL039410, AL038447, | |
| | | | | | AL036196, AL037094, AL037639, AL036238, AL045353, AL036190, AL036973, AL038851, | |
| | | | | | AL036767, AL037082, AL044407, AW392670, AL037615, AL039386, AL036117, AL036733, | |
| | | | | | AL037077, AL039440, AL036268, AL039924, AL036418, AL037085, AL038509, U46347, AL037021, | |
| | | | | | AL036998, AL036679, AL037027, AL037178, AL039538, AL036191, AL044530, AL036765, | |
| | | | | | AL037016, AL036719, AW384394, AL037054, AW363220, AL119484, AL036158, AL038821, | |
| | | | | | AL043003, AL036964, AL038520, U46351, AW372827, AL119457, AL119443, AL119439, AL119497, | |
| | | | | | U46350, ALT19319, AL119324, AL119483, U46349, AL119391, AL119444, AL119335, AL119522. | |
| | | | | | AL119418, AL119363, AL119355, U46341, AL119341, AL119396, AL134132, AL134525, AL037205, | |
| | | | | | AL119496, AL134530, AL134519, AL043147, AL134531, AL119401, AL134527, AL134528, | |
| | | | | | AL039566, U46346, AL042614, AL036836, AL134533, U46345, AL119399, AL042984, AL042965, | |
| | | | | | AL042975, AL042542, AL134538, AL042544, AL042989, AL043019, AL043029, AL042450, | |
| | | | | | AI142134, AL042551, AL036808, AL119464, AL036886, AL036774, AR060234, AR066494, | |
| | | | | | AR064706, AR023813, YL1449, Y11447, AR064707, A81671, AB026436, AR054110, AR069079, and | |
| | | | | | Y11458. | |
| HUSJW78 | 331 | 772956 | 1-403 | 15-417 | AI273114, AA661583, AI571094, F29968, N55076, AI281622, AA602664, AA493546, AW023975, | |
| | | | | | AA364147, AA314404, AA159137, AW338633, AA493245, AA015948, AI002863, AI701898, | |
| | | | | | AA010265, AA557508, R79396, H79004, AA807704, AI570067, AA143703, AA837006, R95751, | |
| | | | | | R92703, F25759, AA018258, AA578711, AI921744, AA467740, AA832104, AA935827, AA219166, | |
| | | | | | AA467807, AA525753, AI434103, AI734119, AA640776, AI167715, AA749196, R99617, AI885896, | |
| | | | | | AW023390, AA527633, AA847341, AA629668, AI732720, AI802268, AA601290, AA581317, N55296, | |
| | | | | | AI791659, AA832108, AA730530, AI308529, AA468982, AA584756, AC005182, AL031983, Z83844, | |
| | | | | | AC006137, AC007684, AL096701, AC006487, AC005231, AC005183, AL008582, AC004491, | |
| | | | | | AC003109, AC005527, AC006261, AL031670, AC005821, AC002991, AL033521, AC006449, Z92542, | |
| | | | | | AP000130, AP000208, AC004531, AP001068, U85195, AC005229, AP000247, AF001549, AC007283, | |
| | | | | | AE000658, AC005346, AC008009, AF111167, AL121658, AL031666, AC006006, AC000025, | |
| | | | | | AL096817, AC004099, AL009181, AL117354, AL022238, AC004821, AL021808, AC003102, | |
| | | | | | AC000353, AB023048, AC002039, AJ011930, AL050318, AP000511, AL096712, AC005332, Z86090, | |
| | | | | | AC002477, AC002400, AC009542, AC002404, AF111168, AC006101, AC008372, AC009330, | |
| | | | | | AC005261, AL035659, Z97876, AP000350, AC005920, AL034421, AC005696, AC004687, AC005694, | |
| | | | | | AC005752, AC004895, AL031848, AF038458, AC005355, AL034400, AC007388, AC007066, | |
| | | | | | AC007041, AC005202, AC005914, AL122020, AF207550, AP000961, AJ246003, AC002464, | |
| | | | | | AF015720, AP000036, AC005529, AL049694, AC005200, AC006430, AL133312, AC000159, | |
| | | | | | AL008725, AC003006, AL117694, AL121595, AL136504, AC008125, AC005049, AC005071, | |
| | | | | | AC004883, AC006450, AL109627, AC007021, AC005632, AC006509, Z97056, AC002554, AL031280, | |
| | | | | | AF109907, U91326, AC005323, AD000092, AC006088, AC005488, AC006581, Z98949, AC003684, | |
| | | | | | L44140, AC004448, AF053356, AP000555, AC004000, AL024498, AC004526, AL020997, AC006538, | |
| | | | | | AL121655, AC008044, AC005280, AC006121, AC002312, AC006162, AC004134, AL139054, | |
| | | | | | AC005859, AC009501, AL031005, AC005921, AC002996, Z95114, Z82248, AL034420, AC004659, | |
| | | | | | AC006468, AC006946, AL132992, Z98044, AC005041, AC004792, U96629, AC009516, AL049764, | |
| | | | | | AC004148, U52112, AC002126, AJ229041, AL049569, Z97352, AC004522, AC002504, AL049757, | |
| | | | | | AC007382, AC006080, AL021397, AC005089, AC004859, AL049761, AD000812, AC004896, | |
| | | | | | AL080317, AP000359, AC005011, AC007536, Z69837, AC010849, AL132987, AC006441, AC020663, | |
| | | | | | AC005519, Z85986, AL049538, AC003101, AF196779, AC004049, AC006014, AC007993, AC004815, | |
| | | | | | AC005971, AC004383, Z82195, AC004771, AL022329, AC005225, AC002094, AC005755, and | |
| | | | | | AC008101. | |
| HUSK176 | 332 | 914084 | 1-425 | 15-439 | AI805657, AW105425, AI684850, AA609319, AI445561, AW087416, AI569649, AI052449. | |
| | | | | | AW005296, AI884876, AI683390, AI821774, AI857542, AI375889, AI498223, AI937172, AI052455. | |
| | | | | | AI126807, AI276854, AW300679, AI148078, AI812099, AI079310, AI301571, AI832389, AA448176, | |
| | | | | | AA634578, AA813907, AI159912, AA583197, AI081042, AA130045, AA960856, AA781740, | |
| | | | | | AA078817, AI500194, AA037280, AA757372, AA577413, F17150, AA604543, A1694019, AA405506, | |
| | | | | | AI025798, AI127345, AA889088, H78344, T50735, AI814129, AA002152, AA625807, AI352262, | |
| | | | | | T23478, AI280471, AI240763, AW004806, H26970, H14637, AA933720, F03913, AA203660, | |
| | | | | | AW327749, AA715028, M78972, M78956, AW074558, F36821, AA428254, AA427399, AI475077, | |
| | | | | | F29918, T98945, R11215, R46235, R85210, F29924, AA878694, AA865297, AA910724, AA132925, | |
| | | | | | R11273, AI147818, AA844613, AA564700, AA653527, AI214070, AW151132, AL042686, AA580663, | |
| | | | | | AI432644, AI623302, AI431307, AI866786, AI431316, AI431238, AI955221, AI358271, AI440260, | |
| | | | | | AI537677, AI494201, AI804505, AI500659, AI815239, AW058275, AI866465, AI815232, AI866691, | |
| | | | | | AI801325, AI500523, AI538850, AI887775, AI582932, AI872423, AI590043, AI284517, AI923989, | |
| | | | | | AI500706, AI491776, AI445237, AI926593, AI289791, AW151138, AI421662, AI889189, AI521560, | |
| | | | | | AI500662, AW151974, AI285417, AW172723, AI539800, AI284509, AI582912, AI538885, AI889168, | |
| | | | | | AI440263, AI927233, AI866573, AI633493, AI434256, AI866469, AI434242, AI805769, AI888661, | |
| | | | | | AI500714, AI284513, AI888118, AI285439,AI859991, AI436429, AI355779, AI889147, AI623736, | |
| | | | | | AI581033, AI371228, AI491710, AI440252, AI440238, AI567971, AI860003, AI610557, AI242736, | |
| | | | | | AI539260, AI828574, AI887499, AI539781, AI889191, AI539707, AI702065, AI654286, AI885949, | |
| | | | | | AI285419, AI559957, AW089557, AI696583, AI521571, AI469775, AI866581, AI567953, AI815150, | |
| | | | | | AW074057, AI446495, AI867068, AI952433, AI225248, AI798359, AI698352, AI282249, AI890907, | |
| | | | | | AI371229, AW084105, AI687944, AW194509, AI431315, AW151979, AI868931, AI924051, AI539771, | |
| | | | | | AI872315, AI866458, AI687588, AL047422, AI540354, AI371251, AI889157, AI866510, AA829775. | |
| | | | | | AI620864, AW151136, AI866461, AL047398, AI923046, AL042655, AW406745, AL039390, | |
| | | | | | AI432666, AI561170, AI567954, AI469764, AI690946, AI648567, R20540, AI433157, AI932620, | |
| | | | | | AA853473, AI249936, AI049859, AW029457, AL048403, AI362495, AL047611, AI799313, AI309306, | |
| | | | | | AI801286, AI554821, AL045166, AI888022, AI433011, AI521596, AW129310, AI371243, AW151970, | |
| | | | | | AL046681, AL039287, D50913, AL031732, AC003042, AR050959, AL133084, AL133070, AL049423, | |
| | | | | | U30290, AL133047, AC002540, AL133053, AL133607, AL133049, AC004213, Z93784, AF124728, | |
| | | | | | AF032666, L30117, E13998, X97332, A77033, A77035, AL133655, AL133076, AF081571, AL033523, | |
| | | | | | AC007012, AR038854, AF090940, AF090432, AL034417, AC007114, Z82206, AC005968, AC007172, | |
| | | | | | A41579, X83544, E12580, AL133015, AL133608, AL133088, AL122101, AR034821, I89947, | |
| | | | | | AL133665, AI8777, X82434, AL133619, I48978, Z82250, AC006221, AL034374, AC002416, | |
| | | | | | AC009113, AF206503, AF095901, AC005886, X98066, AF044323, AF139986, AF162270, A08910, | |
| | | | | | AL080124, A08909, AL122049, A65340, D83989, I42402, X63162, AJ005870, AL117435, AC002538, | |
| | | | | | AL031656, AL022723, A08908, S59519, AL122118, S77771, AC002564, AC006203, AF000167, | |
| | | | | | AF003737, AF003738, AR015970, D38178, U69730, U95739, AC005353, AL096776, AC005250, | |
| | | | | | AP000020, AP000161, AC005091, AL122021, AL022147, AC005048, AC004686, Z94277, AL022722, | |
| | | | | | AC004066, AC006S0T, AC008067, AC004057, AC018767, AC006222, AC008014, AC007056, | |
| | | | | | AC006112, AC005291, AC007298, U66059, AF002985, A65341, AP000458, Z98744, Z49216, | |
| | | | | | AL117587, AL050138, AF008439, AC005815, AF053356, AE000664, A86558, AF215669, AC007748, | |
| | | | | | Y14314, AL110228, X66366, AL133051, X83508, AL133623, AC006373, AL034376, S70057, | |
| | | | | | AL110280, AP000208, AP000T30, AP000247, Z83840, AL049557, AL031274, AL020994, AC004690, | |
| | | | | | AL137530, AL137574, AF172400, M64936, Z49258, U89335, AL080245, AC004989, AC006336, | |
| | | | | | L05367, AG002301, AC003977, AL034400, AC007877, AL136520, AC002531, AL031054, AC007392, | |
| | | | | | A21103, X00474, AL137478, A76337, Z13966, AF183393, AF026008, X93328, I48979, AF116573, | |
| | | | | | Z98036, AL049742, AC006944, AP000697, AC005411, AC004554, AF013214, D44497, E03168, and | |
| | | | | | X70514. | |
| HUSXK92 | 333 | 848959 | 1-474 | 15-488 | AA081241, AW014362, AW262136, R82455, AW058401, AI422211, AI394480, AA983672, AI342274, | |
| | | | | | W35127, AA181256, AI246708, AA411749, AI291504, AI417724, AI304761, AI952055, AI653254, | |
| | | | | | W02704, AI348150, AI242604, AI284964, W20374, AI318380, AI699314, AI933232, AA676646, | |
| | | | | | AI249266, AA063542, AI167529, AI648485, AA908300, C00986, W25658, AA384416, AI535997, | |
| | | | | | AA410298, N70938, AA410480, and AA411748. | |
| HUSXO30 | 334 | 973266 | 1-540 | 15-554 | AA421248, AA706819, AI831655, AW001127, AI659943, AI936705, AA482102, AI601264, | |
| | | | | | AA609988, AW157288, AI249746, AI673452, AA100758, AI168496, AI334090, AA291557, AI300503, | |
| | | | | | AA838311, AI032723, AI446090, N92238, AA548418, AA458972, AA723811, AI243467, AI608877, | |
| | | | | | AI720973, AI744302, H99292, AI762325, AI445510, AI248324, AI354517, N33480, AA999919, | |
| | | | | | AI080097, AA837993, N26709, AI299967, AA459641, AW406362, AA523728, AI076417, W86074, | |
| | | | | | AI222030, AA699459, AI052485, AI149225, AI018107, AI091825, AA961603, AA464265, AI983959, | |
| | | | | | AI356935, AW263743, AI762657, D53076, AW070434, AA304075, R54623, AA484009, AA953293, | |
| | | | | | AA806590, AA835477, AI309964, AA481610, AA464376, AI086019, W42436, AA641534, AA533309, | |
| | | | | | AA303091, AI523186, AI969104, AA550930, AA506454, AA479918, AW182773, T57831, AA459188, | |
| | | | | | AI077915, H78028, T40539, R81765, AA065082, AI248883, D30930, H67864, W42839, AW238626, | |
| | | | | | AI278707, AA373915, AI749543, AA502726, AW068093, AA508653, AA480137, AW015934, | |
| | | | | | AW338581, H67188, AI673126, AA514511, H46429, H178027, AA878251, AA952963, AA352423, | |
| | | | | | AA428506, N55859, AI381737, T63660, AI419779, AA496458, H52178, AA658417, AA303090, | |
| | | | | | AI286174, H25782, N43871, AW407913, AA758370, AA494208, AA552063, AI991234, AA961889, | |
| | | | | | AA301776, AI609606, AA506757, AA370233, AW132067, AI654782, AA459415, W42551, H25788, | |
| | | | | | AI434926, AA364016, AI866432, AI078057, AI825290, D81186, AA314590, AA291876, AI720956. | |
| | | | | | AW103581, AA532661, AA353183, AA853831, AA481544, AA595944, AI468311, AA897049, | |
| | | | | | AA151954, R71996, R54886, AA327953, AA371679, T82388, AA860424, AI128633, H52592, | |
| | | | | | AA100822, AW170175, W42749, AA285031, AA331050, H19087, AA938023, H28635, N34590, | |
| | | | | | AA373337, N25824, AI922550, AI887381, AL121286, T30322, AW161202, AA916133, AA825548, | |
| | | | | | AA908294, AI690738, AI870192, AW025279, AI565172, AA464646, AW162194, AI559752, | |
| | | | | | AI114703, AW020419, AI500714, AI554343, AL079963, AI537076, AI285439, AW104056, AA975952, | |
| | | | | | AI433611, AW020693, AI494201, AI539800, AI801325, AW163834, AA828415, AW366372, | |
| | | | | | AW082532, AI805688, AI491710, AI289791, AI524652, AI382670, AI357049, AW129117, AW163554, | |
| | | | | | AW071349, AI812003, AW162189, AI933992, AA761557, AA808175, AI656270, AI310575, | |
| | | | | | AI633061, AL046466, AI340533, AA279795, AI345396, AI445620, AL039858, F27788, AI333104, | |
| | | | | | N99092, AI537863, AI309306, AL037454, AI813986, AI499570, AA127565, AW022636, AW021717, | |
| | | | | | AW089844, AI539723, AA806719, AI973236, R65859, AI590043, AI690813, AW262983, AI586931, | |
| | | | | | AF031147, Z82022, X80340, AL133665, AF017437, AL117416, U96683, E01314, A18777, AJ242859, | |
| | | | | | I32738, AL133049, AF000301, I89947, E04233, A08913, AR038854, L19437, Y11587, AL110296, | |
| | | | | | AL050116, A08912, AL137556, I48978, A93350, AJ005690, X96540, U92068, AF132676, AF061836, | |
| | | | | | AF106697, A45787, AF057300, AF057299, S76508, AL137530, AL133619, A65341, A77033, A77035, | |
| | | | | | E12806, AF026124, A23630, AF032666, Z97214, A08910, AL133067, A08909, A08907, I89931, | |
| | | | | | A65340, A08908, AF113676, AF106657, S77771, AF091084, I49625, AL122100, I09499, AL080126, | |
| | | | | | AJ006417, AF115410, AL137271, M86826, AF047716, E06743, M27260, AF061795, AF151685, | |
| | | | | | X72889, AI5345, A08911, I89934, AL133558, X63410, AL137276, AL080154, AF183393, AL117460, | |
| | | | | | AL117578, X57961, AF106862, AF000145, AF008439, A58524, A58523, I79595, AF002985, | |
| | | | | | AL080086, AF119337, AF110329, AL110221, AL050148, AF081197 AF081195 AF114170 | |
| | | | | | AF036941, AL122106, AF195092, AL096751, AF079765, S54890, AJ001838, X06146, Y11254, | |
| | | | | | AF038847, AL133062, AL050155, AF030513, AF002672, AR034821, I00734, X66862, Y10823, | |
| | | | | | AL117463, A08916, AF159615, AJ238278, AF090903, AL023657, U00686, I66342, AF040751, | |
| | | | | | E00617, E00717, E00778, AJ003118, AL137660, AL137495, AL122093, X67813, AL137641, U35846, | |
| | | | | | AJ012755, X83508, I68732, D83032, AL049324, A07647, AI2297, AF026816, AF012536, AF118094, | |
| | | | | | S36676, AF215669, AF107847, E01812, AF111849, AL117649, Z37987, AL133075, AL110158, | |
| | | | | | X57084, AF125948, AF044323, AF061981, E02221, AL133112, AL137479, AL137537, I89944, | |
| | | | | | AR020905, X66871, AL049460, A76337, I33392, AR029490, AL137640, AF153205, AF017790, | |
| | | | | | AL133016, U37312, AF177401, AJ010277, AF004162, AL050138, AL133010, D16301, N492439, | |
| | | | | | AF055917, Y08769, AF111112, AF162270, AF113019, E03348, X87582, E05822, E03349, L13297, | |
| | | | | | AF069506, X84990, AL122098, U57352, A90832, X72387, U80742, S79832, AL137548, L04504, | |
| | | | | | AF022363, U89295, AI8788, E12747, L04849, AL080159, AL137560, AF115392, AF017152, | |
| | | | | | AL137281, U87620, AL137256, AL049452, AF185576, AL122118, AL117435, AB008792, AF061573, | |
| | | | | | U77594, AB008791, AL110280, AR053103, I29004, AL133560, AB019565, AF067790, AR013797, | |
| | | | | | AF028823, AF126247, AF175903, AF090943, AF097996, AF067728, AL137478, Y10936, AL049430, | |
| | | | | | AF051325, AL137258, E02349, X63162, AF176651, U55017, X67688, AL080162, AL117440, U78525, | |
| | | | | | Y07905, U42766, E01614, E13364, and U51587. | |
| HUSYA63 | 335 | 928021 | 1-428 | 15-442 | AA909334, AI056548, AA723669, AA156125, AA303333, AW409843, AW263540, AA 156120, | |
| | | | | | AA157141, and AA151564. | |
| HUSYB16 | 336 | 868843 | 1-423 | 15-437 | AC008975. | |
| HUSYD15 | 337 | 699195 | 1-401 | 15-415 | AI264637, AW440517, AA045417, AA308065, AA127626, T96809, W39584, F22528, AA304050, | |
| | | | | | AA082078, AI333981, AI087224, AI289816, N32838, AI042559, AA513003, AA716353, AA121528, | |
| | | | | | AA302332, AI208270, W44935, AI805206, AA112905, AI024761, AA677140, AI087291, AA448463, | |
| | | | | | AA101212, AA704993, AI097092, AA704961, T97914, T97458, AA203274, R09226, AA045311, | |
| | | | | | AW451722, AI685445, N42284, AA062780, T97730, AI094396, AA932240, AA973273, AA062735, | |
| | | | | | AA331180, T96692, AA431571, AI309788, AI248836, AI911056, and AI086794. | |
| HUSY046 | 338 | 868827 | 1-433 | 15-447 | T96489, AI820673, T96482, AI732251, T96405, and T96398. | |
| HUSYP67 | 339 | 575787 | 1-105 | 15-119 | AW008247, F03615, H14592, H16768, AC007425, AP000519, AB023056, AF055066, AL049869, | |
| | | | | | AC004172, AC004192, AB023058, AP000521, AL022723, and AC003001. | |
| HUSZV72 | 340 | 851170 | 1-398 | 15-412 | N79736, AW149788, AA187127, and AB011095. | |
| HUSZH03 | 341 | 922852 | 1-785 | 15-799 | R36618, R82444, R26337, and AC006443. | |
| HUSYX03 | 342 | 922840 | 1-398 | 15-412 | H14379, R44811, H08865,F03387, and AL135783. | |
| HUSYO86 | 343 | 784691 | 1-443 | 15-457 | AI373275, T89685, AI718639, AA041276, R89363, AI192953, W80851, AW262845, AI861933, | |
| | | | | | AI913971, AI810948, AI524062, AI970561, W23739, W35338, AA652221, H39865, AI871006, | |
| | | | | | AI122618, AA197299, C75047, AA004293, AA594157, AP000356, AL031005, AC003684, AC006160, | |
| | | | | | AL022721, AL109963, AL031003, AL035684, AC004678, U91323, AL022476, AC006312, Z78022, | |
| | | | | | AC004983, AF001552, AL034548, AF135025, AL049569, AF047825, AF196969, AC007546, | |
| | | | | | AC005412, AL050307, AC005280, AL050318, AL109758, AB023049, AC003043, AC006965, | |
| | | | | | AC005914, AC005529, AC005746, AC003950, Z93930, AC003104, AL035086, Z92542, AL035413, | |
| | | | | | AC005324, U91318, Z95331, AL133448, AL035455, AC007842, AC002350, AF067844, AC003003, | |
| | | | | | AC004821, Z98044, Z85987, AC005482, AP000563, and AC007021. | |
| HUSYN33 | 344 | 651293 | 1-450 | 15-464 | R42079, AI215849, AI860946, AI024831, AI095766, AI523478, AW168267, AI554112, AI333039, | |
| | | | | | AW263148, AI199955, AI708228, AA909572, AW264918, AI568327, AA936422, AA251096, | |
| | | | | | AA010338, AA133384, AA731460, AA557232, AA058742, AA085448, AI097188, N52329, AA608709, | |
| | | | | | AA031496, AA018410, AI123990, AI124972, AA416589, AI961604, N64588, R68411, R52688, | |
| | | | | | AA593634, AI289991, AI284433, R51734, AA442321, AA975850, AA861668, R23934, AI735426, | |
| | | | | | AI523604, AW317004, AA227638, AI263691, AA480016, AI699675, AW377524, AI499248, | |
| | | | | | AI273115, AA889622, C01392, AA621372, R68066, AA377337, Z40503, W19549, F01878, AI203798, | |
| | | | | | F01877, H88553, N24559, AA214352, AA085784, AW006661, AA814174, Z19952, AI955892, | |
| | | | | | AL048323, AL048340, AL043152, AW157096, AI041393, AI954721, AI074008, AA830839, AI085582, | |
| | | | | | AL046944, AI682932, AI266652, AW167328, X68497, AJ001202, AF129131, AL137478, AJ003118, | |
| | | | | | and AF131821. | |
| HUSYN11 | 345 | 943237 | 1-348 | 15-362 | AI570590, AW391281, AI524309, AW103371, AI868831, AI687375, AI567351, AI538716, AI680113, | |
| | | | | | AI281779, AI433976, AI568870, AI673256, AI366549, AI753683, AL119791, AW162071, AI866002, | |
| | | | | | AW074869, AI497733, AI682841, AI952114, AW169653, AW071349, AL036759, AL036146, | |
| | | | | | AI340582, AI521012, AI349614, AI859733, AI343112, AI349645, AI349598, AW274192, AW074993, | |
| | | | | | AI800453, AI800433, AW238730, AI702406, AI498579, AI349004, AI349772, AI312152, AI349937, | |
| | | | | | AL040243, AW068845, AI349933, AI590128, AI866608, AW301409, AL135661, AL036980, | |
| | | | | | AL119049, AI500553, AI433157, AI863014, AW148320, AI500077, AL045903, AI249257, AL036396, | |
| | | | | | AL038605, AI275175, AI432813, AI492540, AW071417, AI857296, AW268253, AI702433, AI345735. | |
| | | | | | AI564719, AW089572, AL047763, AI309401, AI620284, AW302965, AA613907, AW195957, | |
| | | | | | AI583316, AL045500, AL036274, AI349256, AI687362, AI636456, AA640779, AI873731, AW301300, | |
| | | | | | AI636445, AI568854, AI758437, AI678302, AI969567, AI633419, AI679724, AL036802, AW269097, | |
| | | | | | AI690835, AI282655, AI343059, AL046849, AI597918, AI250293, AI686926, AI281773, AW303152, | |
| | | | | | AI608667, AA938383, AI906328, AI439087, AI813914, AI285735, AI340519, AL121270, AI348897, | |
| | | | | | AI224992, AW235035, AI889203, AL038779, AI499463, AI567632, AI866887, AI679764, AI823670, | |
| | | | | | AI671679, AI064830, AL047042, AW117882, AI440426, AI334902, AL119748, AL121365, AI307466, | |
| | | | | | AI969601, AI687728, AL038778, AL120736, AI349226, AI493248, AI597750, AI570384, AI921379, | |
| | | | | | AI699857, AA572758, AI475134, AI690751, AW268072, AI625079, AI613017, AL120854, AI540832, | |
| | | | | | AI635461, AI631107, AI800411, AI818683, AI499393, AI610645, AI745485, AI445432, AI815383, | |
| | | | | | AW302992, AL048871, AI436456, AA508692, AI207510, AI307558, AI920968, AI909662, AI434281, | |
| | | | | | AI687376, AI934036, AI469532, AI889839, AI610307, AI866780, AI580190, AW149287, AI345111, | |
| | | | | | AL040169, AI697137, AW071412, AI564247, AI874109, AI475371, AI439745, AI609592, AI269696, | |
| | | | | | AW166645, AW167776, AI500659, AI811845, AI283941, AI919058, AI628205, AI631057, AI446606, | |
| | | | | | AI687415, AI539771, AA493647, AI818206, AI580984, AI683684, AW080838, AI799199, AW075351, | |
| | | | | | AI312542, AI799305, AI754897, AI569616, AI909666, AI624668, AW118557, AI811863, AL036260, | |
| | | | | | AI907070, AA528491, AL047041, AA585422, AI149592, AI802542, AI620868. AW026882, | |
| | | | | | AW085799, AL038604, AW005858, AI922665, AW132121, AW087445, AI888953, AL043326, | |
| | | | | | AI282281, AL042753, AI696846, AI696398, AW193134, AI811509, AI432229, AI318280, AW183130, | |
| | | | | | AI273142, AI818977, AI598061, AL121014, AW002342, AL036247, AI499131, AI609580, AI922901, | |
| | | | | | AI569583, AL036240, AI431424, AB007963, I48979, AF118070, AL049452, AL049938, A08916, | |
| | | | | | I89947, AF113676, AF125949, S78214, AF090934, AL110221, AF078844, AL133606, A93016, | |
| | | | | | AF118064, AL080060, Y11587, AF113694, AF104032, AL050146, AL137527, AF113013, AJ242859, | |
| | | | | | L31396, L31397, AL133640, AR059958, AL133016, S68736, AF090901, AF090903, AF090943, | |
| | | | | | AF113691, AL117457, AL050393, AF113690, AF113689, AL110196, AL117460, A08913, AF090900, | |
| | | | | | AL050149, I89931, AF090896, AL122050, AL050108, X84990, U42766, AL050116, AL049466, | |
| | | | | | AF106862, AL133075, AL049314, AB019565, AF113677, AF017152, AL133557, AF113019, I48978, | |
| | | | | | I49625, AL122123, AF158248, AL080124, AL133093, AL050277, AL080137, AL122093, E03348, | |
| | | | | | AL096744, AL137557, AFT 13699, AJ238278, AL133565, AL122121, AL133080, AL117585, E07361, | |
| | | | | | AL117583, AF125948, AL137283, A08910, AL110225, X63574, AL117394, AL050138, AL049464, | |
| | | | | | AL137459, AF146568, AF091084, Y16645, AFT 11851, X82434, AJ000937, AF017437, Y11254, | |
| | | | | | AL137550, AL133560, AR011880, A65341, E02349, AF177401, AF079765, A08912, E07108, U91329, | |
| | | | | | A08909, AL049430, X93495, AL049300, U72620, U00763, A58524, A58523, AL137463, AF118094, | |
| | | | | | U80742, X70685, AL049382, AF183393, AL117435, X96540, AL137648, AL122098, AL133113, | |
| | | | | | X65873, AL137538, AL080127, X72889, Z82022, A12297, I03321, I09360, AF097996, A77033, | |
| | | | | | A77035, AL137271, U35846, AL050024, I33392, E15569, AL122110, I26207, A03736, AL080159, | |
| | | | | | AF087943, AF067728, E08263, E08264, X98834, U67958, AL122049, I42402, AL137521, AL133077, | |
| | | | | | AL133014, AF061943, AL137556, AL049283, AL133072, AL121603, AL110197, AR038969, | |
| | | | | | AC004690, S61953, AC006840, AF153205, AL133568, AF111112, AC007298, AR000496, U39656, | |
| | | | | | Y14314, AC006336, AJ012755, AF119337, AC007390, AL096776, AL137560, A90832, AF026816, | |
| | | | | | AC005488, AF026124, AL110280, AF003737, AF162270, AL133098, A93350, U58996, AC004987, | |
| | | | | | AC006371, AF000145, AL133104, AL137526, E08631, AF185576, U96683, A45787, AL117440, | |
| | | | | | AL137476, A08911, AL080074, L30117, M30514, Y09972, X83508, AR038854, I17767, I00734, | |
| | | | | | E02221, AF057300, AF057299, AL133067, AL050172, AF079763, AC004200, A07647, E00617, | |
| | | | | | E00717, E00778, X87582, Z72491, U66059, AL035587, AF051325, AF132676, AF061836, AF095901, | |
| | | | | | AF109906, X92070, U68387, AJ006417, AC006222, E04233, E05822, AL137523, AC002467, | |
| | | | | | AF091512,AF111849, I41145, AF106827, and X53587. | |
| HUSYM49 | 346 | 723015 | 1-257 | 15-271 | AA525157, H54430, AI370548, N68565, I91791, AC007263, AC007676, AC004616, AC005089, | |
| | | | | | AC005225, AC004757, AC002550, AC006966, AC004531, AC006441, AC005412, AC002485, | |
| | | | | | AC002044, AL020993, AC002073, AC005792, AC005338, AC005015, Z84487, AL079342, L44140, | |
| | | | | | AC006121, AC004890, AC007934, AC003035, AC004587, AC002350, AC007279, AL121653, Z93023, | |
| | | | | | AC005049, X55448, AF11168, AC006120, AC004865, AL049712, U91323, Z94161, AL109963, | |
| | | | | | AB015355, AC003037, AC008115, AP000512, AP000553, AC005666, Z83822, AC006511, AC007226, | |
| | | | | | AL049795, AL080243, and AP000691. | |
| HUSYM37 | 347 | 464221 | 1-324 | 15-338 | AI251034, AI251203, AI251284, AI250552, AI251944, AI349748, AI284543, AI354397, AW268231, | |
| | | | | | AL046746, AW303098, AI345629, AI307588, AA469327, AI345394, AI250577, AA837715, AI223626, | |
| | | | | | AI254770, AI225179, AI271217, N69399, F25761, AI267823, F33126, T52745, AI246061, F23326, | |
| | | | | | AI754105, AI755214, AI249853, AC004560, AC007358, AC005479, AC004030, AL031280, | |
| | | | | | AC005777, AC006126, U91323, AC007792, AC005332, AC005900, AC005632, AC002389, AL035461, | |
| | | | | | AC006930, AC002044, AC004125, AF207550, AF111169, AC005765, L78810, Z98044, AC005264, | |
| | | | | | AC005620, AC005952, AC003070, Z97832, AC003101, AC002492, AC002350, AL121603, AC002299, | |
| | | | | | AC003007, AC002303, AC002045, AC005778, AC005305, AL049749, AC004841, AL008583, | |
| | | | | | AC004382, AC000039, AC005291, AC004821, AC004832, AC008372, AL022315, AC004887, | |
| | | | | | AL035683, AL031595, AC002352, AC002316, AC000070, AC004517, AL035684, AL049538, | |
| | | | | | AL034423, AC008040, AC005562, AL023879, AC005335, AC004112, AC005775, AC003684, | |
| | | | | | AL035659, AL049712, AC005578, AC004525, AC005197, AC006125, AC007193, AC005880, | |
| | | | | | AL136295, AL022323, Z98752, AC004703, AC003982, AC002375, AL023807, AC000026, AC007934, | |
| | | | | | AC006952, AF196779, AC007191, AC004967, AC005177, AC007878, AC004938, AC005480, | |
| | | | | | AC005786, AC003957, AC005157, AL031283, AL022316, AL109939, AC002477, AC003664, | |
| | | | | | AP000142, AC00501S, L47234, AF002223, AC010205, AC006079, AC005913, AC004671, AC005944, | |
| | | | | | AL050317, AC004032, AL008735, AC003026, AC005210, AL031289, AC004685, AF001548, | |
| | | | | | AC002544, AC000063, AL022314, AL021528, U91326, AL049576, Z92547, AL021391, AC004851, | |
| | | | | | AC004885, AF123462, AL034429, U91318, Z83851, AC002070, Z93017, Z97987, AL021155, | |
| | | | | | AL049871, AC005790, AC006312, AL034430, AL035588, AC005779, AL049759, AC005932, | |
| | | | | | AF047825, AC004104, AC007386, AC005839, Z86090, U80017, AC016831, AC004216, AC005339, | |
| | | | | | AC004584, AC002072, AC004067, AC005668, AC006071, AL020993, AL117694, AF107885, | |
| | | | | | AC005821, AC002554, AL035685, AL109628, Z81369, AC004024, AL031585, AC005520. AC005488, | |
| | | | | | Z85994, U62293, AL050307, AC004983, AC005764, AC005031, AC005355, AC000353, AL035089, | |
| | | | | | AC002467, AC007073, AL022324, AL022476, AC007226, Z85996, AL049611, Z97056, AF001549, | |
| | | | | | AC006511, AC005859, AC006013, AC004973, AJ003147, AL079295, Z83826, AC002511, AC007425. | |
| | | | | | AC003956, AC006531, AC007052, AL031284, AC005594, AD000092, Z83840, Z86064, AC006023 | |
| | | | | | D87675, AC005822, AC003010, AC005011, AC005722, AC002059, AC008041, AC004590, AC006014, | |
| | | | | | and AC002378. | |
| HUSY113 | 348 | 657288 | 1-802 | 15-816 | N25018, H98802, AW294590, AA553572, AW236050, AI268116, AA777178, AA417117, AW236049, | |
| | | | | | AA463827, and AA445940. | |
| HUSYG24 | 349 | 677258 | 1-662 | 15-676 | N63953, N40973, H23529, T78668, F08173, Z44774, F08664, and F08221. | |
| HUSYF74 | 350 | 554723 | 1-465 | 15-479 | AA688133, W15472, AA603105, AA773036, H05310, AI242746, AI279200, AI573250, T03740, | |
| | | | | | R38903, AI342482, AI818093, AI221800, AA577570, AI285452, AA872045, T03417, W04515, | |
| | | | | | AI758880, AL041772, AI539153, AW102785, AL039086, AW023590, AL038505, AW161579, | |
| | | | | | AW071417, AI634224, AW238730, AL079963, AI358701, AL041150, AI635067, AI344785, AI567582, | |
| | | | | | AI349645, AI284517, AI923989, AL119836, AL042538, AI345608, AI921379, AI446606, AI312428, | |
| | | | | | AI812080, AI436429, AL110306, AI345471, AI612759, AI929108, AI872910, AW161156, AL120853, | |
| | | | | | AI521012, AI627988, AW089179, AL121328, AL036403, AI874166, AA580663, AI670009, | |
| | | | | | AW059828, AI635942, F27788, AI625589, AI567351, AL048656, AI348897, AW082113, AL119791, | |
| | | | | | AI567993, AI815232, AW302965, AL038605, AA640779, AI340603, AA613907, AA572758, | |
| | | | | | AI950892, AW068845, AI923370, AI612920, AI783504, AI499285, AI620284, AI859464, AL119863, | |
| | | | | | AI445992, AI537244, AI538342, AI866770, AI433157, AL036631, AW188539, AI702073, AI538829, | |
| | | | | | AL049085, AI340511, AW269097, AL036396, AI269580, AI499986, AI174819, AI500061, AI689420, | |
| | | | | | AI251830, AI288285, AI633125, AI345347, AI310575, AI698391, AI251221, AI801325, AI500523, | |
| | | | | | AA493647, AI915291, AI582932, AL121365, AI500706, AI340533, AW026882, AI521560, AI889189, | |
| | | | | | AI500662, AI343059, AI345745, AI284509, AI312542, AL041220, AI866573, AI830029, AI343091, | |
| | | | | | AA833760, AW022682, AI866798, AI888661, AW403717, AI340627, AI308032, AW074993, | |
| | | | | | AI349933, AI349614, AI431424, AW022699, AI343112, AW193134, AW302992, AW105601, | |
| | | | | | AI919345, AL036980, AI686906, AL047422, AW268253, AI862144, AW301300, AI567612, AI349598, | |
| | | | | | AA225339, AI440263, AI890806, AL036664, AW075207, AI349256, AI554821, AI589267, AI312152, | |
| | | | | | AI636719, AI955906, AI345735, AW268072, AW075084, AW191003, AI950664, AI468872, | |
| | | | | | AW152469, AI698427, AI349937, AI499920, AI364788, AW089572, AI334884, AI335426, AI348777, | |
| | | | | | AL036274, AI307708, N71180, AI312325, AI500659, AA641818, AL038445, AI890507, AA579232, | |
| | | | | | AI933589, AI313320, AI089748, AI612885, AL134999, AA494167, AI432040, AI863321, AI609911, | |
| | | | | | AI445990, AW020693, AI307520, AL036638, AW074869, AI445237, AW151138, AW243886, | |
| | | | | | AI312146, AI312339, AI345258, AI889168, AL040241, AA508692, AI745713, AI434256, AW151136, | |
| | | | | | AW150578, W33163, AW195969, AW020419, AW163834, AI866608, AL048644, AW050522, | |
| | | | | | AI570807, AW081255, AI471361, AL045500, AI267502, AL036802, AI457113, AI343037, AI862142, | |
| | | | | | AI174394, N71199, AI866002, AL038959, AL036214, AI784230, AI679724, AI446373, AI340582, | |
| | | | | | AW073898, N33175, AL134259, AI539687, AI345737, AI537677, AB002372, A08916, X62580, | |
| | | | | | A08910, I89947, A08909, X92070, A08913, I48978, AL122050, X70685, AL137459, AF113691, | |
| | | | | | AL117460, AL137658, I89931, I49625, AF113690, I48979, AI2297, AF061943, AR011880, AL080060, | |
| | | | | | AL110196, AR038854, AF177401, AL049430, S78214, AL133568, Y11254, ALT17583, AF090901, | |
| | | | | | AL133113, AL133565, AF026816, E03348, AF017437, A65341, AR059958, AL110221, AF125948, | |
| | | | | | AL133077, AF158248, AL050108, AF113013, X93495, AL133606, A58524, A58523, AF078844, | |
| | | | | | AF118094, AF097996, AL133640, I42402, AF111851, E08631, AF113676, AL137527, AL133093, | |
| | | | | | U00763, AL137557, I33392, E02349, AL137648, AL080158, A93350, AF090886, AF090900, | |
| | | | | | AF090903, AF185576, AL117432, AB019565, AF090934, AF113677, AF118070, AL049452, Y10080, | |
| | | | | | AL133557, AL122093, X63574, AL122121, X96540, X98834, AL050277, AF113694, AF113019, | |
| | | | | | AF113689, Y16645, AL049466, YT1587, AJ000937, Z72491, Z82022, AF183393, U91329, AL122123, | |
| | | | | | AF091084, AR013797, AL133104, AR038969, AF118064, AL050024, AJ238278, E07108, AF125949, | |
| | | | | | AJ003118, AL117435, U42766, E01614, E13364, X72889, AL133560, A08912, A93016, AL137283, | |
| | | | | | X87582, AL049283, AL133080, AF113699, AL137550, AL137538, AL117457, AL050116, AL050146, | |
| | | | | | AF090896, AF079765, X82434, AF067728, A77033, A77035, AF087943, AL049382, AL137271, | |
| | | | | | A07647, AL096744, AL117394, AL050393, A03736, AF057300, AJ012755, AF057299, AF104032, | |
| | | | | | AL122110, AF119337, AF003737, I26207, AI8777, AF017152, S68736, U80742, S79832, AF022363, | |
| | | | | | AL049464, AL049314, AF079763, AJ242859, AL117585, AL122118, AL133072, X65873, AJ006417, | |
| | | | | | U72620, AL080086, X72387, AF090943, E06743, AF132676, AF061836, AL050149, L31396, | |
| | | | | | AL110225, L31397, AL122049, U67958, I03321, AF118090, AF153205, D16301, AL133075, E15569, | |
| | | | | | AL080137, AL050155, AL137521, AL110280, AL080124, AL137429, E04233, AL137560, X84990, | |
| | | | | | AL080127, AL137705, U35846, AL137300, AF106862, AL133098, AL122098, A08908, AL133016, | |
| | | | | | AF146568, I00734, AL137463, X81464, S61953, AF176651, AF031147, AF026124, E00617, E00717, | |
| | | | | | E00778, AL133014, AL137479, AL137476, I41145, AF162270, Y10655, AL137526, AL049300, | |
| | | | | | I09360, AL049938, AR029490, A90832, AL122111, AF111849, U68233, I92592, AL050092, | |
| | | | | | AL050138, AL137480, AF061573, E07361, AR020905, AL133067, AF065135, AL080159, AF051325, | |
| | | | | | M30514, U58996, U68387, AL096751, AF028823, AF126247, L19437, AL110197, I17767, AF142672, | |
| | | | | | Y09972, I09499, U88966, AF111112, and AL080074. | |
| HUSYA27 | 351 | 934423 | 1-624 | 15-638 | AI810054,AI004966, AI953417, AA204830, AA700282, AA101580, AA127230, T77885,AI215410, | |
| | | | | | AI049842, AI383026, AW193598, AW195356, and AL137534. | |
| HUSXW61 | 352 | 741856 | 1-623 | 15-637 | AW439843, AW172765, H96902, H95980, and T15387. | |
| HUSXM28 | 353 | 703326 | 1-418 | 15-432 | T84537, R92899, and AC007999. | |
| HUSX171 | 354 | 760415 | 1-155 | 15-169 | N77614, and AL034417. | |
| HUSXH57 | 355 | 859907 | 1-656 | 15-670 | AA894530, AI336165, AI379833, AI870419, AI339336, AW173013, AI660120, AI697018, AI418065, | |
| | | | | | AA946777, AI372055, AI961630, AI281293, AI018252, AA918864, AI804228, AI280166, AI191797, | |
| | | | | | AA115687, AI476152, AA938579, W58372, AI124079, AI123356, AA460235, AA961355, AI201697, | |
| | | | | | AA806449, AA181956, AA633371, N54918, AI284979, AA975500, AA948109, AI262806, T86966, | |
| | | | | | AA864307, AA126483, AA670154, AA187579, AI285113, AA928294, AI282777, AA856633, | |
| | | | | | AA554905, W04639, H01916, AA952898, AA358260, H04478, AA939258, AI498851, AA283086, | |
| | | | | | AA070685, AA503091, AI473325, T56012, AA553782, AI718566, N21275, N78134, H78232, T31842, | |
| | | | | | AA651925, AI583297, W31735, AA383311, AA383310, R70784, D20722, AA296522, AI381360, | |
| | | | | | N40501, AA282901, W58050, C14037, AA932915, AW188939, AA770225, AI284357, AA969062, | |
| | | | | | AA918735, AI658500, and AB034206. | |
| HUSKA86 | 356 | 784887 | 1-411 | 15-425 | N72485, H71940, AF072873, and AB012911. | |
| HUSKA65 | 357 | 868860 | 1-490 | 15-504 | AA551165. | |
| HUSJW03 | 358 | 923035 | 1-700 | 15-714 | AI057455, AA699325, H75865, H75866, AP000247, AC004216, AC005071, AL035415, AC005790, | |
| | | | | | and AL121603. | |
| HUSJN66 | 359 | 886987 | 1-766 | 15-780 | AA426047. | |
| HUSIT75 | 360 | 679416 | 1-453 | 15-467 | AA040679, AI669256, AI763048, AI902903, AW245958, AW237088, AF039235, U25751, AI312767, | |
| | | | | | D80899, AI571378, AA362530, AW296090, AI354976, AI093187, AI680102, AA625161, C01220, | |
| | | | | | AW119180, AI140327, AA934553, AI201269, AA559846, AA040597, AI991982, AA359868, | |
| | | | | | AI203368, AW087508, AA497000, AW268813, AW152391, AI243335, AI185996, D80898, AI887841, | |
| | | | | | AA489585, F31194, and AI700879. | |
| HUSIS59 | 361 | 739327 | 1-217 | 15-231 | | |
| HUSIS54 | 362 | 730734 | 1-188 | 15-202 | AI149061, AW130563, D87675, AP000089, AP000142, AC005182, AC005089, Z83822, AC004832, | |
| | | | | | and AC007229. | |
| HUSIS08 | 363 | 959536 | 1-421 | 15-435 | AA663486, AA635417, and AA196796, | |
| HUSIR04 | 364 | 709228 | 1-422 | 15-436 | H77990, H90576, and AI267628. | |
| HUSIN12 | 365 | 970759 | 1-481 | 15-495 | AI689603, AL039203, and AW104130. | |
| HUSIE95 | 366 | 967176 | 1-482 | 15-496 | AI186511, AI905032, AW248242, W30830, AI908041, AA287850, and AF212940. | |
| HUSIE18 | 367 | 666523 | 1-404 | 15-418 | H47045. | |
| HUSIE08 | 368 | 908574 | 1-964 | 15-978 | AA736450, AW205616, AI492501, AI275895, AI806754, AA426438, AA437170, AI825464, AI984990, | |
| | | | | | D81011, D81007, AI954689, AI962153, and H26441. | |
| HUSHL86 | 369 | 960355 | 1-1399 | 15-1413 | AA703915, W19899, AI926481, C06034, AL120774, AI926508, AI889895, AI125240, AA508101, | |
| | | | | | AI140921, AI620543, AI889904, AA557537, AI198792, AI222307, AA744258, AI400233, AI630644. | |
| | | | | | AI266510, AI832176, AI699153, N91246, AA312954, AA258943, AI718296, AA053015, and | |
| | | | | | AF151805. | |
| HUSHE34 | 370 | 703409 | 1-549 | 15-563 | AA253268. | |
| HUSHB71 | 371 | 766060 | 1-329 | 15-343 | H79732, and H79731. | |
| HUSHB60 | 372 | 746560 | 1-462 | 15-476 | AA132883, AA253947, and AB033047. | |
| HUSGW06 | 373 | 935574 | 1-625 | 15-639 | AI375142, AI041354, AI739576, AW449593, H12704, AI684781, H12705, AW151325, AL137763, and | |
| | | | | | AL031431. | |
| HUSGV84 | 374 | 813557 | 1-433 | 15-447 | N22167, AI469417, AA186334, AI084312, AL048280, AL048279, AA845906, AA542871, AA164584, | |
| | | | | | AI927103, N92214, AA482803, AA482818, AI206093, AA884457, AA167321, AA548958, AI925703, | |
| | | | | | AI537994, AI973197, AA985451, AW072297, AW054739, N64610, AW151542, AW105365, N93598, | |
| | | | | | AI866140, AI399865, AA525978, AA516263, AA587848, AA663007, AI857882, AA594987, | |
| | | | | | AA173554, AA156124, AA830434, AA125898, AA834145, AA620469, AA843345, AA844552, | |
| | | | | | AI023983, AI041347, AA045631, AA854158, AA582010, AA618385, AI872043, AA101123, | |
| | | | | | AA187231, AI924029, AI126870, AA595697, AI338472, AA524686, AA469343, AA865364, | |
| | | | | | AA652110, AA657769, F24916, AI720143, AI698664, AA862692, AA469127, AW263715, T34217, | |
| | | | | | AA501497, AI687698, AI253667, AI745562, AI669479, AA748114, AW440479, AI033755, AI598103, | |
| | | | | | AI282490, AI567685, AA527738, AW304954, AA046680, AI630921, AI687740, AA927656, | |
| | | | | | AW169855, AA195478, AI301902, AW243866, AI253769, AA541719, T51486, AI984248, AI360533, | |
| | | | | | AA224320, AA176133, AA121062, AA635576, AA635568, AW151767, AI709168, AA112117, | |
| | | | | | AI052129, AA227540, AA565009, AW275898, AI275685, AA662712, AA527766, AI744375, | |
| | | | | | AA514849, AW316620, AA971114, AA227680, AA931889, AI199685, AI306714, F33796, AI954557, | |
| | | | | | AI609269, H73139, AA480503, T93062, AA469196, AA834505, T92777, AA167699, AI523421, | |
| | | | | | AA853136, AI472161, AI560670, AI567024, AI358189, AI244950, AI222622, AA593985, AI922122, | |
| | | | | | AI253759, AW071035, AA223905, AI890437, H19976, AA224846, AI460153, N64480, AI890697, | |
| | | | | | AI444954, AI972952, Z28473, AI889384, AI708079, H06213, T41240, AI671926, AI041981, D12312, | |
| | | | | | D51107, AI038910, H30023, AI687614, AI869809, AA716547, AA530894, AI749102, AI833109, | |
| | | | | | AI749897, AA661582, F19628, R71226, AI720476, AW440666, AI719996, AI091016, AI961304, | |
| | | | | | AI954378, AI274494, F28330, AW078568, AI807358, AA508357, AA570600, AI493435, AA507860, | |
| | | | | | AA425416, AW167098, AA687857, AA724960, AW167109, F27045, AW363237, AW363233, T93147, | |
| | | | | | AI422648, AA167142, AI312755, D56789, AI380771, F25929, AI676180, AI312752, AA738139, | |
| | | | | | C16070, AI783456, AA775238, D57103, AI932746, D57956, F01287, AA962120, F2841S, F29404, | |
| | | | | | AI269032, AI871878, AI434478, AI925288, F30481, AW198053, N75639, AA541559, AI718158, | |
| | | | | | AI750135, F30485, F20314, AA487950, AI932857, AW374950, F35602, AI632607, D54610, AI864772, | |
| | | | | | N55135, AA480577, AA247574, F00097, AJ131951, and AJ225898. | |
| HUSGU08 | 375 | 959540 | 1-429 | 15-443 | AI745055. | |
| HUSGT01 | 376 | 916620 | 1-509 | 15-523 | AA610520, AW296489, AA179163, AI824978, AA827817, AA483268, AC004966, AL049761, | |
| | | | | | AC004216, AL031591, AC002059, AC004626, AF109907, AC006014, AF064861, Z84466, U62317, | |
| | | | | | AL031904, AC000026, AL022324, AP000099, AP000260, AC005775, AC003662, AC004973, and | |
| | | | | | AC015853. | |
| HUSGS35 | 377 | 707777 | 1-666 | 15-680 | AI271425, AI223830, AA564436, AA251799, AI167485, N26127, AA143235, AI051406. AA975269, | |
| | | | | | AI927242, AI565174, AI052812, AA405571, AA251929, AA610292, AA826503, AW371603, | |
| | | | | | AW103340, AI289757, AI472362, and AI431964. | |
| HUSGQ62 | 378 | 745727 | 1-492 | 15-506 | R93146, AA704227, AI340024, and AC005021. | |
| HUSGM24 | 379 | 425180 | 1-773 | 15-787 | R81604, AI928098, and AI347338. | |
| HUSGJ68 | 380 | 753059 | 1-352 | 15-366 | AA767257, AI799645, AA906290, W57567, AA729117, AA171892, AA526416, AI732502, AI791301, | |
| | | | | | AA205911, AI791458, T71257, AA658087, AA743698, AA551400, R36518, H47143, AA330897, | |
| | | | | | AA446645, AI057588, AA225380, N91747, AI748842, H69661, AI339725, H73306, H52510, | |
| | | | | | AA358852, AI475758, AA424008, AA167159, AA487281, AC003003, Z68277, AC002430, AC007384, | |
| | | | | | AP000699, AC002420, AC007786, AC007536, Z99755, AC011504, AF111167, AC005071, AC006047, | |
| | | | | | AP000509, AC002350, AC007066, AC005180, AC005821, AC002288, AC004644, AC006111, | |
| | | | | | AL117344, AL023883, AL049697, AC006204, AL034377, AC007488, Z98304, AC004885, M89651, | |
| | | | | | AL008725, AC004910, Z95152, AC005839, Z94277, AL049742, AC020663, AC007371, AL022721, | |
| | | | | | AC006071, AC005911, AC005323, AL137191, AL022316, AL049776, X90590, AC004638, AC007993, | |
| | | | | | AL049871, AC004587, Z99754, AD000092, AL022726, AC005933, AC004750, AC002077, AC000387, | |
| | | | | | AL022315, AC006449, Z82176, AC005702, and AC005204. | |
| HUSGH09 | 381 | 625647 | 1-726 | 15-740 | T98941, AA777690, AA704182, and AF057709. | |
| HUSGF79 | 382 | 775309 | 1-424 | 15-438 | AA262313, R67992, AA262917, AI420959, and AI695670. | |
| HUSGF59 | 383 | 576784 | 1-302 | 15-316 | F34498, AA491814, AL119691, AA661921, AA689526, AI284640, AA493708, AA527630, AA714453, | |
| | | | | | AA502103, AA063173, AA580808, AA613591, AA613397, AA658362, AW303196, AW274349, | |
| | | | | | AI754955, AA507547, AI281697, AA502860, AA316905, AI338350, AA491862, AW270382, | |
| | | | | | AW028392, AA559290, AA618452, AA847409, AI282511, AW168618, R77905, AA525824, | |
| | | | | | AA362349, AA848134, AW103758, AI687343, AA857486, AA346458, T94842, AI358571, AA806796, | |
| | | | | | AI367975, AA514854, AA491650, AA469451, AA847516, AL046409, N27763, AA491284, AI499487, | |
| | | | | | AW301350, R89294, AI084294, AA362698, AW265385, R98359, AA491831, AA364429, AA219225, | |
| | | | | | AA812281, F17891, M78005, AI821271, AA641052, AA483256, AA531079, AI678316, AA828227, | |
| | | | | | F17555, D52587, AA713891, AI798489, AI281881, D51681, AI537077, AA501600, AA630925, | |
| | | | | | D83989, X75335, X55923, AF077058, U67827, U67829, M87925, AF0JS151, AF015156, M87919, | |
| | | | | | AF010317, AL133246, S70707, L10641, AL031235, AC006292, AC006596, AC000353, AC004638, | |
| | | | | | AL031650, AP000555, U62293, AC002564, L49046, S43650, AC009510, AL132800, Z49769, | |
| | | | | | AD000684, AL133276, Z69666, AL031054, AL031542, AC005288, AL031281, AF001549, AL031668, | |
| | | | | | Z70042, AC002045, AC000118, U49740, AB019437. AC004016, AL096765, Z97205, AC004931, | |
| | | | | | AC005696, AC000379, AP000431, AL132712, AC005257, AB020859, AC005913, AC006213, U66059, | |
| | | | | | AC007682, AC005603, AL110120, U38950, AC004134, AC008079, AL080242, AC007285, AL023882, | |
| | | | | | AL031657, AC010382, AC007043, X14448, AP000159, AC004987, AC006128, AC006130, AL035668, | |
| | | | | | Z98742, AC006057, AL023755, AL133494, AC005597, AC005837, AL022302, U85195, AC005839, | |
| | | | | | AC006315, AC004675, AC005862, AL023800, AL049544, AC005740, AC006155, AL020993, | |
| | | | | | AC007324, AC003103, AL078615, AC005026, AP000557, AC004041, AC007919, AF045448, | |
| | | | | | AC008101, AE000658, AC004946, AC007319, Z74022, AC007666, AL031682, AC007263, AL009179, | |
| | | | | | AC007064, AC004690, AL078581, U91321, AC004972, Z98051, AC006538, AF042090, AP000114, | |
| | | | | | AP000046, AC002350, AC004650, AC006045, AF064861, AC009247, X69907, AF088219, U72787, | |
| | | | | | AC009069, AP000459, and AP000090. | |
| HUSGF10 | 384 | 964844 | 1-564 | 15-578 | | |
| HUSGE22 | 385 | 888829 | 1-446 | 15-460 | | |
| HUSGB36 | 386 | 572924 | 1-418 | 15-432 | R33929, and AC004099. | |
| HUSGB01 | 387 | 916804 | 1-423 | 15-437 | T70191, AC004812, AC007263, AC005412, AC004686, AF111168, AC004253, Z84469, AC008044, | |
| | | | | | AC006111, AC000353, AC006128, Z98941, AC004216, AC005057, AC005484, AC005911, AL031005, | |
| | | | | | AC016027, AF067844, AC006312, AB023051, AL049843, AC016830, AP000512, AC006449, | |
| | | | | | AF196779, AL035413, AC008040, AC005785, AC005667, AL009183, Z98884, AC004491, AC006948, | |
| | | | | | AC004150, AC005037, AC004526, AC005004, Z95329, AC004019, AL133445, U62293, AC005792, | |
| | | | | | Z99716, AC004972, AC007386, AL109623, Z84487, AC005736, AC005345, U63721, AC005081, | |
| | | | | | AL031681, AC005776, AC007207, AL031283, AF053356, AC005086, AL022315, AC004752, | |
| | | | | | AC005696, AF001549, AC004382, AL121655, AC005067, AL022336, AL031846, AL031602, | |
| | | | | | AF045555, AC008372, Z85987, AC005585, AC020663, AL049569, AL031666, AC004685, AC004605, | |
| | | | | | AC007773, AC006511, AC007114, AC006974, AL034549, AC005874, AF134471, AC002316, | |
| | | | | | AP000689, Z84466, AC002565, AL109798, AC006057, AC003665, and AC006571. | |
| HUSFH89 | 388 | 786970 | 1-500 | 15-514 | H53955, and T95446. | |
| HUSFF03 | 389 | 924616 | 1-577 | 15-591 | AA769109, AA283754, AA883471, AB023137, AF033276, AF033275, and AF033274. | |
| HUSFE05 | 390 | 932106 | 1-796 | 15-810 | AA251680, and AA219333. | |
| HUSDA09 | 391 | 461656 | 1-475 | 15-489 | AA180076. | |
| HUSAY21 | 392 | 920403 | 1-508 | 15-522 | R66556, R66555, AA305729, AI903265, AA648467, and T03611. | |
| HUSAO27 | 393 | 955287 | 1-320 | 15-334 | | |
| HUSAM87 | 394 | 529783 | 1-134 | 15-148 | | |
| HUSAM35 | 395 | 558191 | 1-245 | 15-259 | M63005, M63543, M63480, and M63544. | |
| HUSAM22 | 396 | 523674 | 1-100 | 15-114 | | |
| HUSAL04 | 397 | 927719 | 1-316 | 15-330 | AC004547. | |
| HUSAJ57 | 398 | 678932 | 1-339 | 15-353 | | |
| HUSAJ15 | 399 | 522056 | 1-243 | 15-257 | R45895, T18597, R28735, R29445,AA585325, D54897, D60765, R28892, D60844, AA585098, | |
| | | | | | AA170832, R29657, R29218, AA585101, R28895, D61185, Z32887, D59751, C15406, D53161, | |
| | | | | | C16315, D61254, AI546999, D55233, D57491, Z32822, R28965, AA585439, AA283326, AI557262, | |
| | | | | | Z28355, AI546875, C15069, R28967, AI557864, AI541356, D59436, D53472, C16294, AI557734, | |
| | | | | | C16293, AI525316, C15120, D52835, AA585476, AA585155, D53447, AI526140, AI546971, AI541365, | |
| | | | | | AI525500, AI557740, C15762, AI541383, AI525431, AI547250, AI547202, AI546945, AI541374, | |
| | | | | | AI525306, C16292, AI541205, AI547039, AI526184, AI557763, AI526078, AI540903, AI541517, | |
| | | | | | AI541013, C15737, C16300, AI526109, AI557731, AI557718, AI557727, AI526016, AI541307, C16305, | |
| | | | | | AI541535, AI525556, AI541034, AI526194, D60730, Z33559, AI546891, AI557084, AI525320, | |
| | | | | | AI557602, AI557787, C16296, R29179, Z30131, AI547006, AI546921, AA585356, AI557807, | |
| | | | | | AI525339, AI557758, AI541346, AI546996, AI540967, AI526195, AI557809, AI541523, AI535639, | |
| | | | | | D57186, D51433, AI526191, D54850, AI526113, AI557408, AI557533, D59458, C14208, AI557155, | |
| | | | | | AI547196, R29262, AI546831, R29172, AI557852, C14391, AI557808, C16290, AI541527, R29177, | |
| | | | | | AI547137, AI556967, T41289, AI540974, AI541027, AI525856, AI526024, AI526117, AI541321, | |
| | | | | | AI526112, AI526158, AI557279, AA585453, AI546901, AI541422, AI526146, AA514191, AI526073, | |
| | | | | | AI524904, AA585430, AI535660, AI541492, T19407, AI525286, AI541506, AI546829, AI557799, | |
| | | | | | AI540920, AI557264, AI526180, AI525332, AI524890, C14322, AI525076, T41329, AI546828, | |
| | | | | | AI541510, AI557039, AI541515, AI525168, AI541415, AI525656, AI546954, AI540882, C14210, | |
| | | | | | AI557317, AI547189, AI536138, AI526205, AI541423, AA174170, AI540944, AA585434, AI557810, | |
| | | | | | AI541345, C14723, AI557786, AI525114, AI557041, AI541390, AI526196, AI541017, AI525040, | |
| | | | | | AI557238, AI557082, AI524891, AI557785, AI557285, AI541514, AI546841, AI526169, AA585420, | |
| | | | | | AI526125, AI541508, AI547138, AI046024, AI526187, AI526026, AI540928, Y09813, AR062871, | |
| | | | | | A25909, AR038855, X82786, X76012, AJ244005, Y16359, AF082186, AR038762, Z32836, AR054723, | |
| | | | | | X81969, D50010, D13509, AJ244004, A20702, AR062872, AR062873, A20700, D78345, A43189, | |
| | | | | | A43188, X55486, AR017907, AJ244003, AI244006, AJ243486, AR031358, AR031365, A98420, | |
| | | | | | A98423, A98432, A98436, A98417, A98427, AR003381, AC005913, X82834, AR017826, A98767, | |
| | | | | | A93963, A93964, I63120, and Z30183. | |
| HULAG30 | 400 | 788577 | 1-461 | 15-475 | R21151, AA053860, AA256918, AA054011, AA258280, AA026671, R72975, N48017, R69294, | |
| | | | | | D79117, W47268, W78713, W56158, AA417682, H03608, AA379320, AA019166, AA026702, R34494, | |
| | | | | | H84115, AA131247, AA044911, AA164369, AI301065, N36665, N73920, and AA131515. | |
| HMELV25 | 401 | 678120 | 1-491 | 15-505 | T97544, AA811921, AW237809, AA256699, and AL031591. | |
| HMELV14 | 402 | 876087 | 1-385 | 15-399 | AI026625, AA897168, AA846392, H30053, and AA989218. | |
| HMELR45 | 403 | 717696 | 1-178 | 15-192 | AL078634, AF031075, AF030876, U52112, AC004213, AL022723, AC006199, AL122021, Z68869, | |
| | | | | | AC002425, and AC002352. | |
| HMELM86 | 404 | 784702 | 1-235 | 15-249 | | |
| HMELM85 | 405 | 783536 | 1-211 | 15-225 | C06367, and AL034374. | |
| HMELM03 | 406 | 924168 | 1-302 | 15-316 | H70012, H69999, AA188729, AI623442, AI078409, AA584765, AA729384, AW237905, AA302690, | |
| | | | | | H73550, AA595770, AW304580, AA833896, AA833875, AA713705, AI298079, AI742168, | |
| | | | | | AW265688, AA601728, AA582746, AI272052, AA536040, R91816, AA481887, AA654874, | |
| | | | | | AA279649, T60666, N71729, AI369580, AI491755, AL040430, AA995373, AI282629, AW300749, | |
| | | | | | AW194046, AA912287, AA663461, AA564642, AI024339, T17332, AI963679, AA455252, AA680253, | |
| | | | | | N35306, AA525293, AI792439, AA689351, AW002831, AA525379, AI917132, Z30294, AA360245, | |
| | | | | | AL045476, AA582374, AA346436, AA493808, AA715277, AA485343, H52397, AI583448, C14480, | |
| | | | | | AA525807, AI224619, H82636, AA508036, AI918419, AL121287, AA829490, T73699, AW304536, | |
| | | | | | AA502498, AL110215, AP000501, AL135744, AC005484, Z96243, U17576, AL022238, AL109627. | |
| | | | | | AC003982, AL079342, L78833, AC005224, AC004821, AL035659, AP000689, AL021808. AC002432, | |
| | | | | | AC002126, AI3003151, Z93241, AC004595, AC002301, AC005288, AC009946, AC006241, AC006966. | |
| | | | | | AF196969, D87675, AL031447, AP000503, AP000569, AC007308, AC002395, AC002565, AL008726, | |
| | | | | | AL121769, U62293, AC003007, U63721, AL031848, AL035405, AC009247, AC005736, AC004149, | |
| | | | | | AC004805, AC004817, AC006480, AC006430, AC005632, AC005340, AC005102, Z98036, AC005231, | |
| | | | | | AF072711, AF111169, AF047825, AC006111, AC005041, AF134726, Z85987, AC005527, AC006509, | |
| | | | | | AC000085, AL049631, AC004955, AC005005, AC005920, AF001548, AC005088, U80017, AC002470, | |
| | | | | | AC004893, AC005189, AL133163, AP000141, AC006285, AC004531, AC004650, AC003029, | |
| | | | | | AL121748, AC003104, AC005839, AC004143, AC006013, AC007011, AC004655, AC003108, | |
| | | | | | AC004000, AP000305, AL049761, AR004690, AL049696, AL121754, AC005015, AC004491, Z98742, | |
| | | | | | AL031427, AC005057, U62292, AC005280, AC002299, AC005089, Z86090, AC007242, AC005921, | |
| | | | | | AL049834, AC005488, AC004922, AL035462, AC006315, AC005944, AL031296, Z82206, AP000030, | |
| | | | | | AC004834, AC005306, AC005625, AL035420, AF128893, Z98752, Z83826, AL022323, AP000300, | |
| | | | | | AP000497, AC005529, AL035652, AP000555, AL078581, AD000812, AC006030, AC005332, | |
| | | | | | AL022311, AF207550, AC007066, AL021707, AC002991, AC004106, AJ009610, Z84476, AC005602, | |
| | | | | | AC005512, AC020663, AL031589, AL031311, AL035089, AL049856, AC005907, AC005409, | |
| | | | | | AC005666, AP000031, AP000047, AL021939, AL008730, AP001060, AL109839, AC005701, | |
| | | | | | AL109865, AC004596, AP001052, AL121655, AL031685, AP000301, AC007326, AL049766, | |
| | | | | | AC005730, AL109984, Z93930, AC004597, AC005777, AP000066, AC002378, AL031681, AD001502, | |
| | | | | | AC002544, AL034402, AC007226, Z98884, AC005694, AL049839, AC005755, AP000359, AL121653, | |
| | | | | | AC005082, AC005790, AP000557, AD000092, AC004560, AC006441, AC004477, AC004755, U07562, | |
| | | | | | AL049757, AL049779, AP000502, Z95116, AL096701, AC003080, AC004973, AC004263, AL118516, | |
| | | | | | AC007566, AC010205, AL035400, AL031577, AC012085, AC007649, AC007390, AL022327, | |
| | | | | | AC004985, AL133448, AC007565, AC006277, AC005553, AC004605, AC005048, AC006271, | |
| | | | | | AC007193, AC006538, AP000045, AP000113, X96421, AC004659, Z84480, AL022326, AC005585, | |
| | | | | | AL022165, AC005932, AC006115, AC003962, AC004858, AC007546, AP000114, AL031291, | |
| | | | | | AF111168, AC005911, Z82901, AC003663, AL031295, AL009183, AC005257, and AP000115. | |
| HMELI57 | 407 | 734769 | 1-556 | 15-570 | AA182703, AI275893, AI312591, AW081314, AI890203, AI192785, AI376547, AI741045, AI382078, | |
| | | | | | R19548, AI769235, AA927822, AI338465, AI074270, AI807959, AI370112, AA725073, AI051770, | |
| | | | | | AA598799, AI023985, AA129014, and AB033055. | |
| HMELH60 | 408 | 422844 | 1-416 | 15-430 | AA807514, AA348342, AA280883, AA827687, AW188273, AI565521, AA037530, W21023, C15105, | |
| | | | | | AA232584, R29652, L23320, X69821, AF040250, Z22642, and A37862. | |
| HMEKZ06 | 409 | 935467 | 1-299 | 15-313 | AA449734, AA427598, AW444685, AW449906, AI795836, and AI089108. | |
| HMEKW07 | 410 | 953369 | 1-610 | 15-624 | AA878223, and AC003663. | |
| HMEKQ19 | 411 | 668659 | 1-571 | 15-585 | AA429954, and R16779. | |
| HMEKO03 | 412 | 924172 | 1-395 | 15-409 | AI243588, AA521176, and AA280671. | |
| HMEKJ40 | 413 | 711187 | 1-327 | 15-341 | R09458. | |
| HMEKH73 | 414 | 923893 | 1-581 | 15-595 | AA424126, AA446776, W77829, W72193, AA662191, AI678126, AI927019, AA248915, AA432090, | |
| | | | | | AA424038, AA282355, and AB032954. | |
| HMEKC72 | 415 | 760637 | 1-407 | 15-421 | AI668582, AI733530, and H27330. | |
| HMEJW50 | 416 | 724396 | 1-301 | 15-315 | T87438. | |
| HMEJJ81 | 417 | 777945 | 1-485 | 15-499 | W86772, AI057384, AA778241, AA447568, AA806287, and AI566837. | |
| HMEJF25 | 418 | 678131 | 1-424 | 15-438 | AA135338. | |
| HMEIV22 | 419 | 674611 | 1-490 | 15-504 | H38908. | |
| HMEIS07 | 420 | 922703 | 1-374 | 15-388 | AW245436, AA527311, AI590091, AI983410, AI091713, AI346717, AA398347, AW080183, | |
| | | | | | AA512959, AW005087, AA058970, AW128940, AI089097, T53469, AA657971, AA025746, N92837, | |
| | | | | | AI472329, AI056168, AI802669, AI468989, AA232933, AI250941, AI500614, AI245602, AA764762, | |
| | | | | | AI269006, AI470306, R43430, AI984174, R40489, AA025898, AA858342, AI687814, AA836964, and | |
| | | | | | AA410714. | |
| HMEIA06 | 421 | 935966 | 1-240 | 15-254 | AB020860, AC006312, and AL096702. | |
| HMEGK14 | 422 | 796443 | 1-710 | 15-724 | AA005070, W90563, and AA379086. | |
| HMEGH92 | 423 | 790629 | 1-481 | 15-495 | AA252756. | |
| HMEFD72 | 424 | 766185 | 1-398 | 15-412 | AA215529. | |
| HMEEL38 | 425 | 733649 | 1-588 | 15-602 | N52853, T69848, T70384, AA307828, AA325554, N27041, AA361398, R88485, T26592, AW368306, | |
| | | | | | AW408494, H08241, T80355, W28865, AA447395, AA426157, AW138787, AW236918, AA382949, | |
| | | | | | AW362933, AI908338, R17363, AA164794, and T23060. | |
| HMEDR76 | 426 | 529897 | 1-161 | 15-175 | AC002357. | |
| HMECQ10 | 427 | 968500 | 1-311 | 15-325 | AA306797, AA278590, AA315885, and Z56144. | |
| HMECH43 | 428 | 715568 | 1-291 | 15-305 | AA211808, AW405016, R01660, AI246409, AI049534, AW277135, AI146266, AW249720, arid | |
| | | | | | AC004690. | |
| HMEBY95 | 429 | 796058 | 1-337 | 15-351 | AA251522. | |
| HMEBG01 | 430 | 921763 | 1-281 | 15-295 | AI668626, AW029612, and H42199. | |
| HMEAN12 | 431 | 655220 | 1-390 | 15-404 | R81266, AW385354, AA968573, AW069537, R81167, AW391238, and AA570569. | |
| HMEAI38 | 432 | 709207 | 1-490 | 15-504 | H93846, and AL096710. | |
| HMEAH31 | 433 | 698403 | 1-249 | 15-263 | T69104, T69027, AA092794, AI907131, AA622562, AF149045, and AF149046. | |
| HMEAE24 | 434 | 880925 | 1-156 | 15-170 | AI354388, AW089663, H98198, AI612070, AI611533, AA834814, AL041749, AA769429, AA224238, | |
| | | | | | AW008089, AA715280, R92172, AA173041, AI933505, AL096774, AC005231, AC003982, AL022320, | |
| | | | | | AC003080, AL008712, AC007666, AF196779, AL096791, M89651, AC008122, AL021397, Z93783, | |
| | | | | | AC003007, AC005907, AP000114, AC002369, AF207550, AC005480, AC006166, AC005324, | |
| | | | | | AL035454, AC004983, AC005632, Z97630, AC005971, AC004056, AC004796, AC006449, AL121825, | |
| | | | | | AC007216, AC002316, AL022333, AC004491, AC004966, AC004167, AC004596, AC004820, | |
| | | | | | AC006059, Z97056, AL031311, AB023051, Z97054, AL049611, AF053356, AC005670, AL049780, | |
| | | | | | AC005837, AL031685, Z68756, AL035249, AL021707, AL049694, AP000512, Z69705, AC004812, | |
| | | | | | AP000501, AC004754, AL109827, AC004913, AC004859, AL049759, AC006026, AL008721, | |
| | | | | | AC005015, AP000692, AC004236, AL133448, AC005332, AC005924, AC005291, AC008372, Z83847, | |
| | | | | | AC004706, AC005004, AC005102, AC004381, AC005598, AC004000, AL031276, AC005071, | |
| | | | | | AC005372, AC003030, AC004520, AL135744, AC006125, AC006130, AC006515, AC007546, | |
| | | | | | AC005253, AC002544, Z82176, AL022311, AC006273, AP000030, Z93017, AC020663, AL021453, | |
| | | | | | Z82201, AC006071, AC007011, AC005399, AL020997, Z99716, AC002045, U96629, AC007052, | |
| | | | | | AC005094, AC005081, AL109963, AC005484, AC005529, AC004560, AC005006, AC005881, Z84469, | |
| | | | | | AC004510, AC006371, Z81370, AL035587, AC004084, AP000251, AC006312, AC005261, AC007487, | |
| | | | | | AC005920, AL049830, AC002310, AC002365, AC005578, AC002565, AC003043, AL049757, | |
| | | | | | AL021154, AC005089, AC006079, AC005288, AC004858, and U95742. | |
| HMEAE01 | 435 | 916744 | 1-299 | 15-313 | AL135643, F13749, AI791610, AI751162, AI821467, AW162288, AA230143, AI696793, AI073888, | |
| | | | | | AA563770, AA669709, AA176605, AA579184, AWI68479, AW440976, AW168483, AW236342, | |
| | | | | | AW368401, AA828867, AA574286, AI301218, H91844, AI076236, AA360260, AI886365, AW271917, | |
| | | | | | AA657835, AI061111, AI904944, AA357285, AI982634, AA837715, AA331482, AI648558, F23327, | |
| | | | | | AL043098, AL046746, AI753365, AA366601, AA228263, AA608520, AA828047, AA992126, | |
| | | | | | AA847099, AA311156, N59562, AWI57005, AA130647, AI028510, AA743811, AI090334, H62670, | |
| | | | | | AA865262, AW384449, AI358089, AA365586, AI566408, H73704, AA569065, AI309384, AW270258, | |
| | | | | | AA747243, H15032, N23260, AA557911, H05821, AA573578, AA365587, AA467730, AA515677, | |
| | | | | | AA761795, F31654, H63806, AA457249, AI357551, AW191886, AI244254, R2491S, H153168, F25203, | |
| | | | | | AW327624, AA772016, AL037952, AW327282, AI291124, AA302980, AA578967, AA574442, | |
| | | | | | AA574353, AI709174, AI811460, F32893, AA513234, AA192330, AI291268, AI539776, R92640, | |
| | | | | | AA077776, H79308, AL031393, AC005808, AC005154, AC004263, AL031053, AC002470, AC010582, | |
| | | | | | AC005988, AC005940, AL031587, AC009516, AL034553, AL008635, AL022165, AL096818, | |
| | | | | | AC007308, AC003982, AL031311, Z84480, AL121825, AC004983, AC002425, AC012627, Z99289, | |
| | | | | | AC005971, AC005057, AP000049, AP000116, L44140, AP000311, M30688, AL133163, AC003964, | |
| | | | | | AL049576, AL117536, AC006511, AL122003, AC006430, AC004072, AL109799, AC004517, | |
| | | | | | AF037222, AL034420, AC006273, AP000692, Z84469, AP000503, AC006077, AL008718, AL022316, | |
| | | | | | AF111163, AF147277, AC005274, AL031589, AC010197, AL022476, AC002394, AC007774, | |
| | | | | | AL049794, AC005618, AF134726, AC004134, AC007406, AC004837, AC000353, AC002563, U67093, | |
| | | | | | AR028159, AP000557, AC004706, AC004904, AC006241, AL031774, AC004887, AP000689, | |
| | | | | | AC005856, AJ133269, AL031584, AL049589, AC006538, AC006530, AC005410, AB003151, | |
| | | | | | AP000045, AC006063, U14702, AC008033, L47234, AC006088, AC004232, AC004080, AL035530, | |
| | | | | | AC002480, Z69917, AC007041, AP000509, U73649, AL049869, AL096701, AC005736, AC006254, | |
| | | | | | AC005209, AP000511, AC007564, AC006537, AC005062, AL136295, AC006509, AL096766, | |
| | | | | | AC006356, AC002301, AC003692, AL109963, AP000512, AC005696, AC004985, AF117829, | |
| | | | | | AC004805, AC005568, AC003041, AC002350, AC008064, AC006039, AC007878, AC004235, | |
| | | | | | AL023803, AC004596, AC002418, Z46936, AC009509, AC003663, AC005874, AF134471, AP000008, | |
| | | | | | AC003667, AC000052, AC005531, AC006277, AC004386, AL031848, AC005207, AC006211, | |
| | | | | | AP000704, AL034555, AC004785, Y10196, AJ229043, U14703, AC004003, AC004019, AP000151, | |
| | | | | | AP000010, AC006449, AL049775, Z99716, AC004216, AC002542, AL049198, AF111168, AC002420, | |
| | | | | | U80459, AC001642, AL031295, AC007731, AL020995, AL117340, AC006014, AC003992, AC005500, | |
| | | | | | AC005690, AF196779, AL022320, AB023050, AL031447, AC007263, AC002430, AC007993, | |
| | | | | | AC004814, D84394, AC007684, AC007676, AC001643, X54486, Z49250, AL021397, AC005178, | |
| | | | | | AL035420, AB023051, AC005632, AP000251, AC007384, AC003010, AP000513, AC005488, | |
| | | | | | AC005786, U62293, U63721, AL022578, AC005184, AC006977, AF129756, AL049780, AL034548, | |
| | | | | | AP000555, AC004741, AP001059, AC005839, AL109623, AP000023, AC005746, AC004832, | |
| | | | | | AL133246, AG007226, AP000553, AL133245, AC008040, AC006238, AC004854, AP000030, | |
| | | | | | AP000211, AC006079, AL078472, AP001053, AC007917, AC005799, AP000552, AC005288, | |
| | | | | | AC004236, AC006071, AC003664, and AC003043. | |
| HMEAD86 | 436 | 785802 | 1-344 | 15-358 | AA251058, and AA807055. | |
| HMEAD47 | 437 | 720638 | 1-407 | 15-421 | T79734. | |
| HMEAA17 | 438 | 921765 | 1-464 | 15-478 | H10273. | |
| HHFUB83 | 439 | 800580 | 1-277 | 15-291 | | |
| HHFPU02 | 440 | 918070 | 1-715 | 15-729 | AW296654, AI498432, AI498430, AI758371, W73054, and U82695. | |
| HHFOL43 | 441 | 974002 | 1-498 | 15-512 | | |
| HHFOK10 | 442 | 961346 | 1-342 | 15-356 | AA280678,AI128307,AI890650,AI538161,AW190537AI207930 AI358856, AI913895, AI114875, | |
| | | | | | AA564510, AA401182, AA225175, AW273466, AI358915, AI743933, AI037933, AA604799, N72011, | |
| | | | | | AA362732, AW276723, AW276763, AWI57028, AA745570, R84431, AA864787, AI479583, | |
| | | | | | AA085683, AA486832, AA487152, AC004883, AC006160, AC004217, AL022575, AC002070, | |
| | | | | | AL034343, AL080241, U55729, AL021578, L11910, Z93930, AC002994, Z95114, AC002096, | |
| | | | | | AL109839, U91322, AF111168, AC005291, Z85997, AL031733, AP000501, AC005274, AD000812, | |
| | | | | | AL035398, AC002126, AF047825, AC007308, AC007160, AL021579, AL031280, AL035690, | |
| | | | | | AC005875, AC005482, AL024507, Z77249, AF029081, AP000047, AP000115, AL031285, AC007052, | |
| | | | | | AC005562, AC000075, AL033392, Z99916, AC004813, AC005664, AC005844, AC004985, AC000097, | |
| | | | | | AC007386, AC006547, AF067844, AC004491, U82828, Z83822, AL009181, AC003669, AF165926, | |
| | | | | | AL049780, AC007055, AF053356, AC001227, AC002101, AC005074, AC005808, AP000260, | |
| | | | | | AL008637, AL034421, AP000099, AC004087, AL049759, and AC005014, | |
| HHFNJ05 | 443 | 930899 | 1-430 | 15-444 | AI538184, AW007485, AI363114, AI953529, AA910212, AI695319, AA910204, AL121657, and | |
| | | | | | AF214736. | |
| HHFMX34 | 444 | 945385 | 1-453 | 15-467 | | |
| HHFLU06 | 445 | 857884 | 1-316 | 15-330 | | |
| HHFLT84 | 446 | 857890 | 1-460 | 15-474 | AA015945. | |
| HHFLL08 | 447 | 958103 | 1-399 | 15-413 | AA664191. | |
| HHFLJ51 | 448 | 857898 | 1-453 | 15-467 | H55219, AL040362, and Z80897. | |
| HHFL110 | 449 | 963162 | 1-652 | 15-666 | | |
| HHFL107 | 450 | 952081 | 1-588 | 15-602 | AF064860, AC003109, AC005189, AP000010, AP000151, AP00021S, AC005529, AP000556, | |
| | | | | | AC004882, AC002350, AC006160, and AP000337. | |
| HHFLH62 | 451 | 857908 | 1-314 | 15-328 | AA460477. | |
| HHFLE12 | 452 | 969531 | 1-498 | 15-512 | AI191562, AA297666, AI887235, AI476049, AA659832, AI272052, AA595499, AW167154, AI598003, | |
| | | | | | AW194325, AW023302, AI859280, AL031650, AC012627, AC002519, AC007308, AC002369, | |
| | | | | | AC006011, AL020993, AL109628, U91323, D87675, AC005037, AP000555, AC006236, AC005920, | |
| | | | | | AL049776, AP000695, AL133246, AC005231, AC006001, Z85986, AC007546, AC005094, Z98200, | |
| | | | | | AC005332, AC007216, AL049856, AC004659, AC007066, AF029308, AC005399, AC007690, | |
| | | | | | AP000337, AP000240, AL035495, AC007227, AC002310, AC005548, AC007225, Z97056, AC006538, | |
| | | | | | AC007999, AC005005, Z95113, AC004104, AC005899, AP000251, AC005225, Z95115, AL022476, | |
| | | | | | Z84480, AP000212, AP000134, AL133163, AC005833, AC005664, AC005089, AP000030, AC002316, | |
| | | | | | AC006115, AC005295, AL023575, AC004884, AC004477, AL121769, AC004222, AL049712 U91398 | |
| | | | | | Z93017, AC003687, AC002082, AC005288, AC006064, AC005988, AC007285, Z94721, AC002546, | |
| | | | | | AC002289, AC007151, AC009509, AC004474, AL121595, AC004815, AL021154, AR036572, | |
| | | | | | AC002477, AP000216, AC004526, AC006160, AF053356, AP000350, AC007450, AL139054, | |
| | | | | | AL133485, AG005409, Z95118, AP000692, AC000025, AF178030, AL049872, AC005527, AC003109, | |
| | | | | | AC005971, AC004134, AB023049, AP000359, AF111167, AC005859, AP000338, AL031230, | |
| | | | | | AC007036, AC002347, AC004966, Z97632, AP000513, AP000248, AL031427, AC006509, AC005412. | |
| | | | | | AC003082, AC006077, AC007041, and AC004882. | |
| HHFKX28 | 453 | 971102 | 1-844 | 15-858 | AI740820, AA482031, AI565169, AI628285, AA947029, AW190175, N50136, AA707674, AI332610, | |
| | | | | | AA223261, AA189165, AA767472, AI276839, AA804584, AA894857, N59367, R46372, N72682, | |
| | | | | | AA774827, AA219127, AW188325, W02461, AA417592, D29223, AA322537, R08745, AA315300, | |
| | | | | | AW377015, H60482, R08746, AA939277, AA872005, AI810734, AW118290, T30177, D29202, | |
| | | | | | R68574, AI167609, and AI832198. | |
| HHFKB24 | 454 | 887025 | 1-420 | 15-434 | | |
| HHFJM64 | 455 | 958384 | 1-1457 | 15-1471 | AA263151, W39493, AW292417, AI703130, Z41877, R67724, and AA578849. | |
| HHFIA58 | 456 | 858011 | 1-406 | 15-420 | Z47297, and AJ011930. | |
| HHFOAI3 | 457 | 657405 | 1-410 | 15-424 | AA001994, AL046468, AW367920, AA057078, W96490, D87443, and AL078475. | |
| HHFHY95 | 458 | 795053 | 1-384 | 15-398 | T62723, AA282638, and AC005839. | |
| HHFHR63 | 459 | 745215 | 1-630 | 15-644 | H58858, R20870, and AC005177. | |
| HHFHP68 | 460 | 753144 | 1-479 | 15-493 | R34604, AI472929, N67108, AI312095, AI077416, AI080088, AW000975, AI218568, AA305614, | |
| | | | | | AW270427, AA922273, AW268569, and AL021920. | |
| HHFHN74 | 461 | 765758 | 1-786 | 15-800 | H11548, T76951, T65348, H23112, H08748, H18004, F13243, F11922, R39092, and T16788. | |
| HHFHM22 | 462 | 674841 | 1-420 | 15-434 | H05872, and AC006487. | |
| HHFHJ90 | 463 | 675218 | 1-437 | 15-451 | R02560. | |
| HHFHD38 | 464 | 709082 | 1-259 | 15-273 | H65332, and H25516. | |
| HHFGX13 | 465 | 656806 | 1-694 | 15-708 | AW020496. | |
| HHFGX03 | 466 | 924753 | 1-421 | 15-435 | AA731491, AW088849, AI570996, F32413, AI827137, and AW386082. | |
| HHFGR31 | 467 | 953204 | 1-391 | 15-405 | W07246, AA423994, and AL049795. | |
| HHFGR30 | 468 | 692887 | 1-335 | 15-349 | AA167587. | |
| HHFGP91 | 469 | 800328 | 1-845 | 15-859 | AI208872, AI651750, AA367948, AA852183, AA383420, AI948798, AC004453, and AI3028991. | |
| HHFGP69 | 470 | 918393 | 1-699 | 15-713 | AA570361, AA173853, AW239179, and AF117756. | |
| HHFGL77 | 471 | 490379 | 1-494 | 15-508 | AI688557, AI799116, AI202945, AI358494, AI697899, AW293458, AI698391, AA765656, AI537677, | |
| | | | | | AI918370, AI621341, AI560227, AI696570, AA824496, AI689614, AW129616, AI559976, AA488429, | |
| | | | | | AI537643, AI891102, AI289400, AI570966, AI953765, AI590043, AI445620, AI611743, AI696583, | |
| | | | | | AI918955, AI537244, AI927233, AI554516, AI874107, AI801793, AI345688, AI491710, AI863002, | |
| | | | | | AI590020, AI475371, AL138386, AI819663, AI433611, AW025279, AW029186, AI800171, AL042944, | |
| | | | | | AW162194, AI567769, AI333104, N49165, AI589004, AI819014, AW105431, AI581139, AI955945, | |
| | | | | | AL119863, AL045672, AI648458, AI567582, AL039011, AI690620, AW059765, AW103726, | |
| | | | | | AI591228, AI635950, AI557426, AW022636, AI075658, AW079432, AI434223, AI670895, H89138, | |
| | | | | | AI536836, AW089275, AW105087, AI560545, AI859644, AI912434, AI873998, AA665587, AI952306, | |
| | | | | | AI499285, AI699823, AW104141, AI589428, AI886355, AI244343, AI474646, AI285439, AI202203, | |
| | | | | | AW148303, AI933992, AI370623, AW055252, AI818358, AI287449, AI925404, AI335231, AI539260, | |
| | | | | | AI287476, AI445611, AI570857, R65859, AW169626, AI095003, AA732937, AL119791, AI572730, | |
| | | | | | AI267532, AI499986, AI702902, AI249877, AI277008, AA641818, AI538885, AI633125, AL043975, | |
| | | | | | AI860027, AI538564, AI434242, AW152182, AI648699, AI345477, AA916133, AI345415, AI440238, | |
| | | | | | AI583578, AI473845, AA602414, AI434255, AI801619, AW305233, R80916, AL039716, AI921087, | |
| | | | | | AA693331, AI473240, AI783792, AI619820, AI251485, AI561356, AI096771, AL121365, AI918809, | |
| | | | | | AW081311, AI890576, AI536601, AW161098, AI431962, AW192109, AI950892, AW051088, | |
| | | | | | AW411235, AI254727, AW020164, AI797794, AW265004, AI247082, AI564186, AI274500, | |
| | | | | | AA229532, AW073926, AW082623, AW410259, AI802240, AW007284, AL046466, AI289791, | |
| | | | | | AI619777, AI627714, AW029329, AL047675, AI334445, AI354998, AW084801, AI499325, AI539771, | |
| | | | | | AI696340, AI539690, AI801325, AI671931, AW131065, AW105383, AA744713, AI801536, AI884318, | |
| | | | | | AA749425, AI803935, AL045997, AW130134, AA127565, AW195253, AW080379, AW131999, | |
| | | | | | AI539723, AA808175, AW411351, AA575874, AL038529, AW059568, AI567993, AW083775, | |
| | | | | | AL047344, N25033, AA678835, AI499581, AI521799, AI379711, AI434731, AL135047. AW301409, | |
| | | | | | AI225000, AI800159, AW080374, AL040243, AI918435, AA824435, AI929108, AI811912, AA767144, | |
| | | | | | AI656270, AI371442, AW411265, AW073865, AW085786, AI620287, AI765469, AW410902, | |
| | | | | | AW243876, AI568773, AW410696, AI540674, AI355779, AW005612, AI540832, AWI70773, | |
| | | | | | AW087816, AI499279, AW075382, AI952249, AI685517, AI564290, AI697178, AW020397, AI874166, | |
| | | | | | AI365256, AI887163, AI521095, AI954721, AF076464, I89947, I48978, AF108357, AL133559, | |
| | | | | | AF119336, AF035161, AF113690, A08910, A08909, AF094480, A65340. A08908, X83544, Y00093, | |
| | | | | | X72889, AL137478, AL137533, AL133619, AL049447, Z97214, AF077051, AJ005690, AR038854, | |
| | | | | | X97332, AF067790, X79812, AL122050, M92439, AF126372, AL049423, AL137271, AL117460, | |
| | | | | | A08913, AL133084, AF131773, E12579, M64936, AF162270, AF031903, X53777, AL049347, | |
| | | | | | AF013214, AI8777, A65341, A77033, A77035, X80340, AL050278, S71381, X66862. AL122098, | |
| | | | | | AL110221, AL133568, AR034821, I48979, A21103, AL110262, Y10823, X61399, A76337, AF087943, | |
| | | | | | A90844, AF118090, AL137529, L04859, AF111112, U70981, AL117463, AI238278, AF126488, | |
| | | | | | AF026008, AJ003118, AF177401, E12580, A08912, A08911, AL133637, AF067728, U75604, | |
| | | | | | AF111851, AL137554, AF026124, S79832, AL050138, U58653, AF022363, AF032666, S77771, | |
| | | | | | AF055917, AR011880, AF158248, AL035458, AL110159, AR068753, A07588, AF065135, I17544. | |
| | | | | | AL137574, AF044323, U80742, AL050393, AF102578, A58524, A58523, S76508, AC002467, | |
| | | | | | AF109155, X65873, AR068751, AF028823, AL050024, E04233, Y11254, AF176651, Z37987, | |
| | | | | | AL133016, S68736, AL137527, A93016, AL078630, I00734, AF059612, Z35309, I89931, AL049339, | |
| | | | | | AL133088, A76335, L13297, U35146, I92592, A91160, E00617, E00717, E00778, M79462, U77594, | |
| | | | | | E12747, AL137627, I49625, X66871, AL137298, AL122104, AF162782, AL050110, AF076633, | |
| | | | | | AL080158, AL122100, I30339, I30334, AL050116, AL137722, AL122118, AF139986, X93495, | |
| | | | | | E01614, E13364, AF139373, A08907, AF126247, AL049938, AL050277, AF067420, L30117, I26207, | |
| | | | | | AF090886, AF124728, AL110228, X63574, AJ012755, AI8788, AF003737, Y16258, E03348, Y16257, | |
| | | | | | E02756, Y16256, U67958, AL080159, I33392, Z82022, AB025103, AR059958, AB007812, AF047716, | |
| | | | | | E01314, S82852, AF112208, AL117457, AL050149, AF151109, AF061981, U78525, AF090901, | |
| | | | | | AL080148, E06743, AL117435, AL137665, A91162, AF008439, AF104032, X99226, AL137550, | |
| | | | | | I89934, AL049324, AF118094, S36676, E03349, AR000496, D44497, U39656, AF080622, AF090900, | |
| | | | | | AL080156, AL096728, AF180525, I32738, AF061573, AF019298, AF000145, A08916, AF090432, | |
| | | | | | AL049276, D16301, AR068466, AF090934, L19437, S63521, AL133558, AL117587, I46765, A49139, | |
| | | | | | AR060156, A58545, I09499, AF039138, AF039137, AL137660, AL080129, AL133049, AL122121, | |
| | | | | | AL137476, AI7115, AI8079, AL133665, L24896, and AL137300. | |
| HHFGH81 | 472 | 778193 | 1-329 | 15-343 | R56912, AA888618, AA460448, AA554077, AA458950,AI865116, AA019611,AA410313, R55713, | |
| | | | | | AA081407, AA724795, AA648850, AA019450, AA552550, AA177050, AA854071, AA152380, | |
| | | | | | AA844117, W37842, AA192171, AA468546, AI269758, AA987694, AA586585, AA746215, R39789, | |
| | | | | | R43005, AA216405, AA059379, and AR038867. | |
| HHFGH43 | 473 | 573495 | 1-521 | 15-535 | R73359, R83531, H44511, H44513, H44528 and AW376878. | |
| HHFFZ50 | 474 | 513773 | 1-643 | 15-657 | | |
| HHFFT05 | 475 | 932675 | 1-123 | 15-137 | | |
| HHFFT01 | 476 | 880757 | 1-388 | 15-402 | X97818. | |
| HHFFR95 | 477 | 796677 | 1-427 | 15-441 | H05133, R36902, and Z40451. | |
| HHFFR75 | 478 | 766630 | 1-493 | 15-507 | AA812058, AL120483, AI859744, AA593428, AI368873, AA683031, AW008212, AA601218, | |
| | | | | | AI917156, AI951863, AL041895, AI471543, AI588856, AW117936, AI567674, AA568310, AA745302, | |
| | | | | | AI204309, AI679782, AA483004, AI791180, F25658, AA317973, AA102235, AI821138, AA736713, | |
| | | | | | AA523695, AA805845, AA339076, AI823679, AA610255, AW238495, AI915081, AA348248, | |
| | | | | | W32993, AL037856, AI459943, AA525331, AC004019, AC005288, AC005696, AC006014, AC006111. | |
| | | | | | AC005488, Z85987, AC006023, AC004812, AC004253, AC000052, AC005736, AL023575, AC003665, | |
| | | | | | AC006077, AL008718, AP001053, AF129756, AP000555, AL035681, Z98200, AC005295, AC005480, | |
| | | | | | AF045555, AC004685, AC005740, AC006160, AL049712, AC006480, AL022323, AC006449, | |
| | | | | | AL035659, AL049636, AL008582, AC005081, Y07848, AL035249, AL096701, AF111168, AC009509. | |
| | | | | | AC004967, AL022329, AP000355, U52112, AC006511, AC007917, AC006948, AC005520, AL121652. | |
| | | | | | AF196779, AC005399, AP000086, AC002551, AL096791, AF196972, AL022320, AC005182, | |
| | | | | | AC004216, AL024498, AC004491, AL031311, AC005728, AF001549, AC005330, AL009051, | |
| | | | | | AC005225, AC000353, AL121603, AC007011, AL009031, AC002326, AL022324, Z83844, AC005821, | |
| | | | | | AF139813, AC004973, AF111169, AL033392, AC005412, AC020663, AC004126, AC002477, Z95113, | |
| | | | | | AC002059, AP000113, AC006538, AF205588, AL031665, AC005755, AL117354, AL031984, | |
| | | | | | AF196969, AC006001, AC005216, AF060568, AC004841, AL049643, AC004228, AC005954, | |
| | | | | | AC005088, U85195, AL009181, AL049694, Z98036, AC002036, AC004477, AC002449, AC007240, | |
| | | | | | AC002400, AC003002, AL031291, AC005924, AC006120, AC005231, AE000658, AC004638, | |
| | | | | | AL022318, AC002316, AC006211, AC005031, AC004878, AC005632, Z83840, AC002429, AC007308, | |
| | | | | | AC007314, AC000026, AP000553, AL080243, AF111167, AL133353, AL109758, AC006126, | |
| | | | | | AC006277, AL135744, AL080242, AC004876, AJ003147, AC005484, AL139054, AL031680, | |
| | | | | | AL023807, AC007371, AC005527, AC002470, AC002117, AL034423, AC005280, AP000556, | |
| | | | | | AC003030, AC005072, U80017, AF001552, Z99943, AL035587, AL135960, AC004531, AJ131016, | |
| | | | | | AC006312, AL031848, AC004106, U62317, AC007774, AF047825, AC005899, AL049776, AC007193, | |
| | | | | | AC000003, AC006455, AC002519, AC004796, AC004149, AC007993, AC002300, AC002301, | |
| | | | | | AC004585, AC003689, AF088219, AC005837, AC018633, AC007055, U62293, AL034420, AC002126, | |
| | | | | | AL021707, AL078476, AC002072, U95740, AC004230, AL021391, U47924, AC005071, AL022476, | |
| | | | | | U95742, AC007227, AC005531, AC007263, AF030453, AC007226, AC002350, AJ246003, AL035703, | |
| | | | | | AC005726, AL031597, AL020993, AP000098, AC005227, AC007934, AB023049, Z99716, AC007731, | |
| | | | | | AC004815, AC003025, AC002369, AC004991, AC004552, AC002310, AC007051, AC000134, | |
| | | | | | AC007546, AL031295, AC007065, AC004448, AC005500, AC005779, AP000504, AC000097, | |
| | | | | | AC002395, AC002563, AC005529, AC007216, AC005015, AC004651, AC008044, AC005104, | |
| | | | | | AC007387, AC005057, AC007386, AL021546, AC006547, AC005036, AC005184, AC006088, | |
| | | | | | AP000694, AL117258, Z83845, AL023284, Z83819, AC006942, and AC007919. | |
| HHFFR32 | 479 | 699723 | 1-300 | 15-314 | AA234902. | |
| HHFFP17 | 480 | 880667 | 1-436 | 15-450 | AI493068, and AL024498. | |
| HHFFO46 | 481 | 530501 | 1-310 | 15-324 | | |
| HHFFM05 | 482 | 932738 | 1-458 | 15-472 | H65231. | |
| HHFFL66 | 483 | 530503 | 1-138 | 15-152 | | |
| HHFFK30 | 484 | 858051 | 1-264 | 15-278 | AA523376. | |
| HHFF159 | 485 | 739587 | 1-510 | 15-524 | N80165. | |
| HHFF108 | 486 | 960254 | 1-664 | 15-678 | T99205, Z30071, T96773, W90185, T98729, and AB020638. | |
| HHFFH76 | 487 | 767623 | 1-534 | 15-548 | AA446796, W24782, AA476520, AR050683, AF104922, and AF033855. | |
| HHFFG82 | 488 | 530662 | 1-313 | 15-327 | AI190744, AA885487, W69997, AA861491, and AW104913. | |
| HHFFF92 | 489 | 790572 | 1-782 | 15-796 | AA020789, AA001701, AW452804, AI375739, N78745, AW027244, AA731202, AI672595, | |
| | | | | | AA279753, W16651, AA894594, AA019106, and AI383433. | |
| HHFFF07 | 490 | 954258 | 1-564 | 15-578 | AA699816. | |
| HHFEB86 | 491 | 785653 | 1-648 | 15-662 | N77740, AI623295, AW385146, AW089125, and AA961452. | |
| HHFDN80 | 492 | 781634 | 1-413 | 15-427 | AA001465, AA100624, AA314602, H04982, AA351833, and AL021997. | |
| HHFD182 | 493 | 499010 | 1-506 | 15-520 | | |
| HHFDH26 | 494 | 685188 | 1-427 | 15-441 | R36135, AW001383, AA243866, AB014580, and AL078593. | |
| HHFDC10 | 495 | 968647 | 1-725 | 15-739 | AA664192, T71388, and H60250. | |
| HHFDA13 | 496 | 667804 | 1-324 | 15-338 | T99849. | |
| HHFCT63 | 497 | 572784 | 1-251 | 15-265 | AA347973, H57111, and AI217870. | |
| HHFCP39 | 498 | 429442 | 1-279 | 15-293 | AA347868, W01938, AI697383, AA347867, AA017179, W92433, W92446, H186133, AA018375, | |
| | | | | | W96275, F31654, AW117723, AW117704, N22058, AW026276, AI056174, AA993165, AI754286 | W45073, H05449, AI274006, AI921692, AI744381, AI567831, AI445768, AA586553, D25667, |
| | | | | | AI889648, AI613487, AI336206, AA516214, AA515728, AI635819, AA827978, AA515924, | |
| | | | | | AA570224, AI061147, AA678491, AI820796, Z82202, AC002036, AL035541, Z97053, Z49235, | |
| | | | | | Z98946, AC005574, AC000379, AC002312, AC004408, AC009464, AC003065, AL009172, AC005033, | |
| | | | | | AC006543, AL020989, AC007363, AC005919, AC005180, AC006544, AC004985, AL035419, | |
| | | | | | AC004694, AC005219, AC012398, AC011718, AC008132, AC007325, AC004148, AC006455, | |
| | | | | | AC006346, AL121769, AC004012, AC009509, AL034423, AL122020, AC003071, AC004777, | |
| | | | | | AL132826, AL096791, AP000354, AC000387, AL031737, AL031584, AL109807, AC002113, | |
| | | | | | AG000367, AC005781, and AF001552. | |
| HHFCO13 | 499 | 500899 | 1-328 | 15-342 | R82827, and AA347799. | |
| HHFCN59 | 500 | 739657 | 1-543 | 15-557 | W05481, and AA347756. | |
| HHFCN13 | 501 | 667805 | 1-387 | 15-401 | AA676441, W84872, AI240587, and AA347693. | |
| HHFCM51 | 502 | 509631 | 1-139 | 15-153 | | |
| HHFCH52 | 503 | 911570 | 1-343 | 15-357 | AA347276, and AA347277. | |
| HHFCF58 | 504 | 575183 | 1-517 | 15-531 | R92935, N99077, AI809891, AA347287, AI017165, and N91783. | |
| HHFCE73 | 505 | 764763 | 1-404 | 15-418 | H69189, R06505, T72747, and AA347297. | |
| HHFCE40 | 506 | 712866 | 1-465 | 15-479 | R51510, AA825938, AA347032, and AI274639. | |
| HHFCD43 | 507 | 714353 | 1-242 | 15-256 | AA347175, and AA152489. | |
| HHFCC60 | 508 | 739669 | 1-459 | 15-473 | H05854, and AA347121. | |
| HHFCC45 | 509 | 858066 | 1-203 | 15-217 | AA346956, R85908, and H86351. | |
| HHFCC20 | 510 | 600231 | 1-591 | 15-605 | AA347077, AI829548, AI732247, AA338281, Z82243, AC008072, AC002073, AP000344, AC004463, | |
| | | | | | AC004461, Z83844, AC003037, AC004462, AP000553, AC003662, L77570, AP111169, AC005919, | |
| | | | | | AL031286, AC005049, AC002300, AC004988, AP000692, AL022576, AL031985, AC008009, | |
| | | | | | AF001548, AF050154, AF121781, AC000353, and Z93023. | |
| HHFBW92 | 511 | 575156 | 1-539 | 15-553 | R92655. | |
| HHFBU63 | 512 | 745661 | 1-655 | 15-669 | T82006. | |
| HHFBU07 | 513 | 954478 | 1-564 | 15-578 | AI824082, and AI863730. | |
| HHFBT24 | 514 | 508067 | 1-436 | 15-450 | H67854, D80014, D51423, D80043, C17376, H67858, D80038, D50995, D51022, H67866, D31458, | |
| | | | | | C14973, T11417, C03092, D58283, F13647, D80022, D51079, C14331, D80247, D80522, D59859, | |
| | | | | | AI525907, D80188, C14389, AA809122, D80251, D57483, C15076, D80366, AI525235, D59889, | |
| | | | | | D80439, D58246, D81030, D59275, D80253, D80258, D80157, D81026, D80269, D80166, D80212, | |
| | | | | | D80268, D80195, AA305578, T03116, D80196, D59467, D59619, D80133, C14227, D80210, D51799, | |
| | | | | | D59503, D80391, D80164, D80240, D59317, D80045, D50979, D80219, C06015, D59787, D80227, | |
| | | | | | D59502, D80064, AA305409, Z33452, T02974, AI525914, AI557774, D59551, AI525922, Z21582, | |
| | | | | | C16955, D80168, C14077, D51213, AI535686, AI535665, AI525920, AI525917, AI525923, D45273, | |
| | | | | | Z30160, C14298, D59627, AI525242, AI525912, AI525227, AI557751, AI525237, AI525215, | |
| | | | | | AA514184, T03048, AI525228, AI525238, AI525216, AR054175, A62300, AR008277, AR008281, | |
| | | | | | AR018138, A82595, AF058696, AB002449, A84916, A62298, I14842, AB028859, AR060385, | |
| | | | | | AJ132110, AR008278, I82448, I79511, and X64588. | |
| HHFBQ94 | 515 | 796838 | 1-302 | 15-316 | N69862, AA196591, W94557, AW445181, N99038, AI695808, W92641, AA346845, AA181501, | |
| | | | | | AA100353, AA196590, C04454, and AF086522. | |
| HHFBP29 | 516 | 710894 | 1-364 | 15-378 | T80420, AI056302, T97347, T85277, H61413, N57950, AA378460, AA227248, AW402041, AA346817, | |
| | | | | | AA659435, AA187022, AI065081, T85741, R15986, AA236609, H59659, and AC004382. | |
| HHFBN17 | 517 | 589798 | 1-537 | 15-551 | AI733856, AI923050, AI791475, AA381011, N54894, AW021735, AA515725, AW024042, AI168167, | |
| | | | | | AI433008, AI580250, AI869978, AA063173, AA584170, AA524687, AA524955, AA838190, | |
| | | | | | AA513893, AI937250, H09071, AA551117, AI491817, AA651632, AW340844, AI061647, AL119713, | |
| | | | | | AI460009, AW074242, AA669155, AI053911, AL041619, AL119921, AL045813, AL037632, | |
| | | | | | AA343946, AI056177, AA362719, AW298643, AA122243, AA610688, AW023865, T99179, AI818231, | |
| | | | | | AA669564, AA330418, AA548058, AW080965, AA983199, AA487180, AA487239, AL134330, | |
| | | | | | AA811208, AI084012, AA323701, AI745553, AI808248, AI732800, AA442105, AW020340, AI613389, | |
| | | | | | AW401372, AW021597, AA410788, AL036382, AI891080, AA769720, AA778992, AA579179, | |
| | | | | | AL119941, AA486131, AL038936, AI801482, AA425118, AL043719, AW022897, N75702, AA010299, | |
| | | | | | AW080777, AI306324, AA305249, AW102846, AA577824, AA864493, AL036070, AA493695, | |
| | | | | | AA507282, AL045053, AA191659, AI821947, AI791211, AI687343, AW338883, AI344822, AI805547, | |
| | | | | | AW403720, AI133164, AA179683, AI567076, AW270343, T52097, AA385798, AI754211, AA343824. | |
| | | | | | R64559, AI860587, AI285753, AW302315, AI282511, T06648, H86363, AI149478, AA968680, | |
| | | | | | W28893, AA661921, AP000010, AP000152, AC006055, AP000514, AF156495, AC003688, AB020861, | |
| | | | | | Z93023, AL049745, AL020997, AC002395, AC007091, AC005324, AC007363, I368030, AF200923, | |
| | | | | | Z83840, AC012384, AC005933, AB014077, AC004819, I366341, I366340, AC006139, M33198, | |
| | | | | | AC006322, AL078584, AC007406, Z68755, AL008719, AF047825, AC006512, AJ006996, AC005040, | |
| | | | | | AF129756, AL080241, AF135028, AB022430, AC004778, AL031721, Z93848, AC005568, AC004496, | |
| | | | | | AD001502, U89336, AC002378, AC007199, AC004913, AP000159, AP000017, AP000094, AL049539, | |
| | | | | | AC004150, AC006014, AC004848, AC005630, AP001172, AL122020, AP000237, AC002070, | |
| | | | | | AC007686, AC006111, AC005036, AP000014, X81001, U45984, AF036110, AC005013, AC004497, | |
| | | | | | AC005338, AC005788, Z70280, Z68871, AC005327, AC004030, AC006277, AC005783, AC005337, | |
| | | | | | AL109830, AL078596, AP001051, AL035681, AC004935, AP000504, AP000123, AL022163, Z85987, | |
| | | | | | AL023279, AC002477, AL022152, AC004000, AC005738, AL034554, AC004884, AC007285, | |
| | | | | | AL024497, AC002432, AP001052, AC005880, AL031652, I395740, Z98200, AC019014, AC005730, | |
| | | | | | AP000354, AC005224, AC007546, AF176315, AP000355, AC005772, AC008151, AC005768, | |
| | | | | | AC005234, AC007537, AC005261, AC005035, AL133500, AC007298, AL139165, AC005071, | |
| | | | | | AC005015, Z99716, AF053356, AC000353, AC008372, X91841, AC004638, L20345, AL096794, | |
| | | | | | AC003104, AC005377, AC007324, AC008101, AC008079, AL135744, AC004626, AC004651, | |
| | | | | | AC004760, I362293, I363721, AC007160, AL031651, AC004209, AC002347, AF118808, I396629, | |
| | | | | | U91323, AJ010598, AC004648, AC000086, AL031346, AC004808, AL133246, AC005057, AL122023, | |
| | | | | | AC005019, AC005539, AJ131818, AF024533, AL022320, AL096770, AC005086, AL021154, | |
| | | | | | AC007666, I352112, AC007685, AL022323, AC000052, AP001137, AC004019, AC004526, AC005529, | |
| | | | | | AC007664, AC006255, AC002316, AC005320, AL121593, AC006463, AC007297, AL096678, | |
| | | | | | AL031685, AL031848, AC007308, AL137408, AC002416, I307562, AL031224, AF157816, AB029343, | |
| | | | | | AB023060, AC005606, AP000509, L05367, AL133249, AC002472, AC009498, AF055584, X12641, | |
| | | | | | A00794, AF012654, Y11873, Y12855, AP000307, AL034546, Z68276, AC004028, D00591, AC002106, | |
| | | | | | AF050154, U76377, AP000558, AF146367, AC002540, AL049733, AF104455, AC005661, I382668, | |
| | | | | | AL034555, AF045555, AC006071, AL031597, AF095725, AP00011S, AP000499, AB020865, | |
| | | | | | AP000130, AP000208, AL009051, AF124523, AC005846, AC006476, AC002425, AC006409, | |
| | | | | | AP000247, and AC005090. | |
| HHFBM11 | 518 | 968002 | 1-503 | 15-517 | AI937790, F06528, AA446518, AA446340, AA446353, AA346668, and AA446534. | |
| HHFBD83 | 519 | 781525 | 1-590 | 15-604 | AA001411, AI160471, AI433691, AI923694, AI625789, AA521470, AA442451, T70594, AA719773, | |
| | | | | | AI377638, AI003601, T96901, AA770076, AA766033, AA346585, AL137658, and AC005343. | |
| HHFBD42 | 520 | 712899 | 1-548 | 15-562 | AA151917, AI076693, AI801676, R67388, AA346551, R26159, AI240747, AI868514, R22968, | |
| | | | | | AW370946, and AW370942. | |
| HHFBB14 | 521 | 522375 | 1-447 | 15-461 | T54874, AA346439, and AL050173. | |
| HHFBA11 | 522 | 967991 | 1-361 | 15-375 | AA346357, and AA346358. | |
| HHFAB62 | 523 | 824590 | 1-700 | 15-714 | R49113, H17411, AA346385, AA857224, H16518, AW373989, AL046035, AW374001, AW373994, | |
| | | | | | AL039790, AW373998, AW364756, AW364750, AW364749, AW373996, Z32887, T18597, AI526078, | |
| | | | | | Z33559, D59751, D50992, AI535639, AI557084, AI557864, AI535660, AI536138, AI557262, | |
| | | | | | AI541205, AI525500, AI525556, AI557533, AI540903, AI525316, AI541356, AI525302, AI557809, | |
| | | | | | AI557317, AI541365, AI541075, AI557731, AA058620, AI557082, H65400, AI525852, AI557258, | |
| | | | | | AI525757, AI541353, AI541321, AI557312, R29657, AI536150, AI557474, AI541034, AI546829, | |
| | | | | | AI557602, AI540974, N71206, Z33585, AI557155, AI547177, AI557543, AI547182, AI557810. | |
| | | | | | AI557234, AI535994, AI557238, AI541450, AI536070, AI525878, AI557041, AI541346, AI557241, | |
| | | | | | AI557408, AI557039, AI541336, AI557154, AI525656, D79991, A62298, A82595, A82593, A62300, | |
| | | | | | AR050070, U94592, Z30183, AF006072, U45328, and AR025466. | |
| HHBGN74 | 524 | 765214 | 1-545 | 15-559 | AA112990, Z25197, AA214259, AA214140, AA214253, and AF177292. | |
| HHBGJ53 | 525 | 909912 | 1-388 | 15-402 | N49341, N31123, and AL135424. | |
| HHBGG10 | 526 | 963849 | 1-475 | 15-489 | AI042164. | |
| HHBGC75 | 527 | 767042 | 1-562 | 15-576 | AA426500, AA195328, and AA195188. | |
| HHBFT06 | 528 | 934826 | 1-537 | 15-551 | C18811. | |
| HHBFM77 | 529 | 771816 | 1-447 | 15-461 | AA064965, and AA129388. | |
| HHBEV93 | 530 | 792041 | 1-508 | 15-522 | H41579, H23896, and H49582. | |
| HHBES89 | 531 | 786667 | 1-453 | 15-467 | R35959, H16638, R59412, F13165, I77625, and AC004744. | |
| HHBEM49 | 532 | 722337 | 1-718 | 15-732 | AA143472, and AI023326. | |
| HHBEG80 | 533 | 951688 | 1-430 | 15-444 | AI095759, AI493168, AW206042, AI738997, AA921950, AI968444, AW197610, AI079592, | |
| | | | | | AW043953, AW242819, AI744109, AI861845, AI193079, AI668960, AW182363, AI640258, AI092922, | |
| | | | | | AA722466, N21525, W73601, AI140933, AA021471, AI720404, AA708907, AI123135, F30816, | |
| | | | | | AI366183, AI768468, T77057, AI968632, AA045707, AA259196, AA127350, H11390, F32206, | |
| | | | | | AI767021, H24345, AI418672, AW383731, N46355, AA905163, AA018209, F36514, AI564847, | |
| | | | | | T83879, F01296, AA070435, AA921795, R20767, F00344, AA196850, AA311411, AA045706, | |
| | | | | | AI969655, AI824576, AI440239, AI633062, AI250663, AI613038, AI815855, AW193872, AW262565, | |
| | | | | | AL045672, AI923989, AI251876, AL119863, AW080402, AI568138, AI926878, AI590227, AI654037, | |
| | | | | | AI478123, AI698391, AI636588, AW161579, AW129929, AL042745, AI805603, AI890507, | |
| | | | | | AW078800, AW130930, AW020419, AI866002, AI537677, AI673785, AI306705, AL036403, | |
| | | | | | AW051226, AI811785, AI288305, AI873644, AW131331, AW079572, AI580198, AI497733, AI431408, | |
| | | | | | AL040827, F27788, AA225339, AI866770, AI889168, AW151136, AL038605, AI919345, AI954504, | |
| | | | | | AI630252, AI890907, AW089275, AI826225, AI632408, AW087445, AI702073, AL120695, | |
| | | | | | AW162194, AL045266, AI564749, AW088162, AI868204, AA470491, AL037582, AL037602, | |
| | | | | | AI270183, AI470648, AI499381, AW268220, AI620075, AI802542, AI800138, AW050578, AW168031, | |
| | | | | | AI955906, AI312428, AL079963, AW161156, AI334445, AW302965, AI241923, AI345477, AI624548, | |
| | | | | | AW302992, AL036638, AL110306, AI648473, AA572758, AW196105, AI886753, AI269862, | |
| | | | | | AI612750, AI251221, AW022682, AA494167, AI929108, AW302988, AW163823, AI340603, | |
| | | | | | AW074869, AI494201, AI349957, AI491775, AI677796, AI308032, AI284131, AI858827, AI934035, | |
| | | | | | AI635492, AI874166, AI284517, AI537837, AI621179, AA427700, AI590830, AI254226, AI335209, | |
| | | | | | AI699857, AI860783, AI919500, AI570807, AW004886, AI263331, AI358701, AI624293, AI623941, | |
| | | | | | AI536574, AW238764, AW054931, AI829327, AW268302, AI419650, AW089405, AI569583, | |
| | | | | | AI863382, AW072719, AI433384, AI499285, AA911767, AW169653, AI869377, AL037454, | |
| | | | | | AW087915, AI564259, AL036980, AW169604, AL042744, AI439762, AI251830, AI890806, AI554821, | |
| | | | | | AI812032, AI589267, AW170635, AI524526, AI916419, AI620284, AI571046, AL039086, AI950664, | |
| | | | | | AI638798, AW020095, AI433976, AI889189, AI345745, AI473536, AI612885, AI783504, AL046926, | |
| | | | | | AI445990, AW089572, AW051088, AI886123, AW168485, AI690835, AI554344, AL036804, | |
| | | | | | AI610799, AI679620, AI801325, AW403717, AI863191, AI590686, AI969601, AL18781, AI445992, | |
| | | | | | AL036361, AI886415, AA580663, AI434741, AI886181, AI568870, AI471361, AI590134, AL17457, | |
| | | | | | AF134803, AF134802, L29468, U78525, U42766, X63574, I89947, I48978, AF026124 AF113694, | |
| | | | | | A08916, A08913, A08910, AL049430, AJ238278, A08909, E02349, AL080148, AL122049, A07647, | |
| | | | | | AL050277, AF091084, AL049466, AL049283, AL050024, AF087943, Y09972, AL133016, AF177401, | |
| | | | | | AL137480, AF146568, AL110222, AF028823, AR038854, AL050146, I89931, A08912, AF132676, | |
| | | | | | AF061836, I49625, AL133560, AF097996, AF090900, I48979, AL122093, E06743, AL133080, | |
| | | | | | AF111851, AF111849, AL049464, AL137533, AL122110, U35846, AF079765, AF104032, I00734, | |
| | | | | | AL050393, S61953, AF113019, Y16645, AL049300, AL137557, Y11254, AL122050, AL137459, | |
| | | | | | AF079763, AL133557, AL080127, AL050116, E00617, E00717, E00778, AL117394, AI2297, | |
| | | | | | AL117435, AF057300, AF008439, AF057299, X72889, AR011880, AJ000937, AL133640, AL137271, | |
| | | | | | Z72491, AL110221, AF090903, E08631, AF090896, E12747, AF113689, AL049452, AL049314, | |
| | | | | | E07108, S78214, AF113676, AF158248, AL133072, AL137463, AF061943, AF118094, E04233, | |
| | | | | | X84990, AL122098, A93350, U68387, AL117440, AL137521, AL080124, AR020905, AF067728, | |
| | | | | | AL137478, AL137550, AL117583, AL133098, AF017152, Z37987, S68736, X83508, U49908, | |
| | | | | | AF118064, AF118070, AL137560, X70685, AL117460, I09499, A45787, AL096744, AL133014, | |
| | | | | | A08908, AF067790, AF113677, AL110196, AF183393, X92070, AL133075, AF125948, AL133565, | |
| | | | | | A03736, AF026816, AF106862, AR013797, X82434, A65341, A77033, A77035, Z82022, AL050149, | |
| | | | | | AL050108, AL050138, AL137476, A58524, AF078844, A58523, AF119337, AF003737, AF113690, | |
| | | | | | E03348, AF090934, AF017437, AF162270, AL137526, L19437, AL133093, X87582, U67958, | |
| | | | | | AF113699, M30514, AF153205, AR059958, AL117585, L31396, I66342, AF185576, AF090901, | |
| | | | | | Y07905, X93495, E02221, L31397, AL137292, AJ012755, AF054599, U72620, I26207, AF090943, | |
| | | | | | AF061795, AF151685, U80742, AB019565, AL137556, AL080074, AF113013, AL133568, AL133113, | |
| | | | | | AJ006417, AL122121, D83032, AL080060, AF100931, I33392, AL049382, AL117416, AL110225, | |
| | | | | | AL137488, AL050092, X96540, AF111112, Y10080, AF126247, I03321, AL049938, Y11587, | |
| | | | | | AL080159, AL133665, E15569, AL122118, AL080137, AL137527, AL133606, AL110280, A93016, | |
| | | | | | A90832, U00763, I42402, I358996, L30117, AL137273, X65873, AL080158, X53587, AR038969, | |
| | | | | | AF118090, AJ242859, AF113691, AL080086, AL133104, AL133067, I09360, AR000496, U39656, | |
| | | | | | AL137538, I396683, Y14314, AF125949, AL133077, AL117432, AF081197, and AL122123. | |
| HHBEG72 | 534 | 761150 | 1-550 | 15-564 | H49710, and AL047185. | |
| HEMHA53 | 535 | 728297 | 1-593 | 15-607 | AA010194. | |
| HEMGX57 | 536 | 872083 | 1-594 | 15-608 | AA485012, AL138096, AA743445, AC004542, AC005358, AC007056, AL021368, U93037, AB014608, | |
| | | | | | AC004526, AC005209, AC004953, AL121595, AL021397, AP000692, AC005253, AC005387, | |
| | | | | | AC004148, AC005089, AC005519, U91322, AC005730, AC004774, AC005539, AC003006, AL023653, | |
| | | | | | AC000090, AC005326, AC005800, AC006960, Z83820, AC002302, AC007487, Z15025, AC004237, | |
| | | | | | Y14768, AP000505, AL031276, Z95152, AF129756, AP000962, Z82176, AC003101, AC003669, | |
| | | | | | AL109628, AC006050, AL117354, Z99571, AL031597, AC005940, AC005486, AL035530, AP000500, | |
| | | | | | and AP000555. | |
| HEMGT27 | 537 | 851065 | 1-542 | 15-556 | AA213376, AA713538, AA713930, AC002395, AC010170, AC006515, AC0003SS, D87675, and | |
| | | | | | AC005057. | |
| HEMGL56 | 538 | 767669 | 1-327 | 15-341 | AA122010, W40525, AA173833, AA622443, AA334425, AF042166, AF043045, and AL137574. | |
| HEMFN30 | 539 | 692818 | 1-1033 | 15-1047 | AA099585, AA099645, AW271704, H88677, H88726, AF086025, and AF190639. | |
| HEMFF16 | 540 | 576539 | 1-128 | 15-142 | | |
| HEMEF34 | 541 | 596812 | 1-1243 | 15-1257 | AA653240, AA812058, AA569667, AA644090, AA714224, AI755214, AL037714, AI754567, | |
| | | | | | AI525532, AI754105, AA488903, AW103406, AW023111, AA535216, AA524616, AA829036, | |
| | | | | | AI380617, AA701080, AI279417, AI366555, AI912401, AI358712, T05118, AW328331, AA704393, | |
| | | | | | AI754170, AA290878, AL079734, AI284543, AI635440, AA601278, AW237905, AI289277, AI669421, | |
| | | | | | AA019973, AA013168, AI250552, AA169245, AI792521, AL120141, AW303098, AI251284, | |
| | | | | | AI251034, AI251203, AW271977, AL043351, AI049709, AA654778, AI793172, AI793209, AA054085, | |
| | | | | | AA640685, AI275982, AI369580, AI792499, H07953, AA559241, AA747757, AI254770, AI114557, | |
| | | | | | AL043105, AL135377, AI452836, AI613389, F00564, AI612142, AA578621, T74524, AA420546, | |
| | | | | | AA572813, AC005089, Z95115, AC005225, AC007227, AC005899, AC003982, AC002302, AC007193, | |
| | | | | | AL121603, AP000692, AC006023, AC004882, AC002565, U91323, Z98742, AC007225, AL139054, | |
| | | | | | AC005015, AC004408, AC004851, Z97054, AL034420, AC005081, AC002073, AL009181, AF053356, | |
| | | | | | AL033521, AC005529, AL049576, AC005193, AL031255, AC002364, AL049776, AL080243, | |
| | | | | | AL031311, AC002350, AC005520, AC004821, AL022318, AC002400, Z84469, AC004813, U91321, | |
| | | | | | AL022316, AP000193, AC004491, AC005280, AC015853, Z93023, AC005800, AC005332, AC016830, | |
| | | | | | AC002316, Z83844, AC007055, AC005875, AC002115, AC002477, AL049856, AC002425, AC005207, | |
| | | | | | AP000117, AC009247, AC006449, AC005S19, AC005082, AC006530, AC003007, AL050318, | |
| | | | | | AP000354, AC006285, AC000134, AC005071, U62317, AC005971, AD000092, AC004099, AF129756, | |
| | | | | | AL049697, AC002544, U91326, AL021407, AC007036, AC004000, AL022326, AL132777, AL117694, | |
| | | | | | AF196779, AL078581, AF045555, AC003684, AL035588, AC006538, AL133246, AL021397, | |
| | | | | | AL133448, AC004771, AC004231, AP000689, AC006121, Z85986, AL022165, AC004596, AC010205, | |
| | | | | | AC003036, AC005412, AC004148, AC009248, AC004883, U82828, AC005261, AC007051, AC007308, | |
| | | | | | AC005011, AC006942, AL024498, L78833, AL031848, AL050321, AL049694, AC005409, AC016025, | |
| | | | | | AC004019, AC002312, AC004967, AL022320, AC006312, AC005940, AC006241, Z84466, AJ251973, | |
| | | | | | AC007917, AL020997, AL023807, AC005632, AL031432, AC016831, AC002492, AC004922, | |
| | | | | | AL096701, AC005399, Y18000, AC002347, AC006480, AC002996, AC007934, AC002511. AP000556, | |
| | | | | | AC007406, AC006139, AL121825, AC005037, Z83838, AC003665, AL031289, AP000501, AC005291, | |
| | | | | | AP000557, AC006430, AC007919, U95740, AC005823, AC007388, AC002470, AC004098, AF038458. | |
| | | | | | Z93017, AL031291, AC007201, AC005231, AC004797, AC005041. AC005480, AC004508, AL031283. | |
| | | | | | AL021391, AL008582, AL035400, AL121852, AL035587, AL050332, AC005914, AC007011, | |
| | | | | | AC004750, AL021154, Z93096, AC007371, L44140, AP000552, AF003626, AP000347, AC002430, | |
| | | | | | AP000248, AL049569, AL031670, AL008725, AC005837, AC005592, AC004876 AL129020, | |
| | | | | | AP000704, Z83826, AC006441, AC005088, AP000114, AP000046, AC004383, AL121652, AL034555, | |
| | | | | | AL049839, AC005488, AL021366, AC000052, AP000355, AP000514, AL133163, AP000247, | |
| | | | | | AC004933, AL035684, AL109758, AL135744, AC005274, AC004815, AL035249, AC007536, | |
| | | | | | AC007384, AL109827, AC000025, AC005695, AF109907, AL031588, AC005696, AL034379, U47924, | |
| | | | | | AL034549, AC005726, AL121655, AL049712, AC006536, AC005484, AL049780, AC006130, | |
| | | | | | AB023049, AC003037, AC007687, AC005736, AC004854, AC0D6026, AC006014, and Z99716. | |
| HEMEA03 | 542 | 921922 | 1-403 | 15-417 | W90730. | |
| HEMDX96 | 543 | 935963 | 1-833 | 15-847 | AA463972, AA464108, AI080269, AA528133, W04732, AA912293, AA903826, W79633, AA557293, | |
| | | | | | AI912574, AI906793, W25281, R47804, AI129889, AA365267, AI081962, W24623, AA404469, | |
| | | | | | W19157, AI189367, AI159933, AI273685, AA301944, N70568, AI291841, AA911261, AI350318, | |
| | | | | | AI541205, AI557426, AI541056, and AF111170. | |
| HEMCV44 | 544 | 574321 | 1-418 | 15-432 | | |
| HEMCK53 | 545 | 728424 | 1-495 | 15-509 | R10409, and R09783. | |
| HEMC159 | 546 | 739551 | 1-407 | 15-421 | W03547, and AC002117. | |
| HEMC141 | 547 | 712614 | 1-938 | 15-952 | AI797078, AA129381, AI701463, AI808119, AA129318, AI309212, AA970643, N47001, AI263617, | |
| | | | | | AA633720, and AB028993. | |
| HEMCC38 | 548 | 707453 | 1-372 | 15-386 | H61491, and AA699633. | |
| HEMBU26 | 549 | 684928 | 1-305 | 15-319 | R32090. | |
| HEMBT61 | 550 | 939957 | 1-449 | 15-463 | N86549, AW369713, and AB002301. | |
| HEMAL61 | 551 | 851106 | 1-520 | 15-534 | | |
| HEMAA63 | 552 | 745498 | 1-320 | 15-334 | T85402. | |
| HELHJ74 | 553 | 765696 | 1-516 | 15-530 | AA058694, AA015929, AA012840, AA054133, and AC007279. | |
| HELUD20 | 554 | 668881 | 1-421 | 15-435 | AI567076, AW419262, AW303196, AW274349, AI281881, AA720702, AW327868, AI270117, | |
| | | | | | AA533725, AW301350, AW193265, AA649642, AA446657, AA747276, AI963720, AI350211, | |
| | | | | | AL046409, AW193432, AI613280, AI085719, AI471481, AA847499, AI198376, AA581903, | |
| | | | | | AA973803, AA828704, AI619997, AI688846, AA649705, AI653886, AA525824, AI590958, AI610920, | |
| | | | | | AI375710, W79504, AA623002, AI623696, AW275432, AI801600, AW072923, AI590689, AI061334, | |
| | | | | | R77905, AW406162, AA652057, AA491814, F36273, AA357937, AA350859, AA714453, AI431303, | |
| | | | | | AA494163, AA493708, AA715355, F25199, AA773886, AI133164, AW276817, AA825357, | |
| | | | | | AW265170, T15977, AI783494, AA469451, AA502866, AI143242, AA535661, T07451, AI754658, | |
| | | | | | AW249224, AI305766, AW338417, AW088846, AW410400, AW057877, AA177061, AI761471, | |
| | | | | | F19012, AL042420, AI334435, AC005971, AF077058, AL096701, Z99716, AL049766, AC004931, | |
| | | | | | AL031286, D83989, AC004033, AL034549, AC004955, AC004808, AC005969, AC002302, AL023799, | |
| | | | | | AL031542, X55926, X54181, X54178, I51997, AL096703, AC005399, AL109654, U18394, Z86061, | |
| | | | | | AC007537, U18391, U18392, X55925, U57005, U57006, AC007386, X54180, U57009, X54179, | |
| | | | | | AL031668, AC004448, X54175, U18393, AC005730, U67801, AC005690, X55931, U57008, | |
| | | | | | AC005722, AL035687, AL022318, AC000085, AC006324, AC005846, AC005291, AC007283, | |
| | | | | | AC002452, X54176, AP000362, AC005553, U57007, AF196969, AC006210, AC002542, U18390, | |
| | | | | | AC003104, AL133396, AC012384, AC004526, U18396, AC007450, AC002564, X55932, AF117829, | |
| | | | | | AC006996, AC004453, AC005951, AC004690, AC006581, AC006367, AC007388, Z69714, AC005881, | |
| | | | | | U67825, X54177, AL121871, AL034351, AF3020862, AC004673, AC004745, AC006328, AC004552, | |
| | | | | | Z94801, AC005019, AL035695, AL031073, AL049833, AL034547, AC004072, U02532, AC007934, | |
| | | | | | AC010197, AF015153, AC005919, AC004948, AL022311, AL109653, AC007546, AC004227, U18400, | |
| | | | | | AL050308, AL049539, AP000561, AC009891, AC007385, AL109963, AP000548, AC007225, | |
| | | | | | AL133353, S77605, AL031643, AF015151, AF222684, AC004984, U73465, Z81364, AL121658, | |
| | | | | | AF064866, Z84474, AL031577, AC005409, AJ011930, AL049835, AC011311, AC004945, AC009363, | |
| | | | | | AC002038, Z92545, AL008721, AC004909, AC002301, AC006043, AC004492, Z93928, AC005342, | |
| | | | | | AL133241, AC006241, AC007676, AC007344, AC005820, AC007285, AC006374, AC005610, | |
| | | | | | AC004992, AC004796, AG004890, AC007436, AL049591, AC005387, AC005082, AC004626, | |
| | | | | | AL031848, AL031681, AL031774, AF015157, AC008064, AC006057, Z82976, AL023574, AP000688, | |
| | | | | | AC007358, AC005839, AF188024, AL133289, AC007731, AL136018, AC007227, AC005500, | |
| | | | | | AC004782, S70707, AC005703, AC005183, AL031229, AC006333, Z68289, AC000094, AC004531, | |
| | | | | | Z82201, AP000557, AC004021, AC006571, AC006478, AL109628, AF015149, AL031390, AL049647, | |
| | | | | | AC007370, AC004993, Y18000, AL121578, AC004386, AL021069, AC004629, Z84721, AL008723, | |
| | | | | | AL109801, U57004, AL049869, AC010072, AC004916, AC004864, AC007207, AF165926, AL035079, | |
| | | | | | AC007262, AP000705, AL049759, AC005033, AC011604, AL031287, and AF015148. | |
| HELHC59 | 555 | 769404 | 1-505 | 15-519 | N72137, N24885, N25625, AI128843, AI126506, AI160533, AI200037, AW450603, N35103, N26904, | |
| | | | | | AW020616, AI695490, AI802647, AA729493, AA605122, AW024969, AA806507, AA743134, | |
| | | | | | AI217597, AI312534, AI219599, N25653, AA729125, AA568681, H86995, N26781, AI829099, | |
| | | | | | AA648514, AA568193, AI032141, R73137, R26304, AW298649, AA768761, N20053, AW236999 | |
| | | | | | AW453038, AW452862, AI141901, AA988539, AI361669, AI674252, AI039557, AI299683, AI984739, | |
| | | | | | AI452444, W52017, AA543074, N34223, N28403, T25828, N36303, AI362330, AA296449, AW074182, | |
| | | | | | AI805445, W52651, and AA653691. | |
| HELGY42 | 556 | 713019 | 1-640 | 15-654 | H23853, and H46507. | |
| HELGY02 | 557 | 948302 | 1-510 | 15-524 | AI939550. | |
| HELGW31 | 558 | 610003 | 1-1645 | 15-1659 | C14389, D80268, AW177440, AW177501, AW177511, AW352117, D81026, D59502, AI905856, | |
| | | | | | AW178893, T03269, C14014, AA305578, AW179328, AW366296, AW360811, AW375405, | |
| | | | | | AA514188, D58283, D59859, D80022, C14331, D80166, D80195, D80193, D59927, D59467, D51423, | |
| | | | | | D59619, D80210, D51799, D80391, D80164, D59275, D80240, D80253, D80043, D59787, D80227, | |
| | | | | | AW378532, D81030, D80212, D80196, D80188, D80219, AW176467, C15076, D80269, D80038, | |
| | | | | | D59610, D57483, D80366, AA305409, C14429, D51022, D50979, D50995, D59889, AW178762, | |
| | | | | | D80024, AW377671, D80378, AW178775, AW360844, AW360817, D80241, D51060, AW352158, | |
| | | | | | AW375406, D80248, AW378534, AW179332, AW377672; AW179023, AW178905, D80134, D80045, | |
| | | | | | D80132, D51097, AW352170, D58253, AW352171, D80522, AW377676, AW177731, AW178907, | |
| | | | | | AW179019, AW179024, D80251, AA514186, C75259, D80133, AW178906, AW177505, AW179020, | |
| | | | | | AW178909, AW177456, AW179329, AW178980, AW177733, AW378528, AW178908, AW178754, | |
| | | | | | AW179018, AW179004, AW178914, AW178911, AW367967, AW352174, D80302, AW178774, | |
| | | | | | AW177723, D80439, D80247, T48593, AI535850, AW178983, D51103, AW367950, C14975, | |
| | | | | | AW178986, D45260, AI525913, Y17188, X82626, A84916, A67220, D89785, A62300, A62298, | |
| | | | | | A78862, D34614, D26022, D88547, AJ132110, AR018138, X67155, A25909, AF058696, AR008278, | |
| | | | | | Y12724, AR025207, AB028859, AB012117, A94995, A85396, D88507, AR066482, A44171, A85477, | |
| | | | | | AR008443, I19525, A86792, I18367, X93549, I50126, I50132, I50128, I50133, AR066488, A82595, | |
| | | | | | AR066490, AR016514, D50010, D13509, AR060138, A45456, A26615, AR052274, Y09669. | |
| | | | | | AR060385, AB002449, AR066487, A43192, A43190, AR038669, A30438, AR008408, U79457, | |
| | | | | | AF135125, AR060133, and AR008382. | |
| HELGV36 | 559 | 597120 | 1-359 | 15-373 | H79363, R79034, Z26324, and AC007199. | |
| HELGQ55 | 560 | 732223 | 1-346 | 15-360 | AA410214, W24694, and AI220186. | |
| HELGK56 | 561 | 925698 | 1-776 | 15-790 | | |
| HELGG21 | 562 | 671071 | 1-463 | 15-477 | W01622. | |
| HELGD47 | 563 | 851143 | 1-442 | 15-456 | AA496758. | |
| HELFQ55 | 564 | 732224 | 1-449 | 15-463 | R59270, F11339, and AB020864. | |
| HELFN75 | 565 | 658681 | 1-621 | 15-635 | | |
| HELFJ35 | 566 | 506277 | 1-307 | 15-321 | | |
| HELFA38 | 567 | 851146 | 1-391 | 15-405 | AC005736, AC005412, AC004491,AP000689, AI3003151, AC004796, AC004019,AC004967, | |
| | | | | | AC004913, Z83822, AF185589, AL121655, AC006120, AL031594, AF047825, and AC005291. | |
| HELEZ81 | 568 | 571340 | 1-322 | 15-336 | AA355367, AA452887, AA581247, AA501794, AW303142, AI253987, AI077941, AA904275, | |
| | | | | | AW302081, AA557790, AL079734, AA666295, AI802804, AI249688, AW151247, AA642809, | |
| | | | | | AL049712, I34294, AL031258, AC005839, AG005512, AC005520, AP000694, AC006449, AC009516, | |
| | | | | | AL021707, AC005944, AL035405, AC004148, AC004253, Z98051, AL050332, AC002544, Z93023, | |
| | | | | | Z73420, AC006276, AB023049, AC004033, AC005261, AL080242, AF109907, AC005399, AP000305, | |
| | | | | | Z85986, AC007216, AL096712, L47234, AL049760, AL022326, AC005777, AL133246, AL031686, | |
| | | | | | AP000557, AC004812, AC002395, AC005578, AL031680, AC005920, AC002470, AP000152, | |
| | | | | | AF053356, AC006241, AC006509, AF165926, AC004876, AC007664, AC005695, AC002314, | |
| | | | | | AC004655, AC005529, AL031431, AP000502, Z93017, Z83844, AC005900, AC005288, AC005256, | |
| | | | | | AJ003147, AC004796, AF196779, AC002059, AC002133, AC004962, AL109827, AC002054, | |
| | | | | | AC004991, AC005971, AC004491, AC004522, AC004099, AP000045, AC002316, AC009247, | |
| | | | | | AC005800, AC016027, AL031281, AL031005, AL049570, AP000512, AP000047, AL035587, | |
| | | | | | AL109623, AC006014, AC005255, AL034420, AC007201, AC002115, U91326, Z97630, AC004678, | |
| | | | | | AL008726, AC016830, U47924, AL049869, AL109952, AC007546, AL031662, AC002126, AC004804, | |
| | | | | | AC006236, AC007226, AC006538, AC004686, AL022315, AC007387, AL132712, AC002107, | |
| | | | | | AF111168, AC005476, AL034423, AC004883, AC006480, U95742, AL122020, AL021154, AL021977, | |
| | | | | | AC003101, AL031311, AP000252, AL022320, AL050318, AC004760, AC004966, AP000691, | |
| | | | | | AP000563, AP000692, AF001548, AC00501S, AC005581, AC004832, Z82176, AP000300, Z84480, | |
| | | | | | AC004878, AL031735, AL133448, AC008040, AC004531, AF001549, AC005057, AF207550, | |
| | | | | | AC006285, AB001523, AL050341, AC005940, AC004449, AC007565, AC007308, AC005231, | |
| | | | | | AC005082, AL031427, AC005089, Z98941, AL049856, AF030453, AC005071, AC005048, AC008044, | |
| | | | | | AC004851, AL121652, AC002300, AC005829, Z95331, and Z68870. | |
| HELET68 | 569 | 800029 | 1-446 | 15-460 | R96611, AA019463, AA018536, AC006001, AJ250042, and AJ001119. | |
| HELEO42 | 570 | 579016 | 1-556 | 15-570 | | |
| HELEH76 | 571 | 506674 | 1-418 | 15-432 | H00519, AI671775, AA689296, AW082267, AW340166, AI671779, AI298659, AA251240, AI189305, | |
| | | | | | AI695034, AW085290, AI290925, AA977259, AA806531, AA836353, AA809326, AW086155, | |
| | | | | | AA811618, AA731135, AF027156, and Z57575. | |
| HELEE83 | 572 | 577206 | 1-235 | 15-249 | AI813783, AW028943, AI872000, AA429481, AI146266, AW249720, AA496309, H71659, F31867, | |
| | | | | | AW304536, AA583579, AW194077, W24312, AA758131, AI207476, AA297698, AA531596, | |
| | | | | | AW003612, AI918419, AA654874, AA767884, AI358712, AA729512, AI299882, R74433, AI198718, | |
| | | | | | AA745302, AA058312, AA558404, AA904211, F31951, AI866971, AA487300, C14330, T39217, | |
| | | | | | AA225358, AA584183, AI310464, AA225890, AA341865, AA299422, AW381847, AW381904, | |
| | | | | | F16409, AA713735, R93919, F26072, AA343810, AA937809, AA513884, I54464, AI365625, | |
| | | | | | AA729253, AA808982, AI653999, AA516214, AI309979, AA525293, T39225, AW023111, AI915081, | |
| | | | | | AW237905, AA584493, AI873627, AA179663, AW003595, AA634926, AA018777, AA508036, | |
| | | | | | AA583568, AI198948, AI565084, AL037714, H67064, AA525407, AA644090, H15295, AI053784, | |
| | | | | | AA654482, AA515728, W52705, AA744423, AA320105, AL045476, AA298573, AI282629, AL045423, | |
| | | | | | AA302982, F33505, AW162227, AW102811, R52008, AW275679, I05118, AW161459, J03764, | |
| | | | | | AC004876, AC007225, AL133448, Z98884, AC003982, AL035405, U89337, AL049834, AL031657, | |
| | | | | | U07561, AC004848, Z97056, AL022336, AC007011, AC005914, AC005244, AC004985, AL049692, | |
| | | | | | AF039954, AC007686, M87889, AB018249, AC006050, AC004382, AF207550, AC000378, AC007546, | |
| | | | | | AC007371, AL035659, AC005328, AC002504, AC006409, AC005030, AF041001, L78833, AC005480, | |
| | | | | | AC006257, AC005340, AC005953, AL109801, AL031258, AF111168, Z99128, AP000032, AP000103, | |
| | | | | | AC006312, AL031662, AL122020, AL049569, AC005484, AC002302, AC005206, U02052, AP000356, | |
| | | | | | AC006455, AL133245, AP000512, AC005668, AL034549, AP000270, AC004106, AC005667, | |
| | | | | | AC000120, AL121652, AL031053, AC006443, AC006505, AP000045, AP000113, AC004851, X81870, | |
| | | | | | D87675, AC004675, AC004988, AC002350, AF112441, AC002126, AC002492, AC008116, AC002404, | |
| | | | | | AC006012, AC007298, AP000555, Z99755, Z86090, AF088219, AC003012, AC005786, AL032821, | |
| | | | | | AP000008, AC006511, AL049849, AL049712, AC004129, AG005529, AL096791, AP000704, | |
| | | | | | AC005621, AC005102, AC004150, AC004491, AC002476, AP000553, AC006965, AC006277, L35532, | |
| | | | | | AC005972, AC006237, AC007308, AC003667, AL021578, AC006013, AC005011, AC004125, | |
| | | | | | AC004024, AC005237, U78027, AL031767, AL022326, U11095, AP000343, AL133243, AL034423, | |
| | | | | | U95741, AC005325, AF196970, AL049539, AC005632, AL035422, AC002425, AC004662, AC004066, | |
| | | | | | AC004736, AC008064, AP000109, AP000041, AL121655, AC006084, AC004216, AC005015, | |
| | | | | | AC005351, AF047825, AC005544, AC005086, AC006372, AC005523, AF121782, AC005921, | |
| | | | | | AL022327, AL035412, AC007283, AL133233, AC005519, AP000690, AC005082, AL133035, | |
| | | | | | AC006365, Z82206, Z75746, AC004801, AC005049, AC002381, I74786, AP000501, AC006261, | |
| | | | | | AC007192, AC005291, AC002511, Z97832, AC002117, AC016025, AL031283, AC005527, AC007040, | |
| | | | | | AC005231, AC006509, AL035699, AL022163, AC005363, AL049911, AC006368, AC002996, | |
| | | | | | AF001550, AC002312, AC002195, AC006450, D00591, AC005410, AF064105, AC005993, AL023575, | |
| | | | | | AC000024, AL121748, AC007685, AC009247, AC011311, AC007226, AC002300, AC000025, | |
| | | | | | AL021707, AL022721, AC002112, AC005243, AF109907, AL049557, AC005261, AC007199, | |
| | | | | | AC005500, AC006449, AC006205, AC004900,.AL022165, AC005088, AC004760, AC004973, | |
| | | | | | AC005393, U91321, AC005952, AC003038, AL031985, Z82217, U47654, AC004771, AL133485, | |
| | | | | | Z82244, AL033527, AL049759, U95742, AC007216, AL050318, AC005778, Z93930, and AC005793. | |
| HELDT63 | 573 | 744864 | 1-697 | 15-711 | AI291317, AA501614, AA937686, AA747472, AA614010, R63317, AW062724, AI053445, AI433247, | |
| | | | | | AI832000, R79794, AA384039, T48872, T17269, AA434044, AL134369, AI673731, AL036283, | |
| | | | | | AI538812, N62650, AA434172, AI859834, AA443727, AA122223, AI370475, AI079129, T32050, | |
| | | | | | AA533408, AA227837, AI978792, AI347810, AA508873, AA857381, H29019, AI654529, H174314, | |
| | | | | | AI872503, F23255, T03900, AW272763, AI053786, AI056415, AA223249, AL036805, AW193493, | |
| | | | | | AI299050, AI049831, AA809189, AL135698, AA601680, AA326410, AW028908, AL120976, | |
| | | | | | AI979005, AA557486, AA515224, AA715004, AA553448, AL042113, AA584489, AA046466, | |
| | | | | | AA720732, AA524832, AL045077, N67816, AA342681, AW419118, AI859946, AI283090, AA507169, | |
| | | | | | F17700, AW337454, AI890385, AA577732, AI168205, AA564145, AI360514, AA528480, AI343143, | |
| | | | | | AA121919, AI524540, AI343113, AI440324, AI457597, AW439480, AA437402, AA485485, AI610201, | |
| | | | | | AI803827, AI865213, AI696901, AL033504, AL117337, AL021407, U51281, AC005701, AF205588, | |
| | | | | | AC005592, AC001228, AP000193, AP000117, AL133355, AP000050, AC002119, AF107885, | |
| | | | | | AC002524, AC008372, AC005212, Z49237, AB023051, AC006965, AC008928, AF091512, AL117328, | |
| | | | | | AC006571, AC006257, AC006285, AC003030, AL031733, AP000512, AP000695, AC020663, | |
| | | | | | AC004791, AF051976, AP000131, AP000209, AP000248, AC004472, AC007324, AC008101, | |
| | | | | | AL049780, AC007055, U07000, AC005494, AC002057, AC005914, Z84487, AC009263, AC000004, | |
| | | | | | AL050306, AC004841, AC005378, Z81002, AF045555, AL121578, AC004878, Z85986, AC006317, | |
| | | | | | Z98051, AL022353, AC005523, AC005838, AP000023, AC005081, AC006450, AC006948, Z99716, | |
| | | | | | AF148461, AG016025, AC006077, AC007014, AC008079, AC005755, AC005210, AC003667, | |
| | | | | | AP000509, AL109758, AL096773, AF055278, AC006211, AC005911, AB026898, AL031296, | |
| | | | | | AC006372, AC005512, AL008719, AC004858, AC005192, AF109907, AL080317, L32588, AF178081, | |
| | | | | | AF008243, AP000018, AP000160, AC003043, AC002367, L78833, AC011604, AC004659, AC004967, | |
| | | | | | AL022401, AL022329, AC005740, AC005365, AC009501, AC007934, AC003015, AC006143, | |
| | | | | | AP000302, AC004796, AC005593, Z68280, AC006141, AC005823, AP000494, AC004024, AC008394, | |
| | | | | | AC004974, AC005753, AC005768, Z99129, AC006166, AL022398, AC002511, AP000504, AC006048, | |
| | | | | | AL078593, AC003104, Z95116, AC008149, AC004973, AL034417, AC002980, AC006254, AC005280, | |
| | | | | | AL035410, AP000046, AP000114, Z93241, AC004765, AL031673, AC002316, AC004813, AL139054, | |
| | | | | | AL021706, AL133448, AC006947, AC005599, AL031255, AC003682, AC004263, AJ003147, | |
| | | | | | AP000701, AL096710, AL031230, AC005951, AL021939, AC006130, Z69364, AC002301, AC005037, | |
| | | | | | AC004531, AC005757, AC002539, AC004876, AC004562, Z85987, AC005759, AL031584, AC004002, | |
| | | | | | L81690, AC004797, AG007795, AP000115, AL009181, AC005726, AC005832, D84394, AL031278, | |
| | | | | | U85195, AC009294, AC005071, AL035089, AC005971, U80017, AC004870, AE000658, AC008154, | |
| | | | | | Z84469, U95740, AC002045, AC005399, AC018767, Z73963, AC006132, L05367, AC004552, | |
| | | | | | AC004526, AC005225, AL035587, AC006552, AC002432, AF111168, AL008715, AL022238, | |
| | | | | | AF129756, AC007676, AL034350, AL031121, Z95331, X96421, AC006296, AP000313, AL121603, | |
| | | | | | AC005519, AC005243, AC006160, AF200465, AP000563, AF037062, AC005197, AP001043, Z93341, | |
| | | | | | AL050333, AL022396, AL133304, AC006442, AC005772, AL035071, AC007637, and AC002418. | |
| HELDL15 | 574 | 660557 | 1-533 | 15-547 | AI989707, AI668636, AI668638, N80930, AI916749, N89573, AA687664, N89599, AI734212, | |
| | | | | | AI734241, and AC005180. | |
| HELDL08 | 575 | 959919 | 1-363 | 15-377 | AA219475. | |
| HELDK22 | 576 | 567310 | 1-994 | 15-1008 | AI801505, AA601218, AI679294, AI679871, AI889579, AA598545, AA604843, AW105729, | |
| | | | | | AL041895, AI050007, AW028950, AA604865, AI708005, AF129756, AC004805, AP000045, | |
| | | | | | AF111168, U95742, AC004491, AC007216, AC005940, AC007240, AC005837, AL035681, AL035072, | |
| | | | | | AP000557, AL096791, AL022336, L44140, AC002059, AC007182, AL121658, AC007226, AP000688, | |
| | | | | | AC004099, AC006211, AP0005545, AC002039, AC002425, AL023284, U91318, AP000553, AC004098, | |
| | | | | | AC004815, L78810, AC002996, AC002301, AC005920, AC005531, AC005288, AC006241, AP000113, | |
| | | | | | AC004526, AC004966, AC004841, AC004253, AC000052, AL080243, Z94056, AC005412, AC005057, | |
| | | | | | AL049569, AG005377, AC006538, AC006312, AC005803, AC007055, AC005089, AC003029, | |
| | | | | | AP000689, U62293, AC007666, AC005529, AL049776, AC005736, AC000134, U80017, AC004883, | |
| | | | | | AC004531, AL023553, AL022165, Z93241, AC004983, AP00006S, AL031295, AC005839, AJ010770, | |
| | | | | | AP000010, AP000952, AC004686, AC004967, AL031670, AL022238, Z97054, AC009516, U47924, | |
| | | | | | AL109628, AC004149, AC002314, AC004922, AC005255, AF030876, AC008372, Z85986, AL021397, | |
| | | | | | AC007021, AL021546, AC002544, AF053356, AL049697, AC005562, AC005004, AC004084, | |
| | | | | | AF038458, AL031311, AC004933, AP000505, AC002350, AC006121, AC005519, AP001053, | |
| | | | | | AC004216, L48038, Z97056, AC002477, AC003684, AL022320, AC005031, AC004895, U52111, | |
| | | | | | AC005015, AC006480, AC020663, AC006530, AC007011, U95743, AC005231, AC005899, Z95115, | |
| | | | | | AC006449, AC005387, AL049830, AC004132, AC002492, AC005921, AC004953, AC004659, | |
| | | | | | AC004887, AC004973, AL049869, AL031584, AC005822, AL133245, AC005488, AF109907, | |
| | | | | | AC006064, AC005520, AL121603, AC005722, AC007676, AL049795, AF107885, AL020997, | |
| | | | | | AC006285, AC005071, AC006014, AC002470, AL031291, AC002077, AL096701, AL049843, | |
| | | | | | AC003101, AC008055, AF196969, U91321, AL034379, AC005049, AC006001, AC000026, AC006115, | |
| | | | | | AL121653, U91326, AL035684, AF134726, AC005102, AC002395, AC003035, AL109984, AC007227, | |
| | | | | | AC005274, AF067844, AC007686, AC004382, AF196972, AC005300, AC005082, AP000501, | |
| | | | | | AL121825, AC010206, AL050318, AJ246003, AP000152, AC004814, AC000003, AC008040, | |
| | | | | | AP000556, AC003041, AC007637, AL031283, AC002476, AP000247, AC005081, AC005332, | |
| | | | | | AC005696, AC006965, Z98884, Z95152, AC004167, AC007546, AF045555, AL021393, AC000353. | |
| | | | | | AC005740, AC016025, AC006947, AC016830, AC007277, AP000558, AF001552, AC016027, | |
| | | | | | AC004019, AC005527, AL031985, AF205588, AC004752, AL078463, AL022316, Z82206, AP000300. | |
| | | | | | AC004812, AC007376, AL035086, AC005037, AC005484, Z83844, AC009509, AC002375, Z93023, | |
| | | | | | AL024498, and AL035450. | |
| HELDH71 | 577 | 740198 | 1-629 | 15-643 | H40372, AA190779, AI792065, AA315314, AI792074, H15516, R14652, R60461, AA147113, | |
| | | | | | AA173721, AW028676, H11571, H65653, T85096, R96576, AA337744, R02157, AA191497, R73942, | |
| | | | | | R09150, W24899, AC004537, and AF161419. | |
| HELDG91 | 578 | 790371 | 1-757 | 15-771 | AI808351, N32277, AA886875, AA256444, W81274, AI056648, W81237, AI168722, AA775321, | |
| | | | | | H97616, AA256318, H26750, H26847, H97380, AI241162, and N44565. | |
| HELCW51 | 579 | 531073 | 1-248 | 15-262 | AR025382. | |
| HELCI30 | 580 | 691024 | 1-359 | 15-373 | H29208, AA595183, and AF102777. | |
| HELCG36 | 581 | 655045 | 1-498 | 15-512 | AA037425, AI741209, R81422, and AW275774. | |
| HELBU11 | 582 | 967661 | 1-422 | 15-436 | AA136444, H96161, H61998, W03286, and AC010209. | |
| HELBC83 | 583 | 781412 | 1-531 | 15-545 | R13326, and R20026. | |
| HELAZ48 | 584 | 864515 | 1-951 | 15-965 | W19935, AA451818, AW402568, H96614, N25240, AW367995, Z44387, R20284, H06089, AA034188, | |
| | | | | | AW247735, AI903997, R15130, F11576, R14728, AA317939, N99694, AW410153, AW409593, | |
| | | | | | F05727, W16878, W21473, R15845, H46506, H20375, H50149, R73366, AA336250, AW383353, | |
| | | | | | N33873, and AA379990. | |
| HELAW26 | 585 | 684925 | 1-528 | 15-542 | H49721, H78006, and R05888. | |
| HELAQ36 | 586 | 707420 | 1-197 | 15-211 | H59264. | |
| HELAM32 | 587 | 699661 | 1-328 | 15-342 | T79826, AW136576, W44672, AI863582, N77892, H62231, AW207812, AA722922, AI374730, | |
| | | | | | AI632306, AW263176, AI770020, AI817074, N74527, AI948698, AA355234, AA676826, AI636019, | |
| | | | | | AA063431, D25824, C21355, AW235414, AW451382, AW377510, AC016830, AC005101, AC008079, | |
| | | | | | AC016027, and AC007324. | |
| HELAH32 | 588 | 699665 | 1-490 | 15-504 | W46180, AA284181, and AF086189. | |
| HCMSY80 | 589 | 526182 | 1-264 | 15-278 | | |
| HCMSQ63 | 590 | 745584 | 1-450 | 15-464 | AI679298, AI679875, AI925636, AI719454, AA235054, AI333087, AI095570, AA877427, and | |
| | | | | | AL137734. | |
| HCMSK41 | 591 | 940260 | 1-597 | 15-611 | AA719296, and AA758153. | |
| HAHSB27 | 592 | 501010 | 1-405 | 15-419 | | |
| HAHFS80 | 593 | 954432 | 1-550 | 15-564 | F22045, F31427, F00312, AA383663, and AA247490. | |
| HAHFE11 | 594 | 965293 | 1-402 | 15-416 | AA888984, and AL008718. | |
| HAHEP68 | 595 | 738501 | 1-473 | 15-487 | W95964, AA279579, AA357601, H05847, AI026709, AA065168, W95676, AW451661, AW382980, | |
| | | | | | AA065169, AI739083, AI239672, AA729486, AA768730, AW003068, and AC006504. | |
| HAHCU22 | 596 | 848831 | 1-199 | 15-213 | N56073, AW369804, R45746, AA758653, and AC006205. | |
| HAHCR15 | 597 | 810326 | 1-619 | 15-633 | W60983, AW382330, AA400064, N83192, AA248090, N30985, AA401371, C01567, and AB014569. | |
| HAHCL94 | 598 | 794044 | 1-387 | 15-401 | T86209. | |
| HAHBC03 | 599 | 923542 | 1-528 | 15-542 | AA293827, and AA402475. | |
| HAHAD95 | 600 | 865104 | 1-323 | 15-337 | AA311201. | |
| HAFBG30 | 601 | 693363 | 1-459 | 15-473 | AA156638, AW340037, AA576325, AI090498, AI652388, AA304579, AI280372, F35830, AI623386, | |
| | | | | | AI652584, F26635, AI682162, and AC005740. | |
| HAFAY37 | 602 | 928705 | 1-516 | 15-530 | AI625551, AI018611, AI004171, AW270040, AI359447, N64334, AI928764, R91517, AW205692, | |
| | | | | | AI093803, AW291368, AI056157, AA304165, AW388381, AA251845, AW193685, C00746, and | |
| | | | | | AI768273. | |
| HAFAJ63 | 603 | 845452 | 1-546 | 15-560 | R64458, AI657485, H66475, AA203500, R69944, AA303679, AA393390, H92410, AI908514, | |
| | | | | | AW406064, AA398719, H85493, AA152049, H59673, and R37909. | |
| HAECA04 | 604 | 932993 | 1-309 | 15-323 | L44310, AA302370, AC006084, and AC004820. | |
| HAEAM82 | 605 | 781539 | 1-558 | 15-572 | AA114163, AA573134, AW139049, AW204553, and AI909752. | |

[0111] TABLE 4

| Code | Description | Tissue | Organ | Cell Line | Disease | Vector |
|---|---|---|---|---|---|---|
| AR022 | a_Heart | a_Heart | | | | |
| AR023 | a_Liver | a_Liver | | | | |
| AR024 | a_mammary gland | a_mammary gland | | | | |
| AR025 | a_Prostate | a_Prostate | | | | |
| AR026 | a_small intestine | a_small intestine | | | | |
| AR027 | a_Stomach | a_Stomach | | | | |
| AR028 | Blood B cells | Blood B cells | | | | |
| AR029 | Blood B cells activated | Blood B cells | | | | |
| | | activated | | | | |
| AR030 | Blood B cells resting | Blood B cells | | | | |
| | | resting | | | | |
| AR031 | Blood T cells activated | Blood T cells | | | | |
| | | activated | | | | |
| AR032 | Blood T cells resting | Blood T cells resting | | | | |
| AR033 | brain | brain | | | | |
| AR034 | breast | breast | | | | |
| AR035 | breast cancer | breast cancer | | | | |
| AR036 | Cell Line CAOV3 | Cell Line CAOV3 | | | | |
| AR037 | cell line PA-1 | cell line PA-1 | | | | |
| AR038 | cell line transformed | cell line transformed | | | | |
| AR039 | colon | colon | | | | |
| AR040 | colon (9808co65R) | colon (9808co65R) | | | | |
| AR041 | colon (9809co15) | colon (9809co15) | | | | |
| AR042 | colon cancer | colon cancer | | | | |
| AR043 | colon cancer (9808co64R) | colon cancer | | | | |
| | | (9808co64R) | | | | |
| AR044 | colon cancer 9809co14 | colon cancer | | | | |
| | | 9809co14 | | | | |
| AR045 | corn clone 5 | corn clone 5 | | | | |
| AR046 | corn clone 6 | corn clone 6 | | | | |
| AR047 | corn clone 2 | corn clone 2 | | | | |
| AR048 | corn clone 3 | corn clone 3 | | | | |
| AR049 | Corn Clone 4 | Corn Clone 4 | | | | |
| AR050 | Donor II B Cells 24 hrs | Donor II B Cells | | | | |
| | | 24 hrs | | | | |
| AR051 | Donor II B Cells 72 hrs | Donor II B Cells | | | | |
| | | 72 hrs | | | | |
| AR052 | Donor II B-Cells 24 hrs. | Donor II B-Cells 24 | | | | |
| | | hrs. | | | | |
| AR053 | Donor II B-Cells 72 hrs | Donor II B-Cells | | | | |
| | | 72 hrs | | | | |
| AR054 | Donor II Resting B Cells | Donor II Resting B | | | | |
| | | Cells | | | | |
| AR055 | Heart | Heart | | | | |
| AR056 | Human Lung (clonetech) | Human Lung | | | | |
| | | (clonetech) | | | | |
| AR057 | Human Mammary | Human Mammary | | | | |
| | (clontech) | (clontech) | | | | |
| AR058 | Human Thymus | Human Thymus | | | | |
| | (clonetech) | (clonetech) | | | | |
| AR059 | Jurkat (unstimulated) | Jurkat | | | | |
| | | (unstimulated) | | | | |
| AR060 | Kidney | Kidney | | | | |
| AR061 | Liver | Liver | | | | |
| AR062 | Liver (Clontech) | Liver (Clontech) | | | | |
| AR063 | Lymphocytes chronic | Lymphocytes | | | | |
| | lymphocytic leukaemia | chronic lymphocytic | | | | |
| | | leukaemia | | | | |
| AR064 | Lymphocytes diffuse large | Lymphocytes | | | | |
| | B cell lymphoma | diffuse large B cell | | | | |
| | | lymphoma | | | | |
| AR065 | Lymphocytes follicular | Lymphocytes | | | | |
| | lymphoma | follicular lymphoma | | | | |
| AR066 | normal breast | normal breast | | | | |
| AR067 | Normal Ovarian | Normal Ovarian | | | | |
| | (4004901) | (4004901) | | | | |
| AR068 | Normal Ovary 9508G045 | Normal Ovary | | | | |
| | | 9508G045 | | | | |
| AR069 | Normal Ovary 9701G208 | Normal Ovary | | | | |
| | | 9701G208 | | | | |
| AR070 | Normal Ovary 9806G005 | Normal Ovary | | | | |
| | | 9806G005 | | | | |
| AR071 | Ovarian Cancer | Ovarian Cancer | | | | |
| AR072 | Ovarian Cancer | Ovarian Cancer | | | | |
| | (9702G001) | (9702G001) | | | | |
| AR073 | Ovarian Cancer | Ovarian Cancer | | | | |
| | (9707G029) | (9707G029) | | | | |
| AR074 | Ovarian Cancer | Ovarian Cancer | | | | |
| | (9804G011) | (9804G011) | | | | |
| AR075 | Ovarian Cancer | Ovarian Cancer | | | | |
| | (9806G019) | (9806G019) | | | | |
| AR076 | Ovarian Cancer | Ovarian Cancer | | | | |
| | (9807G017) | (9807G017) | | | | |
| AR077 | Ovarian Cancer | Ovarian Cancer | | | | |
| | (9809G001) | (9809G001) | | | | |
| AR078 | ovarian cancer 15799 | ovarian cancer | | | | |
| | | 15799 | | | | |
| AR079 | Ovarian Cancer | Ovarian Cancer | | | | |
| | 17717AID | 17717AID | | | | |
| AR080 | Ovarian Cancer | Ovarian Cancer | | | | |
| | 4004664B1 | 4004664B1 | | | | |
| AR081 | Ovarian Cancer | Ovarian Cancer | | | | |
| | 4005315A1 | 4005315A1 | | | | |
| AR082 | ovarian cancer 94127303 | ovarian cancer | | | | |
| | | 94127303 | | | | |
| AR083 | Ovarian Cancer 96069304 | Ovarian Cancer | | | | |
| | | 96069304 | | | | |
| AR084 | Ovarian Cancer 9707G029 | Ovarian Cancer | | | | |
| | | 9707G029 | | | | |
| AR085 | Ovarian Cancer 9807G045 | Ovarian Cancer | | | | |
| | | 9807G045 | | | | |
| AR086 | ovarian cancer 9809G001 | ovarian cancer | | | | |
| | | 9809G001 | | | | |
| AR087 | Ovarian Cancer | Ovarian Cancer | | | | |
| | 9905C032RC | 9905C032RC | | | | |
| AR088 | Ovarian cancer 9907 C00 | Ovarian cancer 9907 | | | | |
| | 3rd | C00 3rd | | | | |
| AR089 | Prostate | Prostate | | | | |
| AR090 | Prostate (clonetech) | Prostate (clonetech) | | | | |
| AR091 | prostate cancer | prostate cancer | | | | |
| AR092 | prostate cancer #15176 | prostate cancer | | | | |
| | | #15176 | | | | |
| AR093 | prostate cancer #15509 | prostate cancer | | | | |
| | | #15509 | | | | |
| AR094 | prostate cancer #15673 | prostate cancer | | | | |
| | | #15673 | | | | |
| AR095 | Small Intestine (Clontech) | Small Intestine | | | | |
| | | (Clontech) | | | | |
| AR096 | Spleen | Spleen | | | | |
| AR097 | Thymus T cells activated | Thymus T cells | | | | |
| | | activated | | | | |
| AR098 | Thymus T cells resting | Thymus T cells | | | | |
| | | resting | | | | |
| AR099 | Tonsil | Tonsil | | | | |
| AR100 | Tonsil geminal center | Tonsil geminal | | | | |
| | centroblast | center centroblast | | | | |
| AR101 | Tonsil germinal center B | Tonsil germinal | | | | |
| | cell | center B cell | | | | |
| AR102 | Tonsil lymph node | Tonsil lymph node | | | | |
| AR103 | Tonsil memory B cell | Tonsil memory B | | | | |
| | | cell | | | | |
| AR104 | Whole Brain | Whole Brain | | | | |
| AR105 | Xenograft ES-2 | Xenograft ES-2 | | | | |
| AR106 | Xenograft SW626 | Xenograft SW626 | | | | |
| H0002 | Human Adult Heart | Human Adult Heart | Heart | | | Uni-ZAP XR |
| H0019 | Human Fetal Heart | Human Fetal Heart | Heart | | | pBluescript |
| H0050 | Human Fetal Heart | Human Fetal Heart | Heart | | | Uni-ZAP XR |
| H0097 | Human Adult Heart, | Human Adult Heart | Heart | | | pBluescript |
| | subtracted | | | | | |
| H0105 | Human Fetal Heart, | Human Fetal Heart | Heart | | | pBluescript |
| | subtracted | | | | | |
| H0173 | Human Cardiomyopathy, | Human | Heart | | disease | Uni-ZAP XR |
| | RNA remake | Cardiomyopathy | | | | |
| H0196 | Human Cardiomyopathy, | Human | Heart | | | Uni-ZAP XR |
| | subtracted | Cardiomyopathy | | | | |
| H0230 | Human Cardiomyopathy, | Human | Heart | | disease | Uni-ZAP XR |
| | diff exp | Cardiomyopathy | | | | |
| H0233 | Human Fetal Heart, | Human Fetal Heart | Heart | | | pBluescript |
| | Differential (Adult- | | | | | |
| | Specific) | | | | | |
| H0242 | Human Fetal Heart, | Human Fetal Heart | Heart | | | pBluescript |
| | Differential (Fetal- | | | | | |
| | Specific) | | | | | |
| H0266 | Human Microvascular | HMEC | Vein | Cell Line | | Lambda ZAP II |
| | Endothelial Cells, fract. A | | | | | |
| H0267 | Human Microvascular | HMEC | Vein | Cell Line | | Lambda ZAP II |
| | Endothelial Cells, fract. B | | | | | |
| H0268 | Human Umbilical Vein | HUVE Cells | Umbilical | Cell Line | | Lambda ZAP II |
| | Endothelial Cells, fract. A | | vein | | | |
| H0373 | Human Heart | Human Adult Heart | Heart | | | pCMV Sport 1 |
| H0403 | H. Umbilical Vein | HUVE Cells | Umbilical | Cell Line | | Uni-ZAP XR |
| | Endothelial Cells, IL4 | | vein | | | |
| | induced | | | | | |
| H0412 | Human umbilical vein | HUVE Cells | Umbilical | Cell Line | | pSport 1 |
| | endothelial cells, IL-4 | | vein | | | |
| | induced | | | | | |
| H0413 | Human Umbilical Vein | HUVE Cells | Umbilical | Cell Line | | pSport 1 |
| | Endothelial Cells, | | vein | | | |
| | uninduced | | | | | |
| H0433 | Human Umbilical Vein | HUVE Cells | Umbilical | Cell Line | | pBluescript |
| | Endothelial cells, frac B, | | vein | | | |
| | re-excision | | | | | |
| H0437 | H Umbilical Vein | HUVE Cells | Umbilical | Cell Line | | Lambda ZAP II |
| | Endothelial Cells, frac A, | | vein | | | |
| | re-excision | | | | | |
| H0530 | Human Dermal | Human Dermal | | | | pSport 1 |
| | Endothelial | Endothelial Cells; | | | | |
| | Cells,untreated | untreated | | | | |
| H0531 | Human Dermal | Human Dermal | | | | pSport 1 |
| | Endothelial cells,treated | Endothelial | | | | |
| | | cells,treated with | | | | |
| | | VPF | | | | |
| H0599 | Human Adult Heart;re- | Human Adult Heart | Heart | | | Uni-ZAP XR |
| | excision | | | | | |
| H0619 | Fetal Heart | Human Fetal Heart | Heart | | | Uni-ZAP XR |
| H0645 | Fetal Heart, re-excision | Human Fetal Heart | Heart | | | Uni-ZAP XR |
| S0005 | Heart | Heart-left ventricle | Heart | | | pCDNA |
| S0045 | Endothelial cells-control | Endothelial cell | endothelial | Cell Line | | Uni-ZAP XR |
| | | | cell-lung | | | |
| S0046 | Endothelial-induced | Endothelial cell | endothelial | Cell Line | | Uni-ZAP XR |
| | | | cell-lung | | | |
| T0048 | Human Aortic | Human Aortic | | | | pBluescript SK- |
| | Endothelium | Endothilium | | | | |
| T0049 | Aorta endothelial cells + | Aorta endothelial | | | | pBluescript SK- |
| | TNF-a | cells | | | | |
| L0002 | Atrium cDNA library | | | | | |
| | Human heart | | | | | |
| L0060 | Human thymus NSTH II | | | | | |
| L0070 | Selected chromosome 21 | | | | | |
| | cDNA library | | | | | |
| L0142 | Human placenta cDNA | placenta | | | | |
| | (TFujiwara) | | | | | |
| L0157 | Human fetal brain | | brain | | | |
| | (TFujiwara) | | | | | |
| L0362 | Stratagene ovarian cancer | | | | | Bluescript SK- |
| | (#937219) | | | | | |
| L0364 | NCI_CGAP_GC5 | germ cell tumor | | | | Bluescript SK- |
| L0367 | NCI_CGAP_Sch1 | Schwannoma tumor | | | | Bluescript SK- |
| L0375 | NCI_CGAP_Kid6 | kidney tumor | kidney | | | Bluescript SK- |
| L0378 | NCI_CGAP_Lu1 | lung tumor | lung | | | Bluescript SK- |
| L0438 | normalized infant brain | total brain | brain | | | lafmid BA |
| | cDNA | | | | | |
| L0439 | Soares infant brain 1NIB | | whole brain | | | Lafmid BA |
| L0455 | Human retina cDNA | retina | eye | | | lambda gt10 |
| | randomly primed | | | | | |
| | sublibrary | | | | | |
| L0459 | Adult heart, Clontech | | | | | Lambda gt11 |
| L0471 | Human fetal heart, | | | | | Lambda ZAP |
| | Lambda ZAP Express | | | | | Express |
| L0485 | STRATAGENE Human | skeletal muscle | leg muscle | | | Lambda ZAPII |
| | skeletal muscle cDNA | | | | | |
| | library, cat. #936215. | | | | | |
| L0529 | NCI_CGAP_Pr6 | prostate | | | | pAMP10 |
| L0530 | NCI_CGAP_Pr8 | prostate | | | | pAMP10 |
| L0532 | NCI_CGAP_Thy1 | thyroid | | | | pAMP10 |
| L0534 | Chromosome 7 Fetal | brain | brain | | | pAMP10 |
| | Brain cDNA Library | | | | | |
| L0547 | NCI_CGAP_Pr16 | tumor | prostate | | | pAMP10 |
| L0581 | Stratagene liver (#937224) | | liver | | | pBluescript SK |
| L0588 | Stratagene endothelial cell | | | | | pBluescript SK- |
| | 937223 | | | | | |
| L0589 | Stratagene fetal retina | | | | | pBluescript SK- |
| | 937202 | | | | | |
| L0591 | Stratagene HeLa cell s3 | | | | | pBluescript SK- |
| | 937216 | | | | | |
| L0592 | Stratagene hNT neuron | | | | | pBluescript SK- |
| | (#937233) | | | | | |
| L0593 | Stratagene | | | | | pBluescript SK- |
| | neuroepithelium | | | | | |
| | (#937231) | | | | | |
| L0595 | Stratagene NT2 neuronal | neuroepithelial cells | brain | | | pBluescript SK- |
| | precursor 937230 | | | | | |
| L0596 | Stratagene colon | | colon | | | pBluescript SK- |
| | (#937204) | | | | | |
| L0598 | Morton Fetal Cochlea | cochlea | ear | | | pBluescript SK- |
| L0599 | Stratagene lung (#937210) | | lung | | | pBluescript SK- |
| L0601 | Stratagene pancreas | | pancreas | | | pBluescript SK- |
| | (#937208) | | | | | |
| L0602 | Pancreatic Islet | pancreatic islet | pancreas | | | pBluescript SK- |
| L0603 | Stratagene placenta | | placenta | | | pBluescript SK- |
| | (#937225) | | | | | |
| L0604 | Stratagene muscle 937209 | muscle | skeletal | | | pBluescript SK- |
| | | | muscle | | | |
| L0605 | Stratagene fetal spleen | fetal spleen | spleen | | | pBluescript SK- |
| | (#937205) | | | | | |
| L0608 | Stratagene lung carcinoma | lung carcinoma | lung | NCI-H69 | | pBluescript SK- |
| | 937218 | | | | | |
| L0617 | Chromosome 22 exon | | | | | pBluescriptIIKS |
| | | | | | | + |
| L0622 | HM1 | | | | | pcDNAII |
| | | | | | | (Invitrogen) |
| L0623 | HM3 | pectoral muscle | | | | pcDNAII |
| | | (after mastectomy) | | | | (Invitrogen) |
| L0637 | NCI_CGAP_Brn53 | three pooled | brain | | | pCMV-SPORT6 |
| | | meningiomas | | | | |
| L0638 | NCI_CGAP_Brn35 | tumor, 5 pooled (see | brain | | | pCMV-SPORT6 |
| | | description) | | | | |
| L0646 | NCI_CGAP_Co14 | moderately- | colon | | | pCMV-SPORT6 |
| | | differentiated | | | | |
| | | adenocarcinoma | | | | |
| L0651 | NCI_CGAP_Kid8 | renal cell tumor | kidney | | | pCMV-SPORT6 |
| L0657 | NCI_CGAP_Ov23 | tumor, 5 pooled (see | ovary | | | pCMV-SPORT6 |
| | | description) | | | | |
| L0659 | NCI_CGAP_Pan1 | adenocarcinoma | pancreas | | | pCMV-SPORT6 |
| L0662 | NCI_CGAP_Gas4 | poorly differentiated | stomach | | | pCMV-SPORT6 |
| | | adenocarcinoma | | | | |
| | | with signet r | | | | |
| L0663 | NCI_CGAP_Ut2 | moderately- | uterus | | | pCMV-SPORT6 |
| | | differentiated | | | | |
| | | endometrial | | | | |
| | | adenocarcino | | | | |
| L0665 | NCI_CGAP_Ut4 | serous papillary | uterus | | | pCMV-SPORT6 |
| | | carcinoma, high | | | | |
| | | grade, 2 pooled t | | | | |
| L0666 | NCI_CGAP_Ut1 | well-differentiated | uterus | | | pCMV-SPORT6 |
| | | endometrial | | | | |
| | | adenocarcinoma, 7 | | | | |
| L0717 | Gessler Wilms tumor | | | | | pSPORT1 |
| L0731 | Soares_pregnant_uterus_ | | uterus | | | pT7T3-Pac |
| | NbHPU | | | | | |
| L0740 | Soares melanocyte | melanocyte | | | | pT7T3D |
| | 2NbHM | | | | | (Pharmacia) |
| | | | | | | with a modified |
| | | | | | | polylinker |
| L0742 | Soares adult brain | | brain | | | pT7T3D |
| | N2b5HB55Y | | | | | (Pharmacia) |
| | | | | | | with a modified |
| | | | | | | polylinker |
| L0743 | Soares breast 2NbHBst | | breast | | | pT7T3D |
| | | | | | | (Pharmacia) |
| | | | | | | with a modified |
| | | | | | | polylinker |
| L0744 | Soares breast 3NbHBst | | breast | | | pT7T3D |
| | | | | | | (Pharmacia) |
| | | | | | | with a modified |
| | | | | | | polylinker |
| L0745 | Soares retina N2b4HR | retina | eye | | | pT7T3D |
| | | | | | | (Pharmacia) |
| | | | | | | with a modified |
| | | | | | | polylinker |
| L0746 | Soares retina N2b5HR | retina | eye | | | pT7T3D |
| | | | | | | (Pharmacia) |
| | | | | | | with a modified |
| | | | | | | polylinker |
| L0747 | Soares_fetal_heart_NbHH | | heart | | | pT7T3D |
| | 19W | | | | | (Pharmacia) |
| | | | | | | with a modified |
| | | | | | | polylinker |
| L0748 | Soares fetal liver spleen | | Liver and | | | pT7T3D |
| | INFLS | | Spleen | | | (Pharmacia) |
| | | | | | | with a modified |
| | | | | | | polylinker |
| L0749 | Soares_fetal_liver_spleen | | Liver and | | | pT7T3D |
| | _INFLS_S1 | | Spleen | | | (Pharmacia) |
| | | | | | | with a modified |
| | | | | | | polylinker |
| L0750 | Soares_fetal_lung_NbHL1 | | lung | | | pT7T3D |
| | 9W | | | | | (Pharmacia) |
| | | | | | | with a modified |
| | | | | | | polylinker |
| L0751 | Soares ovary tumor | ovarian tumor | ovary | | | pT7T3D |
| | NbHOT | | | | | (Pharmacia) |
| | | | | | | with a modified |
| | | | | | | polylinker |
| L0752 | Soares_parathyroid_tumor | parathyroid tumor | parathyroid | | | pT7T3D |
| | _NbHPA | | gland | | | (Pharmacia) |
| | | | | | | with a modified |
| | | | | | | polylinker |
| L0753 | Soares_pineal_gland_N3H | | pineal gland | | | pT7T3D |
| | PG | | | | | (Pharmacia) |
| | | | | | | with a modified |
| | | | | | | polylinker |
| L0754 | Soares placenta Nb2HP | | placenta | | | pT7T3D |
| | | | | | | (Pharmacia) |
| | | | | | | with a modified |
| | | | | | | polylinker |
| L0755 | Soares_placenta_8to9wee | | placenta | | | pT7T3D |
| | ks_2NbHP8to9W | | | | | (Pharmacia) |
| | | | | | | with a modified |
| | | | | | | polylinker |
| L0756 | Soares_multiple_sclerosis | multiple sclerosis | | | | pT7T3D |
| | _2NbHMSP | lesions | | | | (Pharmacia) |
| | | | | | | with a modified |
| | | | | | | polylinker |
| | | | | | | V_TYPE |
| L0757 | Soares_senescent_fibrobla | senescent fibroblast | | | | pT7T3D |
| | sts_NbHSF | | | | | (Pharmacia) |
| | | | | | | with a modified |
| | | | | | | polylinker |
| | | | | | | V_TYPE |
| L0758 | Soares_testis_NHT | | | | | pT7T3D-Pac |
| | | | | | | (Pharmacia) |
| | | | | | | with a modified |
| | | | | | | polylinker |
| L0759 | Soares_total_fetus_Nb2H | | | | | pT7T3D-Pac |
| | F8_9w | | | | | (Pharmacia) |
| | | | | | | with a modified |
| | | | | | | polylinker |
| L0764 | NCI_CGAP_Co3 | colon | | | | pT7T3D-Pac |
| | | | | | | (Pharmacia) |
| | | | | | | with a modified |
| | | | | | | polylinker |
| L0766 | NCI_CGAP_GCB1 | germinal center B | | | | pT7T3D-Pac |
| | | cell | | | | (Pharmacia) |
| | | | | | | with a modified |
| | | | | | | polylinker |
| L0769 | NCI_CGAP_Brn25 | anaplastic | brain | | | pT7T3D-Pac |
| | | oligodendroghoma | | | | (Pharmacia) |
| | | | | | | with a modified |
| | | | | | | polylinker |
| L0772 | NCI_CGAP_Co10 | colon tumor RER+ | colon | | | pT7T3D-Pac |
| | | | | | | (Pharmacia) |
| | | | | | | with a modified |
| | | | | | | polylinker |
| L0774 | NCI_CGAP_Kid3 | | kidney | | | pT7T3D-Pac |
| | | | | | | (Pharmacia) |
| | | | | | | with a modified |
| | | | | | | polylinker |
| L0775 | NCI_CGAP_Kid5 | 2 pooled tumors | kidney | | | pT7T3D-Pac |
| | | (clear cell type) | | | | (Pharmacia) |
| | | | | | | with a modified |
| | | | | | | polylinker |
| L0776 | NCI_CGAP_Lu5 | carcinoid | lung | | | pT7T3D-Pac |
| | | | | | | (Pharmacia) |
| | | | | | | with a modified |
| | | | | | | polylinker |
| L0777 | Soares_NhHMPu_S1 | Pooled human | mixed (see | | | pT7T3D-Pac |
| | | melanocyte, fetal | below) | | | (Pharmacia) |
| | | heart, and pregnant | | | | with a modified |
| | | | | | | polylinker |
| L0779 | Soares_NFL_T_GBC_S1 | | pooled | | | pT7T3D-Pac |
| | | | | | | (Pharmacia) |
| | | | | | | with a modified |
| | | | | | | polylinker |
| L0780 | Soares_NSF_F8_9W_OT | | pooled | | | pT7T3D-Pac |
| | _PA_P_S1 | | | | | (Pharmacia) |
| | | | | | | with a modified |
| | | | | | | polylinker |
| L0783 | NCI_CGAP_Pr22 | normal prostate | prostate | | | pT7T3D-Pac |
| | | | | | | (Pharmacia) |
| | | | | | | with a modified |
| | | | | | | polylinker |
| L0789 | NCI_CGAP_Sub3 | | | | | pT7T3D-Pac |
| | | | | | | (Pharmacia) |
| | | | | | | with a modified |
| | | | | | | polylinker |
| L0790 | NCI_CGAP_Sub4 | | | | | pT7T3D-Pac |
| | | | | | | (Pharmacia) |
| | | | | | | with a modified |
| | | | | | | polylinker |
| L0794 | NCI_CGAP_GC6 | pooled germ cell | | | | pT7T3D-Pac |
| | | tumors | | | | (Pharmacia) |
| | | | | | | with a modified |
| | | | | | | polylinker |
| L0803 | NCI_CGAP_Kid11 | | kidney | | | pT7T3D-Pac |
| | | | | | | (Pharmacia) |
| | | | | | | with a modified |
| | | | | | | polylinker |
| L0804 | NCI_CGAP_Kid12 | 2 pooled tumors | kidney | | | pT7T3D-Pac |
| | | (clear cell type) | | | | (Pharmacia) |
| | | | | | | with a modified |
| | | | | | | polylinker |
| L0805 | NCI_CGAP_Lu24 | carcinoid | lung | | | pT7T3D-Pac |
| | | | | | | (Pharmacia) |
| | | | | | | with a modified |
| | | | | | | polylinker |
| L0809 | NCI_CGAP_Pr28 | | prostate | | | pT7T3D-Pac |
| | | | | | | (Pharmacia) |
| | | | | | | with a modified |
| | | | | | | polylinker |

[0112] TABLE 5

| OMIM | |
|---|---|
| Reference | Description |
| 102200 | Somatotrophinoma |
| 102770 | Myoadenylate deaminase deficiency |
| 106100 | Angioedema, hereditary |
| 107970 | Arrhythmogenic right ventricular dysplasia-1 |
| 108725 | Atherosclerosis, susceptibility to |
| 108962 | Hypertension, salt-resistant |
| 109400 | Basal cell nevus syndrome |
| 109543 | Leukemia, chronic lymphocytic, B-cell |
| 115650 | Cataract, anterior polar-1 |
| 118210 | Charcot-Marie-Tooth neuropathy-2A |
| 120550 | C1g deficiency, type A |
| 120570 | C1g deficiency, type B |
| 120575 | C1g deficiency, type C |
| 120700 | C3 deficiency |
| 121011 | Deafness, autosomal dominant 3, 601544 |
| 121011 | Deafness, autosomal recessive 1, 220290 |
| 121800 | Corneal dystrophy, crystalline, Schnyder |
| 123270 | [Creatine kinase, brain type, ectopic expression of] |
| 129500 | Ectodermal dysplasia, hidrotic |
| 130500 | Elliptocytosis-1 |
| 131100 | Multiple endocrine neoplasia I |
| 131100 | Prolactinoma, hyperparathyroidism, carcinoid syndrome |
| 131100 | Carcinoid tumor of lung |
| 132800 | Basal cell carcinoma |
| 132800 | Epithelioma, self-healing, squamous 1, Ferguson-Smith type |
| 133171 | [Erythrocytosis, familial], 133100 |
| 133200 | Erythrokeratodermia variabilis |
| 133780 | Vitreoretinopathy, exudative, familial |
| 138140 | Glucose transport defect, blood-brain barrier |
| 138971 | Kostmann neutropenia, 202700 |
| 143890 | Hypercholesterolemia, familial |
| 146150 | Hypomelanosis of Ito |
| 147050 | Atopy |
| 147670 | Rabson-Mendenhall syndrome |
| 147670 | Diabetes mellitus, insulin-resistant, with acanthosis nigricans |
| 147670 | Leprechaunism |
| 150250 | Larsen syndrome, autosomal dominant |
| 151440 | Leukemia, T-cell acute lymphoblastoid |
| 153700 | Macular dystrophy, vitelliform type |
| 155600 | Malignant melanoma, cutaneous |
| 161015 | Mitochondrial complex I deficiency, 252010 |
| 164009 | Leukemia, acute promyelocytic, NUMA/RARA type |
| 164500 | Spinocerebellar ataxia-7 |
| 164953 | Liposarcoma |
| 168360 | Paraneoplastic sensory neuropathy |
| 168461 | Multiple myeloma, 254250 |
| 168461 | Parathyroid adenomatosis 1 |
| 168461 | Centrocytic lymphoma |
| 168468 | Metaphyseal chondrodysplasia, Murk Jansen type, 156400 |
| 171760 | Hypophosphatasia, adult, 146300 |
| 171760 | Hypophosphatasia, infantile, 241500 |
| 172411 | Colorectal cancer, resistance to |
| 176100 | Porphyria cutanea tarda |
| 176100 | Porphyria, hepatoerythropoietic |
| 177070 | Spherocytosis, hereditary, Japanese type |
| 177070 | Hermansky-Pudlak syndrome, 203300 |
| 178300 | Ptosis, hereditary congenital, 1 |
| 180297 | Anemia, hemolytic, Rh-null, suppressor type, 268150 |
| 180721 | Retinitis pigmentosa, digenic |
| 180840 | Susceptibility to IDDM |
| 182280 | Small-cell cancer of lung |
| 182500 | Cataract, congenital |
| 182600 | Spastic paraplegia-3A |
| 185470 | Myopathy due to succinate dehydrogenase deficiency |
| 186855 | Leukemia-2, T-cell acute lymphoblastic |
| 188540 | Hypothyroidism, nongoitrous |
| 188826 | Sorsby fundus dystrophy, 136900 |
| 191181 | Cervical carcinoma |
| 193235 | Vitreoretinopathy, neovascular inflammatory |
| 203800 | Alstrom syndrome |
| 209901 | Bardet-Biedl syndrome 1 |
| 211420 | Breast cancer, ductal |
| 216550 | Cohen syndrome |
| 218000 | Andermann syndrome |
| 223900 | Dysautonomia, familial |
| 227220 | [Eye color, brown] |
| 230000 | Fucosidosis |
| 230350 | Galactose epimerase deficiency |
| 230450 | Hemolytic anemia due to gamma-glutamylcysteine synthetase |
| | deficiency |
| 231670 | Glutaricaciduria, type I |
| 232600 | McArdle disease |
| 238310 | Hyperglycinemia, nonketotic, type II |
| 243500 | Isovalericacidemia |
| 245200 | Krabbe disease |
| 248611 | Maple syrup urine disease, type Ib |
| 250100 | Metachromatic leukodystrophy |
| 250800 | Methemoglobinemia, type I |
| 250800 | Methemoglobinemia, type II |
| 251600 | Microphthalmia, autosomal recessive |
| 253700 | Muscular dystrophy, limb-girdle, type 2C |
| 253800 | Walker-Warburg syndrome, 236670 |
| 253800 | Fukuyama type congenital muscular dystrophy |
| 255800 | Schwartz-Jampel syndrome |
| 259700 | Osteopetrosis, recessive |
| 259770 | Osteoporosis-pseudoglioma syndrome |
| 263200 | Polycystic kidney disease, autosomal recessive |
| 268900 | [Sarcosinemia] |
| 270100 | Situs inversus viscerum |
| 276900 | Usher syndrome, type 1A |
| 277730 | Wernicke-Korsakoff syndrome, susceptibility to |
| 278700 | Xeroderma pigmentosum, group A |
| 600045 | Xeroderma pigmentosum, group E, subtype 2 |
| 600163 | Long QT syndrome-3 |
| 600234 | HMG-CoA synthease-2 deficiency |
| 600258 | Colorectal cancer, hereditary nonpolyposis, type 3 |
| 600276 | Cerebral arteriopathy with subcortical infarcts and |
| | leukoencephalopathy, 125310 |
| 600319 | Diabetes mellitus, insulin-dependent, 4 |
| 600528 | CPT deficiency, hepatic, type 1, 255120 |
| 600631 | Enuresis, nocturnal, 1 |
| 600837 | Hirschsprung disease, 142623 |
| 600839 | Bartter syndrome, 241200 |
| 600957 | Persistent Mullerian duct syndrome, type I, 261550 |
| 600971 | Deafness, autosomal recessive 6 |
| 601226 | Progessive external ophthalmoplegia, type 2 |
| 601414 | Retinitis pigmentosa-18 |
| 601499 | Rieger syndrome, type 2 |
| 601690 | Platelet-activating factor acetylhydrolase deficiency |
| 601691 | Retinitis pigmentosa-19, 601718 |
| 601691 | Stargardt disease-1, 248200 |
| 601691 | Cone-rod dystrophy 3 |
| 601691 | Fundus flavimaculatus with macular dystrophy, 248200 |
| 601718 | Retinitis pigmentosa-19 |
| 601800 | [Hair color, brown] |
| 601843 | Hypothyroidism, congenital, 274400 |
| 601884 | [High bone mass] |
| 601885 | Cataract, zonular pulverulent-2 |
| 601916 | Pancreatic cancer |
| 601990 | Neuroblastoma |
| 602023 | Bartter syndrome, type 3 |
| 602087 | Arrhythmogenic right ventricular dysplasia-4 |
| 602088 | Nephronophthisis, infantile |
| 602091 | Marfan syndrome, atypical |
| 602094 | Lipodystrophy, familial partial |
| 602221 | Stem-cell leukemia/lymphoma syndrome |
| 602771 | Muscular dystrophy, congenital, with early spine rigidity |

[0113] Polynucleotide and Polypeptide Variants

[0114] The present invention is also directed to variants of the cardiovascular system associated polynucleotide sequence disclosed in SEQ ID NO:X or the complementary strand thereto, nucleotide sequences encoding the polypeptide of SEQ ID NO:Y, the nucleotide sequence of SEQ ID NO:X encoding the polypeptide sequence as defined in column 6 of Table 1A, nucleotide sequences encoding the polypeptide as defined in column 6 of Table 1A, the nucleotide sequence as defined in columns 8 and 9 of Table 2, nucleotide sequences encoding the polypeptide encoded by the nucleotide sequence as defined in columns 8 and 9 of Table 2, the nucleotide sequence as defined in column 6 of Table 1B, nucleotide sequences encoding the polypeptide encoded by the nucleotide sequence as defined in column 6 of Table 1B, the cDNA sequence contained in Clone ID NO:Z, and/or nucleotide sequences encoding a polypeptide encoded by the cDNA sequence contained in Clone ID NO:Z.

[0115] The present invention also encompasses variants of the polypeptide sequence disclosed in SEQ ID NO:Y, a polypeptide sequence as defined in column 6 of Table 1A, a polypeptide sequence encoded by the polynucleotide sequence in SEQ ID NO:X, a polypeptide sequence encoded by the nucleotide sequence as defined in columns 8 and 9 of Table 2, a polypeptide sequence encoded by the nucleotide sequence as defined in column 6 of Table 1B, a polypeptide sequence encoded by the complement of the polynucleotide sequence in SEQ ID NO:X, and/or a polypeptide sequence encoded by the cDNA sequence contained in Clone ID NO:Z.

[0116] “Variant” refers to a polynucleotide or polypeptide differing from the polynucleotide or polypeptide of the present invention, but retaining essential properties thereof. Generally, variants are overall closely similar, and, in many regions, identical to the polynucleotide or polypeptide of the present invention.

[0117] Thus, one aspect of the invention provides an isolated nucleic acid molecule comprising, or alternatively consisting of, a polynucleotide having a nucleotide sequence selected from the group consisting of: (a) a nucleotide sequence described in SEQ ID NO:X or contained in the cDNA sequence of Clone ID NO:Z; (b) a nucleotide sequence in SEQ ID NO:X or the cDNA in Clone ID NO:Z which encodes a mature cardiovascular system associated polypeptide; (c) a nucleotide sequence in SEQ ID NO:X or the cDNA sequence of Clone ID NO:Z, which encodes a biologically active fragment of a cardiovascular system associated polypeptide; (d) a nucleotide sequence in SEQ ID NO:X or the cDNA sequence of Clone ID NO:Z, which encodes an antigenic fragment of a cardiovascular system associated polypeptide; (e) a nucleotide sequence encoding a cardiovascular system associated polypeptide having the complete amino acid sequence of SEQ ID NO:Y or the complete amino acid sequence encoded by the cDNA in Clone ID NO:Z; (f) a nucleotide sequence encoding a mature cardiovascular system associated polypeptide of the amino acid sequence of SEQ ID NO:Y or the amino acid sequence encoded by the cDNA in Clone ID NO:Z; (g) a nucleotide sequence encoding a biologically active fragment of a cardiovascular system associated polypeptide having the complete amino acid sequence of SEQ ID NO:Y or the complete amino acid sequence encoded by the cDNA in Clone ID NO:Z; (h) a nucleotide sequence encoding an antigenic fragment of a cardiovascular system associated polypeptide having the complete amino acid sequence of SEQ ID NO:Y or the complete amino acid sequence encoded by the cDNA in Clone ID NO:Z; and (i) a nucleotide sequence complementary to any of the nucleotide sequences in (a), (b), (c), (d), (e), (f), (g), or (h), above.

[0118] The present invention is also directed to nucleic acid molecules which comprise, or alternatively consist of, a nucleotide sequence which is at least 80%, 85%, 90%, 95%, 96%, 97%, 98%, 99% or 100%, identical to, for example, any of the nucleotide sequences in (a), (b), (c), (d), (e), (f), (g), (h), or (i) above, the nucleotide coding sequence in SEQ ID NO:X or the complementary strand thereto, the nucleotide coding sequence of the cDNA contained in Clone ID NO:Z or the complementary strand thereto, a nucleotide sequence encoding the polypeptide of SEQ ID NO:Y, a nucleotide sequence encoding a polypeptide sequence encoded by the nucleotide sequence in SEQ ID NO:X, a polypeptide sequence encoded by the complement of the polynucleotide sequence in SEQ ID NO:X, a nucleotide sequence encoding the polypeptide encoded by the cDNA contained in Clone ID NO:Z, the nucleotide coding sequence in SEQ ID NO:X as defined in columns 8 and 9 of Table 2 or the complementary strand thereto, a nucleotide sequence encoding the polypeptide encoded by the nucleotide sequence in SEQ ID NO:X as defined in columns 8 and 9 of Table 2 or the complementary strand thereto, the nucleotide coding sequence in SEQ ID NO:B as defined in column 6 of Table 1B or the complementary strand thereto, a nucleotide sequence encoding the polypeptide encoded by the nucleotide sequence in SEQ ID NO:B as defined in column 6 of Table 1B or the complementary strand thereto, the nucleotide sequence in SEQ ID NO:X encoding the polypeptide sequence as defined in column 6 of Table 1A or the complementary strand thereto, nucleotide sequences encoding a polypeptide as defined in column 6 of Table 1A or the complementary strand thereto, and/or polynucleotide fragments of any of these nucleic acid molecules (e.g., those fragments described herein). Polynucleotides which hybridize to the complement of these nucleic acid molecules under stringent hybridization conditions or alternatively, under lower stringency conditions, are also encompassed by the invention, as are polypeptides encoded by these polynucleotides and nucleic acids.

[0119] In a preferred embodiment, the invention encompasses nucleic acid molecules which comprise, or alternatively, consist of a polynucleotide which hybridizes under stringent hybridization conditions, or alternatively, under lower stringency conditions, to a polynucleotide in (a), (b), (c), (d), (e), (f), (g), (h), or (i) above, as are polypeptides encoded by these polynucleotides. In another preferred embodiment, polynucleotides which hybridize to the complement of these nucleic acid molecules under stringent hybridization conditions or alternatively, under lower stringency conditions, are also encompassed by the invention, as are polypeptides encoded by these polynucleotides.

[0120] In another embodiment, the invention provides a purified protein comprising, or alternatively consisting of, a polypeptide having an amino acid sequence selected from the group consisting of: (a) the complete amino acid sequence of SEQ ID NO:Y or the complete amino acid sequence encoded by the cDNA in Clone ID NO:Z; (b) the amino acid sequence of a mature cardiovascular system associated polypeptide having the amino acid sequence of SEQ ID NO:Y or the amino acid sequence encoded by the cDNA in Clone ID NO:Z; (c) the amino acid sequence of a biologically active fragment of a cardiovascular system associated polypeptide having the complete amino acid sequence of SEQ ID NO:Y or the complete amino acid sequence encoded by the cDNA in Clone ID NO:Z; and (d) the amino acid sequence of an antigenic fragment of a cardiovascular system associated polypeptide having the complete amino acid sequence of SEQ ID NO:Y or the complete amino acid sequence encoded by the cDNA in Clone ID NO:Z.

[0121] The present invention is also directed to proteins which comprise, or alternatively consist of, an amino acid sequence which is at least 80%, 85%, 90%, 95%, 96%, 97%, 98%, 99% or 100%, identical to, for example, any of the amino acid sequences in (a), (b), (c), or (d), above, the amino acid sequence shown in SEQ ID NO:Y, the amino acid sequence encoded by the cDNA contained in Clone ID NO:Z, the amino acid sequence of the polypeptide encoded by the nucleotide sequence in SEQ ID NO:X as defined in columns 8 and 9 of Table 2, the amino acid sequence of the polypeptide encoded by the nucleotide sequence in SEQ ID NO:B as defined in column 6 of Table 1B, the amino acid sequence as defined in column 6 of Table 1A, an amino acid sequence encoded by the nucleotide sequence in SEQ ID NO:X, and an amino acid sequence encoded by the complement of the polynucleotide sequence in SEQ ID NO:X. Fragments of these polypeptides are also provided (e.g., those fragments described herein). Further proteins encoded by polynucleotides which hybridize to the complement of the nucleic acid molecules encoding these amino acid sequences under stringent hybridization conditions or alternatively, under lower stringency conditions, are also encompassed by the invention, as are the polynucleotides encoding these proteins.

[0122] By a nucleic acid having a nucleotide sequence at least, for example, 95% “identical” to a reference nucleotide sequence of the present invention, it is intended that the nucleotide sequence of the nucleic acid is identical to the reference sequence except that the nucleotide sequence may include up to five point mutations per each 100 nucleotides of the reference nucleotide sequence encoding the polypeptide. In other words, to obtain a nucleic acid having a nucleotide sequence at least 95% identical to a reference nucleotide sequence, up to 5% of the nucleotides in the reference sequence may be deleted or substituted with another nucleotide, or a number of nucleotides up to 5% of the total nucleotides in the reference sequence may be inserted into the reference sequence. The query sequence may be an entire sequence referred to in Table 1A or 2 as the ORF (open reading frame), or any fragment specified, as described herein.

[0123] As a practical matter, whether any particular nucleic acid molecule or polypeptide is at least 80%, 85%, 90%, 95%, 96%, 97%, 98% or 99% identical to a nucleotide sequence of the present invention can be determined conventionally using known computer programs. A preferred method for determining the best overall match between a query sequence (a sequence of the present invention) and a subject sequence, also referred to as a global sequence alignment, can be determined using the FASTDB computer program based on the algorithm of Brutlag et al. (Comp. App. Biosci. 6:237-245 (1990)). In a sequence alignment the query and subject sequences are both DNA sequences. An RNA sequence can be compared by converting U's to T's. The result of said global sequence alignment is expressed as percent identity. Preferred parameters used in a FASTDB alignment of DNA sequences to calculate percent identity are: Matrix=Unitary, k-tuple=4, Mismatch Penalty=1, Joining Penalty=30, Randomization Group Length=0, Cutoff Score=1, Gap Penalty=5, Gap Size Penalty 0.05, Window Size=500 or the length of the subject nucleotide sequence, whichever is shorter.

[0124] If the subject sequence is shorter than the query sequence because of 5′ or 3′ deletions, not because of internal deletions, a manual correction must be made to the results. This is because the FASTDB program does not account for 5′ and 3′ truncations of the subject sequence when calculating percent identity. For subject sequences truncated at the 5′ or 3′ ends, relative to the query sequence, the percent identity is corrected by calculating the number of bases of the query sequence that are 5′ and 3′ of the subject sequence, which are not matched/aligned, as a percent of the total bases of the query sequence. Whether a nucleotide is matched/aligned is determined by results of the FASTDB sequence alignment. This percentage is then subtracted from the percent identity, calculated by the above FASTDB program using the specified parameters, to arrive at a final percent identity score. This corrected score is what is used for the purposes of the present invention. Only bases outside the 5′ and 3′ bases of the subject sequence, as displayed by the FASTDB alignment, which are not matched/aligned with the query sequence, are calculated for the purposes of manually adjusting the percent identity score.

[0125] For example, a 90 base subject sequence is aligned to a 100 base query sequence to determine percent identity. The deletions occur at the 5′ end of the subject sequence and therefore, the FASTDB alignment does not show a matched/alignment of the first 10 bases at 5′ end. The 10 unpaired bases represent 10% of the sequence (number of bases at the 5′ and 3′ ends not matched/total number of bases in the query sequence) so 10% is subtracted from the percent identity score calculated by the FASTDB program. If the remaining 90 bases were perfectly matched the final percent identity would be 90%. In another example, a 90 base subject sequence is compared with a 100 base query sequence. This time the deletions are internal deletions so that there are no bases on the 5′ or 3′ of the subject sequence which are not matched/aligned with the query. In this case the percent identity calculated by FASTDB is not manually corrected. Once again, only bases 5′ and 3′ of the subject sequence which are not matched/aligned with the query sequence are manually corrected for. No other manual corrections are to made for the purposes of the present invention.

[0126] By a polypeptide having an amino acid sequence at least, for example, 95% “identical” to a query amino acid sequence of the present invention, it is intended that the amino acid sequence of the subject polypeptide is identical to the query sequence except that the subject polypeptide sequence may include up to five amino acid alterations per each 100 amino acids of the query amino acid sequence. In other words, to obtain a polypeptide having an amino acid sequence at least 95% identical to a query amino acid sequence, up to 5% of the amino acid residues in the subject sequence may be inserted, deleted, (indels) or substituted with another amino acid. These alterations of the reference sequence may occur at the amino or carboxy terminal positions of the reference amino acid sequence or anywhere between those terminal positions, interspersed either individually among residues in the reference sequence or in one or more contiguous groups within the reference sequence.

[0127] As a practical matter, whether any particular polypeptide is at least 80%, 85%, 90%, 95%, 96%, 97%, 98% or 99% identical to, for instance, the amino acid sequence of a polypeptide referred to in Table 1A (e.g., an amino acid sequence identified in columns 5 or 6) or Table 2 (e.g., the amino acid sequence of the polypeptide encoded by the polynucleotide sequence defined in columns 8 and 9 of Table 2) or a fragment thereof, the amino acid sequence of the polypeptide encoded by the polynucleotide sequence in SEQ ID NO:B as defined in column 6 of Table 1B or a fragment thereof, the amino acid sequence of the polypeptide encoded by the nucleotide sequence in SEQ ID NO:X or a fragment thereof, or an amino acid sequence of the polypeptide encoded by cDNA contained in Clone ID NO:Z, or a fragment thereof, can be determined conventionally using known computer programs. A preferred method for determining the best overall match between a query sequence (a sequence of the present invention) and a subject sequence, also referred to as a global sequence alignment, can be determined using the FASTDB computer program based on the algorithm of Brutlag et al. (Comp. App. Biosci.6:237-245 (1990)). In a sequence alignment the query and subject sequences are either both nucleotide sequences or both amino acid sequences. The result of said global sequence alignment is expressed as percent identity. Preferred parameters used in a FASTDB amino acid alignment are: Matrix=PAM 0, k-tuple=2, Mismatch Penalty=1, Joining Penalty=20, Randomization Group Length=0, Cutoff Score=1, Window Size=sequence length, Gap Penalty=5, Gap Size Penalty=0.05, Window Size=500 or the length of the subject amino acid sequence, whichever is shorter.

[0128] If the subject sequence is shorter than the query sequence due to N- or C-terminal deletions, not because of internal deletions, a manual correction must be made to the results. This is because the FASTDB program does not account for N- and C-terminal truncations of the subject sequence when calculating global percent identity. For subject sequences truncated at the N- and C-termini, relative to the query sequence, the percent identity is corrected by calculating the number of residues of the query sequence that are N- and C-terminal of the subject sequence, which are not matched/aligned with a corresponding subject residue, as a percent of the total bases of the query sequence. Whether a residue is matched/aligned is determined by results of the FASTDB sequence alignment. This percentage is then subtracted from the percent identity, calculated by the above FASTDB program using the specified parameters, to arrive at a final percent identity score. This final percent identity score is what is used for the purposes of the present invention. Only residues to the N- and C-termini of the subject sequence, which are not matched/aligned with the query sequence, are considered for the purposes of manually adjusting the percent identity score. That is, only query residue positions outside the farthest N- and C-terminal residues of the subject sequence.

[0129] For example, a 90 amino acid residue subject sequence is aligned with a 100 residue query sequence to determine percent identity. The deletion occurs at the N-terminus of the subject sequence and therefore, the FASTDB alignment does not show a matching/alignment of the first 10 residues at the N-terminus. The 10 unpaired residues represent 10% of the sequence (number of residues at the N- and C-termini not matched/total number of residues in the query sequence) so 10% is subtracted from the percent identity score calculated by the FASTDB program. If the remaining 90 residues were perfectly matched the final percent identity would be 90%. In another example, a 90 residue subject sequence is compared with a 100 residue query sequence. This time the deletions are internal deletions so there are no residues at the N- or C-termini of the subject sequence which are not matched/aligned with the query. In this case the percent identity calculated by FASTDB is not manually corrected. Once again, only residue positions outside the N- and C-terminal ends of the subject sequence, as displayed in the FASTDB alignment, which are not matched/aligned with the query sequence are manually corrected for. No other manual corrections are to be made for the purposes of the present invention.

[0130] The polynucleotide variants of the invention may contain alterations in the coding regions, non-coding regions, or both. Especially preferred are polynucleotide variants containing alterations, which produce silent substitutions, additions, or deletions, but do not alter the properties or activities of the encoded polypeptide. Nucleotide variants produced by silent substitutions due to the degeneracy of the genetic code are preferred. Moreover, polypeptide variants in which less than 50, less than 40, less than 30, less than 20, less than 10, or 5-50, 5-25, 5-10, 1-5, or 1-2 amino acids are substituted, deleted, or added in any combination are also preferred. Polynucleotide variants can be produced for a variety of reasons, e.g., to optimize codon expression for a particular host (change codons in the human mRNA to those preferred by a bacterial host such as E. coli).

[0131] Naturally occurring variants are called “allelic variants,” and refer to one of several alternate forms of a gene occupying a given locus on a chromosome of an organism. (Genes II, Lewin, B., ed., John Wiley & Sons, New York (1985).) These allelic variants can vary at either the polynucleotide and/or polypeptide level and are included in the present invention. Alternatively, non-naturally occurring variants may be produced by mutagenesis techniques or by direct synthesis.

[0132] Using known methods of protein engineering and recombinant DNA technology, variants may be generated to improve or alter the characteristics of the polypeptides of the present invention. For instance, one or more amino acids can be deleted from the N-terminus or C-terminus of the polypeptides of the present invention without substantial loss o biological function. As an example, the authors of Ron et al., J. Biol. Chem. 268: 2984-2988 (1993), reported variant KGF proteins having heparin binding activity even after deleting 3, 8, or 27 amino-terminal amino acid residues. Similarly, Interferon gamma exhibited up to ten times higher activity after deleting 8-10 amino acid residues from the carboxy terminus of this protein. (Dobeli et al., J. Biotechnology 7:199-216 (1988).)

[0133] Moreover, ample evidence demonstrates that variants often retain a biological activity similar to that of the naturally occurring protein. For example, Gayle and coworkers (J. Biol. Chem. 268:22105-22111 (1993)) conducted extensive mutational analysis of human cytokine IL-1a. They used random mutagenesis to generate over 3,500 individual IL-1a mutants that averaged 2.5 amino acid changes per variant over the entire length of the molecule. Multiple mutations were examined at every possible amino acid position. The investigators found that “[m]ost of the molecule could be altered with little effect on either [binding or biological activity].” In fact, only 23 unique amino acid sequences, out of more than 3,500 nucleotide sequences examined, produced a protein that significantly differed in activity from wild-type.

[0134] Furthermore, even if deleting one or more amino acids from the N-terminus or C-terminus of a polypeptide results in modification or loss of one or more biological functions, other biological activities may still be retained. For example, the ability of a deletion variant to induce and/or to bind antibodies, which recognize the secreted form will likely be retained when less than the majority of the residues of the secreted form are removed from the N-terminus or C-terminus. Whether a particular polypeptide lacking N- or C-terminal residues of a protein retains such immunogenic activities can readily be determined by routine methods described herein and otherwise known in the art.

[0135] Thus, the invention further includes polypeptide variants which show a functional activity (e.g., biological activity) of the polypeptides of the invention. Such variants include deletions, insertions, inversions, repeats, and substitutions selected according to general rules known in the art so as have little effect on activity.

[0136] The present application is directed to nucleic acid molecules at least 80%, 85%, 90%, 95%, 96%, 97%, 98%, 99% or 100% identical to the nucleic acid sequences disclosed herein, (e.g., encoding a polypeptide having the amino acid sequence of an N and/or C terminal deletion), irrespective of whether they encode a polypeptide having functional activity. This is because even where a particular nucleic acid molecule does not encode a polypeptide having functional activity, one of skill in the art would still know how to use the nucleic acid molecule, for instance, as a hybridization probe or a polymerase chain reaction (PCR) primer. Uses of the nucleic acid molecules of the present invention that do not encode a polypeptide having functional activity include, inter alia, (1) isolating a gene or allelic or splice variants thereof in a cDNA library; (2) in situ hybridization (e.g., “FISH”) to metaphase chromosomal spreads to provide precise chromosomal location of the gene, as described in Verma et al., Human Chromosomes: A Manual of Basic Techniques, Pergamon Press, New York (1988); (3) Northern Blot analysis for detecting mRNA expression in specific tissues (e.g., normal cardiovascular system or diseased cardiovascular system tissues); and (4) in situ hybridization (e.g., histochemistry) for detecting mRNA expression in specific tissues (e.g., normal cardiovascular system or diseased cardiovascular system tissues).

[0137] Preferred, however, are nucleic acid molecules having sequences at least 80%, 85%, 90%, 95%, 96%, 97%, 98%, 99% or 100% identical to the nucleic acid sequences disclosed herein, which do, in fact, encode a polypeptide having functional activity. By a polypeptide having “functional activity” is meant, a polypeptide capable of displaying one or more known functional activities associated with a full-length (complete) protein of the invention. Such functional activities include, but are not limited to, biological activity, antigenicity [ability to bind (or compete with a polypeptide of the invention for binding) to an anti-polypeptide of the invention antibody], immunogenicity (ability to generate antibody which binds to a specific polypeptide of the invention), ability to form multimers with polypeptides of the invention, and ability to bind to a receptor or ligand for a polypeptide of the invention.

[0138] The functional activity of the polypeptides, and fragments, variants and derivatives of the invention, can be assayed by various methods.

[0139] For example, in one embodiment where one is assaying for the ability to bind or compete with full-length polypeptide of the present invention for binding to an anti-polypeptide of the invention antibody, various immunoassays known in the art can be used, including but not limited to, competitive and non-competitive assay systems using techniques such as radioimmunoassays, ELISA (enzyme linked immunosorbent assay), “sandwich” immunoassays, immunoradiometric assays, gel diffusion precipitation reactions, immunodiffusion assays, in situ immunoassays (using colloidal gold, enzyme or radioisotope labels, for example), western blots, precipitation reactions, agglutination assays (e.g., gel agglutination assays, hemagglutination assays), complement fixation assays, immunofluorescence assays, protein A assays, and immunoelectrophoresis assays, etc. In one embodiment, antibody binding is detected by detecting a label on the primary antibody. In another embodiment, the primary antibody is detected by detecting binding of a secondary antibody or reagent to the primary antibody. In a further embodiment, the secondary antibody is labeled. Many means are known in the art for detecting binding in an immunoassay and are within the scope of the present invention.

[0140] In another embodiment, where a ligand is identified, or the ability of a polypeptide fragment, variant or derivative of the invention to multimerize is being evaluated, binding can be assayed, e.g., by means well-known in the art, such as, for example, reducing and non-reducing gel chromatography, protein affinity chromatography, and affinity blotting. See generally, Phizicky et al., Microbiol. Rev. 59:94-123 (1995). In another embodiment, the ability of physiological correlates of a polypeptide of the present invention to bind to a substrate(s) of the polypeptide of the invention can be routinely assayed using techniques known in the art.

[0141] In addition, assays described herein (see Examples) and otherwise known in the art may routinely be applied to measure the ability of polypeptides of the present invention and fragments, variants and derivatives thereof to elicit polypeptide related biological activity (either in vitro or in vivo). Other methods will be known to the skilled artisan and are within the scope of the invention.

[0142] Of course, due to the degeneracy of the genetic code, one of ordinary skill in the art will immediately recognize that a large number of the nucleic acid molecules having a sequence at least 80%, 85%, 90%, 95%, 96%, 97%, 98%, 99%, or 100% identical to, for example, the nucleic acid sequence of the cDNA contained in Clone ID NO:Z, a nucleic acid sequence referred to in Table 1A (e.g., SEQ ID NO:X), a nucleic acid sequence disclosed in Table 2 (e.g., the nucleic acid sequence delineated in columns 8 and 9) or fragments thereof, will encode polypeptides “having functional activity.” In fact, since degenerate variants of any of these nucleotide sequences all encode the same polypeptide, in many instances, this will be clear to the skilled artisan even without performing the above described comparison assay. It will be further recognized in the art that, for such nucleic acid molecules that are not degenerate variants, a reasonable number will also encode a polypeptide having functional activity. This is because the skilled artisan is fully aware of amino acid substitutions that are either less likely or not likely to significantly effect protein function (e.g., replacing one aliphatic amino acid with a second aliphatic amino acid), as further described below.

[0143] For example, guidance concerning how to make phenotypically silent amino acid substitutions is provided in Bowie et al., “Deciphering the Message in Protein Sequences: Tolerance to Amino Acid Substitutions,” Science 247:1306-1310 (1990), wherein the authors indicate that there are two main strategies for studying the tolerance of an amino acid sequence to change.

[0144] The first strategy exploits the tolerance of amino acid substitutions by natural selection during the process of evolution. By comparing amino acid sequences in different species, conserved amino acids can be identified. These conserved amino acids are likely important for protein function. In contrast, the amino acid positions where substitutions have been tolerated by natural selection indicates that these positions are not critical for protein function. Thus, positions tolerating amino acid substitution could be modified while still maintaining biological activity of the protein.

[0145] The second strategy uses genetic engineering to introduce amino acid changes at specific positions of a cloned gene to identify regions critical for protein function. For example, site directed mutagenesis or alanine-scanning mutagenesis (introduction of single alanine mutations at every residue in the molecule) can be used. See Cunningham et al., Science 244:1081-1085 (1989). The resulting mutant molecules can then be tested for biological activity.

[0146] As the authors state, these two strategies have revealed that proteins are surprisingly tolerant of amino acid substitutions. The authors further indicate which amino acid changes are likely to be permissive at certain amino acid positions in the protein. For example, most buried (within the tertiary structure of the protein) amino acid residues require nonpolar side chains, whereas few features of surface side chains are generally conserved. Moreover, tolerated conservative amino acid substitutions involve replacement of the aliphatic or hydrophobic amino acids Ala, Val, Leu and Ile; replacement of the hydroxyl residues Ser and Thr; replacement of the acidic residues Asp and Glu; replacement of the amide residues Asn and Gln, replacement of the basic residues Lys, Arg, and His; replacement of the aromatic residues Phe, Tyr, and Trp, and replacement of the small-sized amino acids Ala, Ser, Thr, Met, and Gly. Besides conservative amino acid substitutions, variants of the present invention include (i) substitutions with one or more of the non-conserved amino acid residues, where the substituted amino acid residues may or may not be one encoded by the genetic code, or (ii) substitutions with one or more of the amino acid residues having a substituent group, or (iii) fusion of the mature polypeptide with another compound, such as a compound to increase the stability and/or solubility of the polypeptide (for example, polyethylene glycol), or (iv) fusion of the polypeptide with additional amino acids, such as, for example, an IgG Fc fusion region peptide, serum albumin (preferably human serum albumin) or a fragment or variant thereof, or leader or secretory sequence, or a sequence facilitating purification. Such variant polypeptides are deemed to be within the scope of those skilled in the art from the teachings herein.

[0147] For example, polypeptide variants containing amino acid substitutions of charged amino acids with other charged or neutral amino acids may produce proteins with improved characteristics, such as less aggregation. Aggregation of pharmaceutical formulations both reduces activity and increases clearance due to the aggregate's immunogenic activity. See Pinckard et al., Clin. Exp. Immunol. 2:331-340 (1967); Robbins et al., Diabetes 36: 838-845 (1987); Cleland et al., Crit. Rev. Therapeutic Drug Carrier Systems 10:307-377 (1993).

[0148] A further embodiment of the invention relates to polypeptides which comprise the amino acid sequence of a polypeptide having an amino acid sequence which contains at least one amino acid substitution, but not more than 50 amino acid substitutions, even more preferably, not more than 40 amino acid substitutions, still more preferably, not more than 30 amino acid substitutions, and still even more preferably, not more than 20 amino acid substitutions from a polypeptide sequence disclosed herein. Of course it is highly preferable for a polypeptide to have an amino acid sequence which comprises the amino acid sequence of a polypeptide of SEQ ID NO:Y, an amino acid sequence encoded by SEQ ID NO:X, an amino acid sequence encoded by the portion of SEQ ID NO:X as defined in columns 8 and 9 of Table 2, an amino acid sequence encoded by the complement of SEQ ID NO:X, and/or the amino acid sequence encoded by cDNA contained in Clone ID NO:Z which contains, in order of ever-increasing preference, at least one, but not more than 10, 9, 8, 7, 6, 5, 4, 3, 2 or 1 amino acid substitutions.

[0149] In specific embodiments, the polypeptides of the invention comprise, or alternatively, consist of, fragments or variants of a reference amino acid sequence selected from: (a) the amino acid sequence of SEQ ID NO:Y or fragments thereof (e.g., the mature form and/or other fragments described herein); (b) the amino acid sequence encoded by SEQ ID NO:X or fragments thereof; (c) the amino acid sequence encoded by the complement of SEQ ID NO;X or fragments thereof; (d) the amino acid sequence encoded by the portion of SEQ ID NO:X as defined in columns 8 and 9 of Table 2 or fragments thereof; and (e) the amino acid sequence encoded by cDNA contained in Clone ID NO:Z or fragments thereof; wherein the fragments or variants have 1-5, 5-10, 5-25, 5-50, 10-50 or 50-150, amino acid residue additions, substitutions, and/or deletions when compared to the reference amino acid sequence. In preferred embodiments, the amino acid substitutions are conservative. Polynucleotides encoding these polypeptides are also encompassed by the invention.

[0150] Polynucleotide and Polypeptide Fragments

[0151] The present invention is also directed to polynucleotide fragments of the polynucleotides (nucleic acids) of the invention. In the present invention, a “polynucleotide fragment” refers to a polynucleotide having a nucleic acid sequence which, for example: is a portion of the cDNA contained in Clone ID NO:Z or the complementary strand thereto; is a portion of the polynucleotide sequence encoding the polypeptide encoded by the cDNA contained in Clone ID NO:Z or the complementary strand thereto; is a portion of a polynucleotide sequence encoding the amino acid sequence encoded by the region of SEQ ID NO:X as defined in columns 8 and 9 of Table 2 or the complementary strand thereto; is a portion of the polynucleotide sequence of SEQ ID NO:X as defined in columns 8 and 9 of Table 2 or the complementary strand thereto; is a portion of the polynucleotide sequence in SEQ ID NO:X or the complementary strand thereto; is a polynucleotide sequence encoding a portion of the polypeptide of SEQ ID NO:Y; is a polynucleotide sequence encoding a portion of a polypeptide encoded by SEQ ID NO:X; is a polynucleotide sequence encoding a portion of a polypeptide encoded by the complement of the polynucleotide sequence in SEQ ID NO:X; is a portion of a polynucleotide sequence encoding the amino acid sequence encoded by the region of SEQ ID NO:B as defined in column 6 of Table 1B or the complementary strand thereto; or is a portion of the polynucleotide sequence of SEQ ID NO:B as defined in column 6 of Table 1B or the complementary strand thereto.

[0152] The nucleotide fragments of the invention are preferably at least about 15 nt, and more preferably at least about 20 nt, still more preferably at least about 30 nt, and even more preferably, at least about 40 nt, at least about 50 nt, at least about 75 nt, or at least about 150 nt in length. A fragment “at least 20 nt in length,” for example, is intended to include 20 or more contiguous bases from the cDNA sequence contained in Clone ID NO:Z, or the nucleotide sequence shown in SEQ ID NO:X or the complementary stand thereto. In this context “about” includes the particularly recited value or a value larger or smaller by several (5, 4, 3, 2, or 1) nucleotides, at either terminus or at both termini. These nucleotide fragments have uses that include, but are not limited to, as diagnostic probes and primers as discussed herein. Of course, larger fragments (e.g., at least 160, 170, 180, 190, 200, 250, 500, 600, 1000, or 2000 nucleotides in length) are also encompassed by the invention.

[0153] Moreover, representative examples of polynucleotide fragments of the invention, comprise, or alternatively consist of, a sequence from about nucleotide number 1-50, 51-100, 101-150, 151-200, 201-250, 251-300, 301-350, 351-400, 401-450, 451-500, 501-550, 551-600, 651-700, 701-750, 751-800, 800-850, 851-900, 901-950, 951-1000, 1001-1050, 1051-1100, 1101-1150, 1151-1200, 1201-1250, 1251-1300, 1301-1350, 1351-1400, 1401-1450, 1451-1500, 1501-1550, 1551-1600, 1601-1650, 1651-1700, 1701-1750, 1751-1800, 1801-1850, 1851-1900, 1901-1950, 1951-2000, 2001-2050, 2051-2100, 2101-2150, 2151-2200, 2201-2250, 2251-2300, 2301-2350, 2351-2400, 2401-2450, 2451-2500, 2501-2550, 2551-2600, 2601-2650, 2651-2700, 2701-2750, 2751-2800, 2801-2850, 2851-2900, 2901-2950, 2951-3000, 3001-3050, 3051-3100, 3101-3150, 3151-3200, 3201-3250, 3251-3300, 3301-3350, 3351-3400, 3401-3450, 3451-3500, 3501-3550, 3551-3600, 3601-3650, 3651-3700, 3701-3750, 3751-3800, 3801-3850, 3851-3900, 3901-3950, 3951-4000, 4001-4050, 4051-4100, 4101-4150, 4151-4200, 4201-4250, 4251-4300, 4301-4350, 4351-4400, 4401-4450, 4451-4500, 4501-4550, 4551-4600, 4601-4650, 4651-4700, 4701-4750, 4751-4800, 4801-4850, 4851-4900, 4901-4950, 4951-5000, 5001-5050, 5051-5100, 5101-5150, 5151-5200, 5201-5250, 5251-5300, 5301-5350, 5351-5400, 5401-5450, 5451-5500, 5501-5550, 5551-5600, 5601-5650, 5651-5700, 5701-5750, 5751-5800, 5801-5850, 5851-5900, 5901-5950, 5951-6000, 6001-6050, 6051-6100, 6101-6150, 6151-6200, 6201-6250, 6251-6300, 6301-6350, 6351-6400, 6401-6450, 6451-6500, 6501-6550, 6551-6600, 6601-6650, 6651-6700, 6701-6750, 6751-6800, 6801-6850, 6851-6900, 6901-6950, 6951-7000, 7001-7050, 7051-7100, 7101-7150, 7151-7200, 7201-7250, 7251-7300 or 7301 to the end of SEQ ID NO:X, or the complementary strand thereto. In this context “about” includes the particularly recited range or a range larger or smaller by several (5, 4, 3, 2, or 1) nucleotides, at either terminus or at both termini. Preferably, these fragments encode a polypeptide, which has a functional activity (e.g., biological activity). More preferably, these polynucleotides can be used as probes or primers as discussed herein. Polynucleotides which hybridize to one or more of these polynucleotides under stringent hybridization conditions or alternatively, under lower stringency conditions are also encompassed by the invention, as are polypeptides encoded by these polynucleotides.

[0154] Further representative examples of polynucleotide fragments of the invention, comprise, or alternatively consist of, a sequence from about nucleotide number 1-50, 51-100, 101-150, 151-200, 201-250, 251-300, 301-350, 351-400, 401-450, 451-500, 501-550, 551-600, 651-700, 701-750, 751-800, 800-850, 851-900, 901-950, 951-1000, 1001-1050, 1051-1100, 1101-1150, 1151-1200, 1201-1250, 1251-1300, 1301-1350, 1351-1400, 1401-1450, 1451-1500, 1501-1550, 1551-1600, 1601-1650, 1651-1700, 1701-1750, 1751-1800, 1801-1850, 1851-1900, 1901-1950, 1951-2000, 2001-2050, 2051-2100, 2101-2150, 2151-2200, 2201-2250, 2251-2300, 2301-2350, 2351-2400, 2401-2450, 2451-2500, 2501-2550, 2551-2600, 2601-2650, 2651-2700, 2701-2750, 2751-2800, 2801-2850, 2851-2900, 2901-2950, 2951-3000, 3001-3050, 3051-3100, 3101-3150, 3151-3200, 3201-3250, 3251-3300, 3301-3350, 3351-3400, 3401-3450, 3451-3500, 3501-3550, 3551-3600, 3601-3650, 3651-3700, 3701-3750, 3751-3800, 3801-3850, 3851-3900, 3901-3950, 3951-4000, 4001-4050, 4051-4100, 4101-4150, 4151-4200, 4201-4250, 4251-4300, 4301-4350, 4351-4400, 4401-4450, 4451-4500, 4501-4550, 4551-4600, 4601-4650, 4651-4700, 4701-4750, 4751-4800, 4801-4850, 4851-4900, 4901-4950, 4951-5000, 5001-5050, 5051-5100, 5101-5150, 5151-5200, 5201-5250, 5251-5300, 5301-5350, 5351-5400, 5401-5450, 5451-5500, 5501-5550, 5551-5600, 5601-5650, 5651-5700, 5701-5750, 5751-5800, 5801-5850, 5851-5900, 5901-5950, 5951-6000, 6001-6050, 6051-6100, 6101-6150, 6151-6200, 6201-6250, 6251-6300, 6301-6350, 6351-6400, 6401-6450, 6451-6500, 6501-6550, 6551-6600, 6601-6650, 6651-6700, 6701-6750, 6751-6800, 6801-6850, 6851-6900, 6901-6950, 6951-7000, 7001-7050, 7051-7100, 7101-7150, 7151-7200, 7201-7250, 7251-7300 or 7301 to the end of the cDNA sequence contained in Clone ID NO:Z, or the complementary strand thereto. In this context “about” includes the particularly recited range or a range larger or smaller by several (5, 4, 3, 2, or 1) nucleotides, at either terminus or at both termini. Preferably, these fragments encode a polypeptide, which has a functional activity (e.g., biological activity). More preferably, these polynucleotides can be used as probes or primers as discussed herein. Polynucleotides which hybridize to one or more of these polynucleotides under stringent hybridization conditions or alternatively, under lower stringency conditions are also encompassed by the invention, as are polypeptides encoded by these polynucleotides.

[0155] Moreover, representative examples of polynucleotide fragments of the invention comprise, or alternatively consist of, a nucleic acid sequence comprising one, two, three, four, five, six, seven, eight, nine, ten, or more of the above described polynucleotide fragments of the invention in combination with a polynucleotide sequence delineated in Table 1B column 6. Additional, representative examples of polynucleotide fragments of the invention comprise, or alternatively consist of, a nucleic acid sequence comprising one, two, three, four, five, six, seven, eight, nine, ten, or more of the above described polynucleotide fragments of the invention in combination with a polynucleotide sequence that is the complementary strand of a sequence delineated in column 6 of Table 1B. In further embodiments, the above-described polynucleotide fragments of the invention comprise, or alternatively consist of, sequences delineated in Table 1B, column 6, and have a nucleic acid sequence which is different from that of the BAC fragment having the sequence disclosed in SEQ ID NO:B (see Table 1B, column 5). In additional embodiments, the above-described polynucleotide fragments of the invention comprise, or alternatively consist of, sequences delineated in Table 1B, column 6, and have a nucleic acid sequence which is different from that published for the BAC clone identified as BAC ID NO:A (see Table 1B, column 4). In additional embodiments, the above-described polynucleotides of the invention comprise, or alternatively consist of, sequences delineated Table 1B, column 6, and have a nucleic acid sequence which is different from that contained in the BAC clone identified as BAC ID NO:A (see Table 1B, column 4). Polypeptides encoded by these polynucleotides, other polynucleotides that encode these polypeptides, and antibodies that bind these polypeptides are also encompassed by the invention. Additionally, fragments and variants of the above-described polynucleotides and polypeptides are also encompassed by the invention.

[0156] In additional specific embodiments, polynucleotides of the invention comprise, or alternatively consist of, one, two, three, four, five, six, seven, eight, nine, ten, or more fragments of the sequences delineated in column 6 of Table 1B, and the polynucleotide sequence of SEQ ID NO:X (e.g., as defined in Table 1B, column 2) or fragments or variants thereof. Polypeptides encoded by these polynucleotides, other polynucleotides that encode these polypeptides, and antibodies that bind these polypeptides are also encompassed by the invention.

[0157] In additional specific embodiments, polynucleotides of the invention comprise, or alternatively consist of, one, two, three, four, five, six, seven, eight, nine, ten, or more fragments of the sequences delineated in column 6 of Table 1B which correspond to the same Clone ID NO:Z (see Table 1B, column 1), and the polynucleotide sequence of SEQ ID NO:X (e.g., as defined in Table 1A or 1B) or fragments or variants thereof. Polypeptides encoded by these polynucleotides, other polynucleotides that encode these polypeptides, and antibodies that bind these polypeptides are also encompassed by the invention.

[0158] In further specific embodiments, polynucleotides of the invention comprise, or alternatively consist of, one, two, three, four, five, six, seven, eight, nine, ten, or more fragments of the sequences delineated in the same row of column 6 of Table 1B, and the polynucleotide sequence of SEQ ID NO:X (e.g., as defined in Table 1A or 1B) or fragments or variants thereof. Polypeptides encoded by these polynucleotides, other polynucleotides that encode these polypeptides, and antibodies that bind these polypeptides are also encompassed by the invention.

[0159] In additional specific embodiments, polynucleotides of the invention comprise, or alternatively consist of a polynucleotide sequence in which the 3′ 10 polynucleotides of one of the sequences delineated in column 6 of Table 1B and the 5′ 10 polynucleotides of the sequence of SEQ ID NO:X are directly contiguous. Nucleic acids which hybridize to the complement of these 20 contiguous polynucleotides under stringent hybridization conditions or alternatively, under lower stringency conditions, are also encompassed by the invention. Polypeptides encoded by these polynucleotides and/or-nucleic acids, other polynucleotides and/or nucleic acids that encode these polypeptides, and antibodies that bind these polypeptides are also encompassed by the invention. Additionally, fragments and variants of the above-described polynucleotides, nucleic acids, and polypeptides are also encompassed by the invention.

[0160] In additional specific embodiments, polynucleotides of the invention comprise, or alternatively consist of a polynucleotide sequence in which the 3′ 10 polynucleotides of one of the sequences delineated in column 6 of Table 1B and the 5′ 10 polynucleotides of a fragment or variant of the sequence of SEQ ID NO:X (e.g., as described herein) are directly contiguous Nucleic acids which hybridize to the complement of these 20 contiguous polynucleotides under stringent hybridization conditions or alternatively, under lower stringency conditions, are also encompassed by the invention. Polypeptides encoded by these polynucleotides and/or nucleic acids, other polynucleotides and/or nucleic acids encoding these polypeptides, and antibodies that bind these polypeptides are also encompassed by the invention. Additionally, fragments and variants of the above-described polynucleotides, nucleic acids, and polypeptides are also encompassed by the invention.

[0161] In further specific embodiments, polynucleotides of the invention comprise, or alternatively consist of a polynucleotide sequence in which the 3′ 10 polynucleotides of a fragment or variant of the sequence of SEQ ID NO:X and the 5′ 10 polynucleotides of the sequence of one of the sequences delineated in column 6 of Table 1B are directly contiguous. Nucleic acids which hybridize to the complement of these 20 contiguous polynucleotides under stringent hybridization conditions or alternatively, under lower stringency conditions, are also encompassed by the invention. Polypeptides encoded by these polynucleotides and/or nucleic acids, other polynucleotides and/or nucleic acids encoding these polypeptides, and antibodies that bind these polypeptides are also encompassed by the invention. Additionally, fragments and variants of the above-described polynucleotides, nucleic acids, and polypeptides are also encompassed by the invention.

[0162] In specific embodiments, polynucleotides of the invention comprise, or alternatively consist of a polynucleotide sequence in which the 3′ 10 polynucleotides of one of the sequences delineated in column 6 of Table 1B and the 5′ 10 polynucleotides of another sequence in column 6 are directly contiguous. In preferred embodiments, the 3′ 10 polynucleotides of one of the sequences delineated in column 6 of Table 1B is directly contiguous with the 5′ 10 polynucleotides of the next sequential exon delineated in Table 1B, column 6. Nucleic acids which hybridize to the complement of these 20 contiguous polynucleotides under stringent hybridization conditions or alternatively, under lower stringency conditions, are also encompassed by the invention. Polypeptides encoded by these polynucleotides and/or nucleic acids, other polynucleotides and/or nucleic acids encoding these polypeptides, and antibodies that bind these polypeptides are also encompassed by the invention. Additionally, fragments and variants of the above-described polynucleotides, nucleic acids, and polypeptides are also encompassed by the invention.

[0163] In the present invention, a “polypeptide fragment” refers to an amino acid sequence which is a portion of that contained in SEQ ID NO:Y, a portion of an amino acid sequence encoded by the portion of SEQ ID NO:X as defined in columns 8 and 9 of Table 2, a portion of an amino acid sequence encoded by the polynucleotide sequence of SEQ ID NO:X, a portion of an amino acid sequence encoded by the complement of the polynucleotide sequence in SEQ ID NO:X, and/or a portion of an amino acid sequence encoded by the cDNA contained in Clone ID NO:Z. Protein (polypeptide) fragments may be “free-standing,” or comprised within a larger polypeptide of which the fragment forms a part or region, most preferably as a single continuous region. Representative examples of polypeptide fragments of the invention, include, for example, fragments comprising, or alternatively consisting of, from about amino acid number 1-20, 21-40, 41-60, 61-80, 81-100, 102-120, 121-140, 141-160, 161-180, 181-200, 201-220, 221-240, 241-260, 261-280, 281-300, 301-320, 321-340, 341-360, 361-380, 381-400, 401-420, 421-440, 441-460, 461-480, 481-500, 501-520, 521-540, 541-560, 561-580, 581-600, 601-620, 621-640, 641-660, 661-680, 681-700, 701-720, 721-740, 741-760, 761-780, 781-800, 801-820, 821-840, 841-860, 861-880, 881-900, 901-920, 921-940, 941-960, 961-980, 981-1000, 1001-1020, 1021-1040, 1041-1060, 1061-1080, 1081-1100, 1101-1120, 1121-1140, 1141-1160, 1161-1180, 1181-1200, 1201-1220, 1221-1240, 1241-1260, 1261-1280, 1281-1300, 1301-1320, 1321-1340, 1341-1360, 1361-1380, 1381-1400, 1401-1420, 1421-1440, or 1441 to the end of the coding region. In a preferred embodiment, polypeptide fragments of the invention include, for example, fragments comprising, or alternatively consisting of, from about amino acid number 1-20, 21-40, 41-60, 61-80, 81-100, 102-120, 121-140, 141-160, 161-180, 181-200, 201-220, 221-240, 241-260, 261-280, 281-300, 301-320, 321-340, 341-360, 361-380, 381-400, 401-420, 421-440, 441-460, 461-480, 481-500, 501-520, 521-540, 541-560, 561-580, 581-600, 601-620, 621-640, 641-660, 661-680, 681-700, 701-720, 721-740, 741-760, 761-780, 781-800, 801-820, 821-840, 841-860, 861-880, 881-900, 901-920, 921-940, 941-960, 961-980, 981-1000, 1001-1020, 1021-1040, 1041-1060, 1061-1080, 1081-1100, 1101-1120, 1121-1140, 1141-1160, 1161-1180, 1181-1200, 1201-1220, 1221-1240, 1241-1260, 1261-1280, 1281-1300, 1301-1320, 1321-1340, 1341-1360, 1361-1380, 1381-1400, 1401-1420, 1421-1440, or 1441 to the end of the coding region of SEQ ID NO:Y. Moreover, polypeptide fragments of the invention may be at least about 10, 15, 20, 25, 30, 35, 40, 45, 50, 55, 60, 65, 70, 75, 80, 85, 90, 100, 110, 120, 130, 140, or 150-amino acids in length. In this context “about” includes the particularly recited ranges or values, or ranges or values larger or smaller by several (5, 4, 3, 2, or 1) amino acids, at either extreme or at both extremes. Polynucleotides encoding these polypeptide fragments are also encompassed by the invention.

[0164] Even if deletion of one or more amino acids from the N-terminus of a protein results in modification of loss of one or more biological functions of the protein, other functional activities (e.g., biological activities, ability to multimerize, ability to bind a ligand) may still be retained. For example, the ability of shortened muteins to induce and/or bind to antibodies which recognize the complete or mature forms of the polypeptides generally will be retained when less than the majority of the residues of the complete or mature polypeptide are removed from the N-terminus. Whether a particular polypeptide lacking N-terminal residues of a complete polypeptide retains such immunologic activities can readily be determined by routine methods described herein and otherwise known in the art. It is not unlikely that a mutein with a large number of deleted N-terminal amino acid residues may retain some biological or immunogenic activities. In fact, peptides composed of as few as six amino acid residues may often evoke an immune response.

[0165] Accordingly, polypeptide fragments include the secreted protein as well as the mature form. Further preferred polypeptide fragments include the secreted protein or the mature form having a continuous series of deleted residues from the amino or the carboxy terminus, or both. For example, any number of amino acids, ranging from 1-60, can be deleted from the amino terminus of either the secreted polypeptide or the mature form. Similarly, any number of amino acids, ranging from 1-30, can be deleted from the carboxy terminus of the secreted protein or mature form. Furthermore, any combination of the above amino and carboxy terminus deletions is preferred. Similarly, polynucleotides encoding these polypeptide fragments are also preferred.

[0166] The present invention further provides polypeptides having one or more residues deleted from the amino terminus of the amino acid sequence of a polypeptide disclosed herein (e.g., a polypeptide of SEQ ID NO:Y, a polypeptide encoded by the polynucleotide sequence contained in SEQ ID NO:X or the complement thereof, a polypeptide encoded by the portion of SEQ ID NO:X as defined in columns 8 and 9 of Table 2, a polypeptide encoded by the portion of SEQ ID NO:B as defined in column 6 of Table 1B, and/or a polypeptide encoded by the cDNA contained in Clone ID NO:Z). In particular, N-terminal deletions may be described by the general formula m-q, where q is a whole integer representing the total number of amino acid residues in a polypeptide of the invention (e.g., the polypeptide disclosed in SEQ ID NO:Y, or the polypeptide encoded by the portion of SEQ ID NO:X as defined in columns 8 and 9 of Table 2), and m is defined as any integer ranging from 2 to q-6. Polynucleotides encoding these polypeptides are also encompassed by the invention.

[0167] The present invention further provides polypeptides having one or more residues from the carboxy terminus of the amino acid sequence of a polypeptide disclosed herein (e.g., a polypeptide of SEQ ID NO:Y, a polypeptide encoded by the polynucleotide sequence contained in SEQ ID NO:X, a polypeptide encoded by the portion of SEQ ID NO:X as defined in columns 8 and 9 of Table 2, and/or a polypeptide encoded by the cDNA contained in Clone ID NO:Z). In particular, C-terminal deletions may be described by the general formula 1-n, where n is any whole integer ranging from 6 to q-1, and where n corresponds to the position of amino acid residue in a polypeptide of the invention. Polynucleotides encoding these polypeptides are also encompassed by the invention.

[0168] In addition, any of the above described N- or C-terminal deletions can be combined to produce a N- and C-terminal deleted polypeptide. The invention also provides polypeptides having one or more amino acids deleted from both the amino and the carboxyl termini, which may be described generally as having residues m-n of a polypeptide encoded by SEQ ID NO:X (e.g., including, but not limited to, the preferred polypeptide disclosed as SEQ ID NO:Y and the polypeptide encoded by the portion of SEQ ID NO:X as defined in columns 8 and 9 of Table 2), the cDNA contained in Clone ID NO:Z, and/or the complement thereof, where n and m are integers as described above. Polynucleotides encoding these polypeptides are also encompassed by the invention.

[0169] Also as mentioned above, even if deletion of one or more amino acids from the C-terminus of a protein results in modification of loss of one or more biological functions of the protein, other functional activities (e.g., biological activities, ability to multimerize, ability to bind a ligand) may still be retained. For example the ability of the shortened mutein to induce and/or bind to antibodies which recognize the complete or mature forms of the polypeptide generally will be retained when less than the majority of the residues of the complete or mature polypeptide are removed from the C-terminus. Whether a particular polypeptide lacking C-terminal residues of a complete polypeptide retains such immunologic activities can readily be determined by routine methods described herein and otherwise known in the art. It is not unlikely that a mutein with a large number of deleted C-terminal amino acid residues may retain some biological or immunogenic activities. In fact, peptides composed of as few as six amino acid residues may often evoke an immune response.

[0170] The present application is also directed to proteins containing polypeptides at least 80%, 85%, 90%, 95%, 96%, 97%, 98% or 99% identical to a polypeptide sequence set forth herein. In preferred embodiments, the application is directed to proteins containing polypeptides at least 80%, 85%, 90%, 95%, 96%, 97%, 98% or 99% identical to polypeptides having the amino acid sequence of the specific N- and C-terminal deletions. Polynucleotides encoding these polypeptides are also encompassed by the invention.

[0171] Any polypeptide sequence encoded by, for example, the polynucleotide sequences set forth as SEQ ID NO:X or the complement thereof, (presented, for example, in Tables 1A and 2), the cDNA contained in Clone ID NO:Z, or the polynucleotide sequence as defined in column 6 of Table 1B, may be analyzed to determine certain preferred regions of the polypeptide. For example, the amino acid sequence of a polypeptide encoded by a polynucleotide sequence of SEQ ID NO:X (e.g., the polypeptide of SEQ ID NO:Y and the polypeptide encoded by the portion of SEQ ID NO:X as defined in columns 8 and 9 of Table 2) or the cDNA contained in Clone ID NO:Z may be analyzed using the default parameters of the DNASTAR computer algorithm (DNASTAR, Inc., 1228 S. Park St., Madison, Wis. 53715 USA; http://www.dnastar.com/).

[0172] Polypeptide regions that may be routinely obtained using the DNASTAR computer algorithm include, but are not limited to, Garnier-Robson alpha-regions, beta-regions, turn-regions, and coil-regions; Chou-Fasman alpha-regions, beta-regions, and turn-regions; Kyte-Doolittle hydrophilic regions and hydrophobic regions; Eisenberg alpha- and beta-amphipathic regions; Karplus-Schulz flexible regions; Emini surface-forming regions; and Jameson-Wolf regions of high antigenic index. Among highly preferred polynucleotides of the invention in this regard are those that encode polypeptides comprising regions that combine several structural features, such as several (e.g., 1, 2, 3 or 4) of the features set out above.

[0173] Additionally, Kyte-Doolittle hydrophilic regions and hydrophobic regions, Emini surface-forming regions, and Jameson-Wolf regions of high antigenic index (i.e., containing four or more contiguous amino acids having an antigenic index of greater than or equal to 1.5, as identified using the default parameters of the Jameson-Wolf program) can routinely be used to determine polypeptide regions that exhibit a high degree of potential for antigenicity. Regions of high antigenicity are determined from data by DNASTAR analysis by choosing values which represent regions of the polypeptide which are likely to be exposed on the surface of the polypeptide in an environment in which antigen recognition may occur in the process of initiation of an immune response.

[0174] Preferred polypeptide fragments of the invention are fragments comprising, or alternatively, consisting of, an amino acid sequence that displays a functional activity (e.g. biological activity) of the polypeptide sequence of which the amino acid sequence is a fragment. By a polypeptide displaying a “functional activity” is meant a polypeptide capable of one or more known functional activities associated with a full-length protein, such as, for example, biological activity, antigenicity, immunogenicity, and/or multimerization, as described herein.

[0175] Other preferred polypeptide fragments are biologically active fragments. Biologically active fragments are those exhibiting activity similar, but not necessarily identical, to an activity of the polypeptide of the present invention. The biological activity of the fragments may include an improved desired activity, or a decreased undesirable activity.

[0176] In preferred embodiments, polypeptides of the invention comprise, or alternatively consist of, one, two, three, four, five or more of the antigenic fragments of the polypeptide of SEQ ID NO:Y, or portions thereof. Polynucleotides encoding these polypeptides are also encompassed by the invention.

[0177] The present invention encompasses polypeptides comprising, or alternatively consisting of, an epitope of: the polypeptide sequence shown in SEQ ID NO:Y; a polypeptide sequence encoded by SEQ ID NO:X or the complementary strand thereto; the polypeptide sequence encoded by the portion of SEQ ID NO:X as defined in columns 8 and 9 of Table 2; the polypeptide sequence encoded by the portion of SEQ ID NO:B as defined in column 6 of Table 1B or the complement thereto; the polypeptide sequence encoded by the cDNA contained in Clone ID NO:Z; or the polypeptide sequence encoded by a polynucleotide that hybridizes to the sequence of SEQ ID NO:X, the complement of the sequence of SEQ ID NO:X, the complement of a portion of SEQ ID NO:X as defined in columns 8 and 9 of Table 2, or the cDNA sequence contained in Clone ID NO:Z under stringent hybridization conditions or alternatively, under lower stringency hybridization as defined supra. The present invention further encompasses polynucleotide sequences encoding an epitope of a polypeptide sequence of the invention (such as, for example, the sequence disclosed in SEQ ID NO:X, or a fragment thereof), polynucleotide sequences of the complementary strand of a polynucleotide sequence encoding an epitope of the invention, and polynucleotide sequences which hybridize to the complementary strand under stringent hybridization conditions or alternatively, under lower stringency hybridization conditions defined supra.

[0178] The term “epitopes,” as used herein, refers to portions of a polypeptide having antigenic or immunogenic activity in an animal, preferably a mammal, and most preferably in a human. In a preferred embodiment, the present invention encompasses a polypeptide comprising an epitope, as well as the polynucleotide encoding this polypeptide. An “immunogenic epitope,” as used herein, is defined as a portion of a protein that elicits an antibody response in an animal, as determined by any method known in the art, for example, by the methods for generating antibodies described infra. (See, for example, Geysen et al., Proc. Natl. Acad. Sci. USA 81:3998-4002 (1983)). The term “antigenic epitope,” as used herein, is defined as a portion of a protein to which an antibody can immunospecifically bind its antigen as determined by any method well known in the art, for example, by the immunoassays described herein. Immunospecific binding excludes non-specific binding but does not necessarily exclude cross-reactivity with other antigens. Antigenic epitopes need not necessarily be immunogenic.

[0179] Fragments, which function as epitopes may be produced by any conventional means. (See, e.g., Houghten, R. A., Proc. Natl. Acad. Sci. USA 82:5131-5135 (1985) further described in U.S. Pat. No.4,631,211.)

[0180] In the present invention, antigenic epitopes preferably contain a sequence of at least 4, at least 5, at least 6, at least 7, more preferably at least 8, at least 9, at least 10, at least 11, at least 12, at least 13, at least 14, at least 15, at least 20, at least 25, at least 30, at least 40, at least 50, and, most preferably, between about 15 to about 30 amino acids. Preferred polypeptides comprising immunogenic or antigenic epitopes are at least 10, 15, 20, 25, 30, 35, 40, 45, 50, 55, 60, 65, 70, 75, 80, 85, 90, 95, or 100 amino acid residues in length. Additional non-exclusive preferred antigenic epitopes include the antigenic epitopes disclosed herein, as well as portions thereof. Antigenic epitopes are useful, for example, to raise antibodies, including monoclonal antibodies, that specifically bind the epitope. Preferred antigenic epitopes include the antigenic epitopes disclosed herein, as well as any combination of two, three, four, five or more of these antigenic epitopes. Antigenic epitopes can be used as the target molecules in immunoassays. (See, for instance, Wilson et al., Cell 37:767-778 (1984); Sutcliffe et al., Science 219:660-666 (1983)).

[0181] Non-limiting examples of epitopes of polypeptides that can be used to generate antibodies of the invention include a polypeptide comprising, or alternatively consisting of, at least one, two, three, four, five, six or more of the portion(s) of SEQ ID NO:Y specified in column 6 of Table 1A. These polypeptide fragments have been determined to bear antigenic epitopes of the proteins of the invention by the analysis of the Jameson-Wolf antigenic index, which is included in the DNAStar suite of computer programs. By “comprise” it is intended that a polypeptide contains at least one, two, three, four, five, six or more of the portion(s) of SEQ ID NO:Y shown in column 6 of Table 1A, but it may contain additional flanking residues on either the amino or carboxyl termini of the recited portion. Such additional flanking sequences are preferably sequences naturally found adjacent to the portion; i.e., contiguous sequence shown in SEQ ID NO:Y. The flanking sequence may, however, be sequences from a heterologous polypeptide, such as from another protein described herein or from a heterologous polypeptide not described herein. In particular embodiments, epitope portions of a polypeptide of the invention comprise one, two, three, or more of the portions of SEQ ID NO:Y shown in column 6 of Table 1A. Polynucleotides encoding these polypeptides are also encompassed by the invention.

[0182] Similarly, immunogenic epitopes can be used, for example, to induce antibodies according to methods well known in the art. See, for instance, Sutcliffe et al., supra; Wilson et al., supra; Chow et al., Proc. Natl. Acad. Sci. USA 82:910-914; and Bittle et al., J. Gen. Virol. 66:2347-2354 (1985). Preferred immunogenic epitopes include the immunogenic epitopes disclosed herein, as well as any combination of two, three, four, five or more of these immunogenic epitopes. The polypeptides comprising one or more immunogenic epitopes may be presented for eliciting an antibody response together with a carrier protein, such as an albumin, to an animal system (such as rabbit or mouse), or, if the polypeptide is of sufficient length (at least about 25 amino acids), the polypeptide may be presented without a carrier. However, immunogenic epitopes comprising as few as 8 to 10 amino acids have been shown to be sufficient to raise antibodies capable of binding to, at the very least, linear epitopes in a denatured polypeptide (e.g., in Western blotting).

[0183] Epitope-bearing polypeptides of the present invention may be used to induce antibodies according to methods well known in the art including, but not limited to, in vivo immunization, in vitro immunization, and phage display methods. See, e.g., Sutcliffe et al., supra; Wilson et al., supra, and Bittle et al., J. Gen. Virol., 66:2347-2354 (1985). If in vivo immunization is used, animals may be immunized with free peptide; however, anti-peptide antibody titer may be boosted by coupling the peptide to a macromolecular carrier, such as keyhole limpet hemacyanin (KLH) or tetanus toxoid. For instance, peptides containing cysteine residues may be coupled to a carrier using a linker such as maleimidobenzoyl-N-hydroxysuccinimide ester (MBS), while other peptides may be coupled to carriers using a more general linking agent such as glutaraldehyde. Animals such as rabbits, rats and mice are immunized with either free or carrier-coupled peptides, for instance, by intraperitoneal and/or intradermal injection of emulsions containing about 100 μg of peptide or carrier protein and Freund's adjuvant or any other adjuvant known for stimulating an immune response. Several booster injections may be needed, for instance, at intervals of about two weeks, to provide a useful titer of anti-peptide antibody which can be detected, for example, by ELISA assay using free peptide adsorbed to a solid surface. The titer of anti-peptide antibodies in serum from an immunized animal may be increased by selection of anti-peptide antibodies, for instance, by adsorption to the peptide on a solid support and elution of the selected antibodies according to methods well known in the art.

[0184] As one of skill in the art will appreciate, and as discussed above, the polypeptides of the present invention (e.g., those comprising an immunogenic or antigenic epitope) can be fused to heterologous polypeptide sequences. For example, polypeptides of the present invention (including fragments or variants thereof), may be fused with the constant domain of immunoglobulins (IgA, IgE, IgG, IgM), or portions thereof (CH1, CH2, CH3, or any combination thereof and portions thereof, resulting in chimeric polypeptides. By way of another non-limiting example, polypeptides and/or antibodies of the present invention (including fragments or variants thereof) may be fused with albumin (including but not limited to recombinant human serum albumin or fragments or variants thereof (see, e.g., U.S. Pat. No. 5,876,969, issued Mar.2, 1999, EP Patent 0 413 622, and U.S. Pat. No. 5,766,883, issued Jun. 16, 1998, herein incorporated by reference in their entirety)). In a preferred embodiment, polypeptides and/or antibodies of the present invention (including fragments or variants thereof) are fused with the mature form of human serum albumin (i.e., amino acids 1-585 of human serum albumin as shown in Figures 1 and 2 of EP Patent 0 322 094) which is herein incorporated by reference in its entirety. In another preferred embodiment, polypeptides and/or antibodies of the present invention (including fragments or variants thereof) are fused with polypeptide fragments comprising, or alternatively consisting of, amino acid residues 1-z of human serum albumin, where z is an integer from 369 to 419, as described in U.S. Pat. No. 5,766,883 herein incorporated by reference in its entirety. Polypeptides and/or antibodies of the present invention (including fragments or variants thereof) may be fused to either the N- or C-terminal end of the heterologous protein (e.g., immunoglobulin Fc polypeptide or human serum albumin polypeptide). Polynucleotides encoding fusion proteins of the invention are also encompassed by the invention.

[0185] Such fusion proteins as those described above may facilitate purification and may increase half-life in vivo. This has been shown for chimeric proteins consisting of the first two domains of the human CD4-polypeptide and various domains of the constant regions of the heavy or light chains of mammalian immunoglobulins. See, e.g., EP 394,827; Traunecker et al., Nature, 331:84-86 (1988). Enhanced delivery of an antigen across the epithelial barrier to the immune system has been demonstrated for antigens (e.g., insulin) conjugated to an FcRn binding partner such as IgG or Fc fragments (see, e.g., PCT Publications WO 96/22024 and WO 99/04813). IgG Fusion proteins that have a disulfide-linked dimeric structure due to the IgG portion desulfide bonds have also been found to be more efficient in binding and neutralizing other molecules than monomeric polypeptides or fragments thereof alone. See, e.g., Fountoulakis et al., J. Biochem., 270:3958-3964 (1995). Nucleic acids encoding the above epitopes can also be recombined with a gene of interest as an epitope tag (e.g., the hemagglutinin (HA) tag or flag tag) to aid in detection and purification of the expressed polypeptide. For example, a system described by Janknecht et al. allows for the ready purification of non-denatured fusion proteins expressed in human cell lines (Janknecht et al., 1991, Proc. Natl. Acad. Sci. USA 88:8972-897). In this system, the gene of interest is subcloned into a vaccinia recombination plasmid such that the open reading frame of the gene is translationally fused to an amino-terminal tag consisting of six histidine residues. The tag serves as a matrix binding domain for the fusion protein. Extracts from cells infected with the recombinant vaccinia virus are loaded onto Ni2+ nitriloacetic acid-agarose column and histidine-tagged proteins can be selectively eluted with imidazole-containing buffers.

[0186] Fusion Proteins

[0187] Any polypeptide of the present invention can bemused to generate fusion proteins. For example, the polypeptide of the present invention, when fused to a second protein, can be used as an antigenic tag. Antibodies raised against the polypeptide of the present invention can be used to indirectly detect the second protein by binding to the polypeptide. Moreover, because secreted proteins target cellular locations based on trafficking signals, polypeptides of the present invention which are shown to be secreted can be used as targeting molecules once fused to other proteins.

[0188] Examples of domains that can be fused to polypeptides of the present invention include not only heterologous signal sequences, but also other heterologous functional regions. The fusion does not necessarily need to be direct, but may occur through linker sequences.

[0189] In certain preferred embodiments, proteins of the invention are fusion proteins comprising an amino acid sequence that is an N and/or C-terminal deletion of a polypeptide of the invention. In preferred embodiments, the invention is directed to a fusion protein comprising an amino acid sequence that is at least 80%, 85%, 90%, 95%, 96%, 97%, 98% or 99% identical to a polypeptide sequence of the invention. Polynucleotides encoding these proteins are also encompassed by the invention.

[0190] Moreover, fusion proteins may also be engineered to improve characteristics of the polypeptide of the present invention. For instance, a region of additional amino acids, particularly charged amino acids, may be added to the N-terminus of the polypeptide to improve stability and persistence during purification from the host cell or subsequent handling and storage. Also, peptide moieties may be added to the polypeptide to facilitate purification. Such regions may be removed prior to final preparation of the polypeptide. The addition of peptide moieties to facilitate handling of polypeptides are familiar and routine techniques in the art.

[0191] As one of skill in the art will appreciate that, as discussed above, polypeptides of the present invention, and epitope-bearing fragments thereof, can be combined with heterologous polypeptide sequences. For example, the polypeptides of the present invention may be fused with heterologous polypeptide sequences, for example, the polypeptides of the present invention may be fused with the constant domain of immunoglobulins (IgA, IgE, IgG, IgM) or portions thereof (CH1, CH2, CH3, and any combination thereof, including both entire domains and portions thereof), or albumin (including, but not limited to, native or recombinant human albumin or fragments or variants thereof (see, e.g., U.S. Pat. No. 5,876,969, issued Mar. 2, 1999, EP Patent 0 413 622, and U.S. Pat. No. 5,766,883, issued Jun. 16, 1998, herein incorporated by reference in their entirety)), resulting in chimeric polypeptides. For example, EP-A-O 464 533 (Canadian counterpart 2045869) discloses fusion proteins comprising various portions of constant region of immunoglobulin molecules together with another human protein or part thereof. In many cases, the Fc part in a fusion protein is beneficial in therapy and diagnosis, and thus can result in, for example, improved pharmacokinetic properties (EP-A 0232 262). Alternatively, deleting the Fc part after the fusion protein has been expressed, detected, and purified, would be desired. For example, the Fc portion may hinder therapy and diagnosis if the fusion protein is used as an antigen for immunizations. In drug discovery, for example, human proteins, such as hIL-5, have been fused with Fc portions for the purpose of high-throughput screening assays to identify antagonists of hIL-5. See, D. Bennett et al., J. Molecular Recognition 8:52-58 (1995);, K. Johanson et al., J. Biol. Chem. 270:9459-9471 (1995).

[0192] Moreover, the polypeptides of the present invention can be fused to marker sequences, such as a polypeptide, which facilitates purification of the fused polypeptide. In preferred embodiments, the marker amino acid sequence is a hexa-histidine peptide, such as the tag provided in a pQE vector (QIAGEN, Inc., 9259 Eton Avenue, Chatsworth, Calif., 91311), among others, many of which are commercially available. As described in Gentz et al., Proc. Natl. Acad. Sci. USA 86:821-824 (1989), for instance, hexa-histidine provides for convenient purification of the fusion protein. Another peptide tag useful for purification, the “HA” tag, corresponds to an epitope derived from the influenza hemagglutinin protein (Wilson et al., Cell 37:767 (1984).)

[0193] Additional fusion proteins of the invention may be generated through the techniques of gene-shuffling, motif-shuffling, exon-shuffling, and/or codon-shuffling (collectively referred to as “DNA shuffling”), briefly described below, and further described herein. DNA shuffling may be employed to modulate the activities of polypeptides of the invention, such methods can be used to generate polypeptides with altered activity, as well as agonists and antagonists of the polypeptides. See, generally, U.S. Pat. Nos. 5,605,793; 5,811,238; 5,830,721; 5,834,252; and 5,837,458, and Patten et al., Curr. Opinion Biotechnol. 8:724-33 (1997); Harayama, Trends Biotechnol. 16(2):76-82 (1998); Hansson et al., J. Mol. Biol. 287:265-76 (1999); and Lorenzo and Blasco, Biotechniques 24(2):308-13 (1998); each of these patents and publications are hereby incorporated by reference in its entirety). In a preferred embodiment, one or more components, motifs, sections, parts, domains, fragments, etc., of a polynucleotide encoding a polypeptide of the invention may be recombined with one or more components, motifs, sections, parts, domains, fragments, etc., of one or more heterologous molecules encoding a heterologous polypeptide.

[0194] Thus, any of these above fusions can be engineered using the polynucleotides or the polypeptides of the present invention.

[0195] Recombinant and Synthetic Production of Polypeptides of the Invention

[0196] The present invention also relates to vectors containing the polynucleotide of the present invention, host cells, and the production of polypeptides by synthetic and recombinant techniques. The vector may be, for example, a phage, plasmid, viral, or retroviral vector. Retroviral vectors may be replication competent or replication defective. In the latter case, viral propagation generally will occur only in complementing host cells.

[0197] The polynucleotides of the invention may be joined to a vector containing a selectable marker for propagation in a host. Generally, a plasmid vector is introduced in a precipitate, such as a calcium phosphate precipitate, or in a complex with a charged lipid. If the vector is a virus, it may be packaged in vitro using an appropriate packaging cell line and then transduced into host cells.

[0198] The polynucleotide insert should be operatively linked to an appropriate promoter, such as the phage lambda PL promoter, the E. coli lac, trp, phoA and tac promoters, the SV40 early and late promoters and promoters of retroviral LTRs, to name a few. Other suitable promoters will be known to the skilled artisan. The expression constructs will further contain sites for transcription initiation, termination, and, in the transcribed region, a ribosome binding site for translation. The coding portion of the transcripts expressed by the constructs will preferably include a translation initiating codon at the beginning and a termination codon (UAA, UGA or UAG) appropriately positioned at the end of the polypeptide to be translated.

[0199] As indicated, the expression vectors will preferably include at least one selectable marker. Such markers include dihydrofolate reductase, G418 or neomycin resistance, glutamine synthase, for eukaryotic cell culture and tetracycline, kanamycin or ampicillin resistance genes for culturing in E. coli and other bacteria. Representative examples of appropriate hosts include, but are not limited to, bacterial cells, such as E. coli, Streptomyces and Salmonella typhimurium cells; fungal cells, such as yeast cells (e.g., Saccharomyces cerevisiae or Pichia pastoris (ATCC Accession No. 201178)); insect cells such as Drosophila S2 and Spodoptera Sf9 cells; animal cells such as CHO, COS, 293, NSO and Bowes melanoma cells; and plant cells. Appropriate culture mediums and conditions for the above-described host cells are known in the art.

[0200] Among vectors preferred for use in bacteria include pQE70, pQE60 and pQE-9, available from QIAGEN, Inc.; pBluescript vectors, Phagescript vectors, pNH8A, pNH16a, pNH18A, pNH46A, available from Stratagene Cloning Systems, Inc.; and ptrc99a, pKK,223-3, pKK233-3, pDR540, pRIT5 available from Pharmacia Biotech, Inc. Among preferred eukaryotic vectors are pWLNEO, pSV2CAT, pOG44, pXT1 and pSG available from Stratagene; and pSVK3, pBPV, pMSG and pSVL available from Pharmacia. Preferred expression vectors for use in yeast systems include, but are not limited to pYES2, pYD1, pTEF1/Zeo, pYES2/GS, pPICZ, pGAPZ, pGAPZalph, pPIC9, pPIC3.5, pHIL-D2, pHIL-S1, pPIC3.5K, pPIC9K, and PAO815 (all available from Invitrogen, Carlsbad, Calif.). Other suitable vectors will be readily apparent to the skilled artisan.

[0201] Vectors which use glutamine synthase (GS) or DHFR as the selectable markers can be amplified in the presence of the drugs methionine sulphoximine or methotrexate, respectively. An advantage of glutamine synthase based vectors is the availability of cell lines (e.g., the murine myeloma cell line, NSO) which are glutamine synthase negative. Glutamine synthase expression systems can also function in glutamine synthase expressing cells (e.g., Chinese Hamster Ovary (CHO) cells) by providing additional inhibitor to prevent the functioning of the endogenous gene. A glutamine synthase expression system and components thereof are detailed in PCT publications: WO87/04462; WO86/05807; WO89/01036; WO89/10404; and WO91/06657 which are hereby incorporated in their entireties by reference herein. Additionally, glutamine synthase expression vectors can be obtained from Lonza Biologics, Inc. (Portsmouth, N.H.). Expression and production of monoclonal antibodies using a GS expression system in murine myeloma cells is described in Bebbington et al., Bio/technology 10:169(1992) and in Biblia and Robinson Biotechnol. Prog. 11:1 (1995) which are herein incorporated by reference.

[0202] The present invention also relates to host cells containing the above-described vector constructs described herein, and additionally encompasses host cells containing nucleotide sequences of the invention that are operably associated with one or more heterologous control regions (e.g., promoter and/or enhancer) using techniques known of in the art. The host cell can be a higher eukaryotic cell, such as a mammalian cell (e.g., a human derived cell), or a lower eukaryotic cell, such as a yeast cell, or the host cell can be a prokaryotic cell, such as a bacterial cell. A host strain may be chosen, which modulates the expression of the inserted gene sequences, or modifies and processes the gene product in the specific fashion desired. Expression from certain promoters can be elevated in the presence of certain inducers; thus expression of the genetically engineered polypeptide may be controlled. Furthermore, different host cells have characteristics and specific mechanisms for the translational and post-translational processing and modification (e.g., phosphorylation, cleavage) of proteins. Appropriate cell lines can be chosen to ensure the desired modifications and processing of the foreign protein expressed.

[0203] Introduction of the nucleic acids and nucleic acid constructs of the invention into the host cell can be effected by calcium phosphate transfection, DEAE-dextran mediated transfection, cationic lipid-mediated transfection, electroporation, transduction, infection, or other methods. Such methods are described in many standard laboratory manuals, such as Davis et al., Basic Methods In Molecular Biology (1986). It is specifically contemplated that the polypeptides of the present invention may in fact be expressed by a host cell lacking a recombinant vector.

[0204] In addition to encompassing host cells containing the vector constructs discussed herein, the invention also encompasses primary, secondary, and immortalized host cells of vertebrate origin, particularly mammalian origin, that have been engineered to delete or replace endogenous genetic material (e.g., cardiovascular system antigen coding sequence), and/or to include genetic material (e.g., heterologous polynucleotide sequences) that is operably associated with cardiovascular system associated polynucleotides of the invention, and which activates, alters, and/or amplifies endogenous cardiovascular system associated polynucleotides. For example, techniques known in the art may be used to operably associate heterologous control regions (e.g., promoter and/or enhancer) and endogenous cardiovascular system associated polynucleotide sequences via homologous recombination (see, e.g., U.S. Pat. No 5,641,670, issued Jun. 24, 1997; International Publication Number WO 96/29411; International Publication Number WO 94/12650; Koller et al., Proc. Natl. Acad. Sci. USA 86:8932-8935 (1989); and Zijlstra et al., Nature 342:435-438 (1989), the disclosures of each of which are incorporated by reference in their entireties).

[0205] Polypeptides of the present invention can also be recovered from: products purified from natural sources, including bodily fluids, tissues and cells, whether directly isolated or cultured; products of chemical synthetic procedures; and products produced by recombinant techniques from a prokaryotic or eukaryotic host, including, for example, bacterial, yeast, higher plant, insect, and mammalian cells. Depending upon the host employed in a recombinant production procedure, the polypeptides of the present invention may be glycosylated or may be non-glycosylated. In addition, polypeptides of the invention may also include an initial modified methionine residue, in some cases as a result of host-mediated processes. Thus, it is well known in the art that the N-terminal methionine encoded by the translation initiation codon generally is removed with high efficiency from any protein after translation in all eukaryotic cells. While the N-terminal methionine on most proteins also is efficiently removed in most prokaryotes, for some proteins, this prokaryotic removal process is inefficient, depending on the nature of the amino acid to which the N-terminal methionine is covalently linked.

[0206] In one embodiment, the yeast Pichia pastoris is used to express polypeptides of the invention in a eukaryotic system. Pichia pastoris is a methylotrophic yeast which can metabolize methanol as its sole carbon source. A main step in the methanol metabolization pathway is the oxidation of methanol to formaldehyde using O₂. This reaction is catalyzed by the enzyme alcohol oxidase. In order to metabolize methanol as its sole carbon source, Pichia pastoris must generate high levels of alcohol oxidase due, in part, to the relatively low affinity of alcohol oxidase for O₂. Consequently, in a growth medium depending on methanol as a, main carbon source, the promoter region of one of the two alcohol oxidase genes (AOX1) is highly active. In the presence of methanol, alcohol oxidase produced from the AOX1 gene comprises up to approximately 30% of the total soluble protein in Pichia pastoris. See, Ellis, S. B., et al., Mol. Cell. Biol. 5:1111-21 (1985); Koutz, P. J, et al., Yeast 5:167-77 (1989); Tschopp, J. F., et al., Nucl. Acids Res. 15:3859-76 (1987). Thus, a heterologous coding sequence, such as, for example, a polynucleotide of the present invention, under the transcriptional regulation of all or part of the AOX1 regulatory sequence is expressed at exceptionally high levels in Pichia yeast grown in the presence of methanol.

[0207] In one example, the plasmid vector pPIC9K is used to express DNA encoding a polypeptide of the invention, as set forth herein, in a Pichea yeast system essentially as described in “Pichia Protocols: Methods in Molecular Biology,” D. R. Higgins and J. Cregg, eds. The Humana Press, Totowa, N.J., 1998. This expression vector allows expression and secretion of a polypeptide of the invention by virtue of the strong AOX1 promoter linked to the Pichia pastoris alkaline phosphatase (PHO) secretory signal peptide (i.e., leader) located upstream of a multiple cloning site.

[0208] Many other yeast vectors could be used in place of pPIC9K, such as, pYES2, pYD1, pTEF1/Zeo, pYES2/GS, pPICZ, pGAPZ, pGAPZalpha, pPIC9, pPIC3.5, pHIL-D2, pHIL-S1, pPIC3.5K, and PAO815, as one skilled in the art would readily appreciate, as long as the proposed expression construct provides appropriately located signals for transcription, translation, secretion (if desired), and the like, including an in-frame AUG as required.

[0209] In another embodiment, high-level expression of a heterologous coding sequence, such as, for example, a polynucleotide of the present invention, may be achieved by cloning the heterologous polynucleotide of the invention into an expression vector such as, for example, pGAPZ or pGAPZalpha, and growing the yeast culture in the absence of methanol.

[0210] In addition to encompassing host cells containing the vector constructs discussed herein, the invention also encompasses primary, secondary, and immortalized host cells of vertebrate origin, particularly mammalian origin, that have been engineered to delete or replace endogenous genetic material (e.g., coding sequence), and/or to include genetic material (e.g., heterologous polynucleotide sequences) that is operably associated with polynucleotides of the invention, and which activates, alters, and/or amplifies endogenous polynucleotides. For example, techniques known in the art may be used to operably associate heterologous control regions (e.g., promoter and/or enhancer) and endogenous polynucleotide sequences via homologous recombination (see, e.g., U.S. Pat. No. 5,641,670, issued Jun. 24,. 1997; International Publication No. WO 96/29411, published Sep. 26, 1996; International Publication No. WO 94/12650, published Aug. 4, 1994; Koller et al., Proc. Natl. Acad. Sci. USA 86:8932-8935 (1989); and Zijlstra et al., Nature 342:435-438 (1989), the disclosures of each of which are incorporated by reference in their entireties).

[0211] In addition, polypeptides of the invention can be chemically synthesized using techniques known in the art (e.g., see Creighton, 1983, Proteins: Structures and Molecular Principles, W.H. Freeman & Co., N.Y., and Hunkapiller et al., Nature, 310:105-111 (1984)). For example, a polypeptide corresponding to a fragment of a polypeptide can be synthesized by use of a peptide synthesizer. Furthermore, if desired, nonclassical amino acids or chemical amino acid analogs can be introduced as a substitution or addition into the polypeptide sequence. Non-classical amino acids include, but are not limited to, to the D-isomers of the common amino acids, 2,4-diaminobutyric acid, a-amino isobutyric acid, 4-aminobutyric acid, Abu, 2-amino butyric acid, g-Abu, e-Ahx, 6-amino hexanoic acid, Aib, 2-amino isobutyric acid, 3-amino propionic acid, ornithine, norleucine, norvaline, hydroxyproline, sarcosine, citrulline, homocitrulline, cysteic acid, t-butylglycine, t-butylalanine, phenylglycine, cyclohexylalanine, b-alanine, fluoro-amino acids, designer amino acids such as b-methyl amino acids, Ca-methyl amino acids, Na-methyl amino acids, and amino acid analogs in general. Furthermore, the amino acid can be D (dextrorotary) or L (levorotary).

[0212] The invention encompasses polypeptides of the present invention which are differentially modified during or after translation, e.g., by glycosylation, acetylation, phosphorylation, amidation, derivatization by known protecting/blocking groups, proteolytic cleavage, linkage to an antibody molecule or other cellular ligand, etc. Any of numerous chemical modifications may be carried out by known techniques, including but not limited, to specific chemical cleavage by cyanogen bromide, trypsin, chymotrypsin, papain, V8 protease, NaBH₄; acetylation, formylation, oxidation, reduction; metabolic synthesis in the presence of tunicamycin; etc.

[0213] Additional post-translational modifications encompassed by the invention include, for example, e.g., N-linked or O-linked carbohydrate chains, processing of N-terminal or C-terminal ends), attachment of chemical moieties to the amino acid backbone, chemical modifications of N-linked or O-linked carbohydrate chains, and addition or deletion of an N-terminal methionine residue as a result of procaryotic host cell expression. The polypeptides may also be modified with a detectable label, such as an enzymatic, fluorescent, isotopic or affinity label to allow for detection and isolation of the protein.

[0214] Examples of suitable enzymes include horseradish peroxidase, alkaline phosphatase, beta-galactosidase, or acetylcholinesterase; examples of suitable prosthetic group complexes include streptavidin/biotin and avidin/biotin; examples of suitable fluorescent materials include umbelliferone, fluorescein, fluorescein isothiocyanate, rhodamine, dichlorotriazinylamine fluorescein, dansyl chloride or phycoerythrin; an example of a luminescent material includes luminol; examples of bioluminescent materials include luciferase, luciferin, and aequorin; and examples of suitable radioactive material include iodine (¹²¹I, ¹²³I, ¹²⁵I, ¹³¹I), carbon (¹⁴C), sulfur (³⁵S), tritium (³H), indium (¹¹¹In, ¹¹²In, ^{113m}In, ^{115m}In), technetium (⁹⁹Tc, ^{99m}Tc), thallium (²⁰¹Ti), gallium (⁶⁸Ga, ⁶⁷Ga), palladium (¹⁰³Pd), molybdenum (⁹⁹Mo), xenon (¹³³Xe), fluorine (¹⁸F), ¹⁵³Sm, ¹⁷⁷Lu, ¹⁵⁹Gd, ¹⁴⁹Pm, ¹⁴⁰La, ¹⁷⁵Yb, ¹⁶⁶Ho, ⁹⁰Y, ⁴⁷Sc, ¹⁸⁶Re, ¹⁸⁸Re, ¹⁴²Pr, ¹⁰⁵Rh, and ⁹⁷Ru.

[0215] In specific embodiments, a polypeptide of the present invention or fragment or variant thereof is attached to macrocyclic chelators that associate with radiometal ions, including but not limited to, ¹⁷⁷Lu, ⁹⁰Y, ¹⁶⁶Ho, and ¹⁵³Sm, to polypeptides. In a preferred embodiment, the radiometal ion associated with the macrocyclic chelators is ¹¹¹In. In another preferred embodiment, the radiometal ion associated with the macrocyclic chelator is ⁹⁰Y. In specific embodiments, the macrocyclic chelator is 1,4,7,10-tetraazacyclododecane-N,N′,N″,N′″-tetraacetic acid (DOTA). In other specific embodiments, DOTA is attached to an antibody of the invention or fragment thereof via a linker molecule. Examples of linker molecules useful for conjugating DOTA to a polypeptide are commonly known in the art—see, for example, DeNardo et al., Clin Cancer Res. 4(10):2483-90 (1998); Peterson et al., Bioconjug. Chem. 10(4):553-7 (1999); and Zimmerman et al, Nucl. Med. Biol. 26(8):943-50 (1999); which are hereby incorporated by reference in their entirety.

[0216] As mentioned, the cardiovascular system associated proteins of the invention may be modified by either natural processes, such as posttranslational processing, or by chemical modification techniques which are well known in the art. It will be appreciated that the same type of modification may be present in the same or varying degrees at several sites in a given cardiovascular system associated polypeptide. Cardiovascular system associated polypeptides may be branched, for example, as a result of ubiquitination, and they may be cyclic, with or without branching. Cyclic, branched, and branched cyclic cardiovascular system associated polypeptides may result from posttranslation natural processes or may be made by synthetic methods. Modifications include acetylation, acylation, ADP-ribosylation, amidation, covalent attachment of flavin, covalent attachment of a heme moiety, covalent attachment of a nucleotide or nucleotide derivative, covalent attachment of a lipid or lipid derivative, covalent attachment of phosphotidylinositol, cross-linking, cyclization, disulfide bond formation, demethylation, formation of covalent cross-links, formation of cysteine, formation of pyroglutamate, formylation, gamma-carboxylation, glycosylation, GPI anchor formation, hydroxylation, iodination, methylation, myristoylation, oxidation, pegylation, proteolytic processing, phosphorylation, prenylation, racemization, selenoylation, sulfation, transfer-RNA mediated addition of amino acids to proteins such as arginylation, and ubiquitination. (See, for instance, PROTEINS-STRUCTURE AND MOLECULAR PROPERTIES, 2nd Ed., T. E. Creighton, W. H. Freeman and Company, New York (1993); POSTTRANSLATIONAL COVALENT MODIFICATION OF PROTEINS, B. C. Johnson, Ed., Academic Press, New York, pgs. 1-12 (1983); Seifter et al., Meth. Enzymol. 182:626-646 (1990); Rattan et al., Ann. N.Y. Acad. Sci. 663:48-62 (1992)).

[0217] Also provided by the invention are chemically modified derivatives of the polypeptides of the invention which may provide additional advantages such as increased solubility, stability and circulating time of the polypeptide, or decreased immunogenicity (see U.S. Pat. No. 4,179,337). The chemical moieties for derivatization may be selected from water soluble polymers such as polyethylene glycol, ethylene glycol/propylene glycol copolymers, carboxymethylcellulose, dextran, polyvinyl alcohol and the like. The polypeptides may be modified at random positions within the molecule, or at predetermined positions within the molecule and may include one, two, three or more attached chemical moieties.

[0218] The polymer may be of any molecular weight, and may be branched or unbranched. For polyethylene glycol, the preferred molecular weight is between about 1 kDa and about 100 kDa (the term “about” indicating that in preparations of polyethylene glycol, some molecules will weigh more, some less, than the stated molecular weight) for ease in handling and manufacturing. Other sizes may be used, depending on the desired therapeutic profile (e.g., the duration of sustained release desired, the effects, if any on biological activity, the ease in handling, the degree or lack of antigenicity and other known effects of the polyethylene glycol to a therapeutic protein or analog). For example, the polyethylene glycol may have an average molecular weight of about 200, 500, 1000, 1500, 2000, 2500, 3000, 3500, 4000, 4500, 5000, 5500, 6000, 6500, 7000, 7500, 8000, 8500, 9000, 9500, 10,000, 10,500, 11,000, 11,500, 12,000, 12,500, 13,000, 13,500, 14,000, 14,500, 15,000, 15,500, 16,000, 16,500, 17,000, 17,500, 18,000, 18,500, 19,000, 19,500, 20,000, 25,000, 30,000, 35,000, 40,000, 50,000, 55,000, 60,000, 65,000, 70,000, 75,000, 80,000, 85,000, 90,000, 95,000, or 100,000 kDa.

[0219] As noted above, the polyethylene glycol may have a branched structure. Branched polyethylene glycols are described, for example, in U.S. Pat. No. 5,643,575; Morpurgo et al., Appl. Biochem. Biotechnol. 56:59-72 (1996); Vorobjev et al., Nucleosides Nucleotides 18:2745-2750 (1999); and Caliceti et al., Bioconjug. Chem. 10:638-646 (1999), the disclosures of each of which are incorporated herein by reference.

[0220] The polyethylene glycol molecules (or other chemical moieties) should be attached to the protein with consideration of effects on functional or antigenic domains of the protein. There are a number of attachment methods available to those skilled in the art, such as, for example, the method disclosed in EP 0 401 384 (coupling PEG to G-CSF), herein incorporated by reference; see also Malik et al., Exp. Hematol. 20:1028-1035 (1992), reporting pegylation of GM-CSF using tresyl chloride. For example, polyethylene glycol may be covalently bound through amino acid residues via a reactive group, such as a free amino or carboxyl group. Reactive groups are those to which an activated polyethylene glycol molecule may be bound. The amino acid residues having a free amino group may include lysine residues and the N-terminal amino acid residues; those having a free carboxyl group may include aspartic acid residues glutamic acid residues and the C-terminal amino acid residue. Sulfhydryl groups may also be used as a reactive group for attaching the polyethylene glycol molecules. Preferred for therapeutic purposes is attachment at an amino group, such as attachment at the N-terminus or lysine group.

[0221] As suggested above, polyethylene glycol may be attached to proteins via linkage to any of a number of amino acid residues. For example, polyethylene glycol can be linked to proteins via covalent bonds to lysine, histidine, aspartic acid, glutamic acid, or cysteine residues. One or more reaction chemistries may be employed to attach polyethylene glycol to specific amino acid residues (e.g., lysine, histidine, aspartic acid, glutamic acid, or cysteine) of the protein or to more than one type of amino acid residue (e.g., lysine, histidine, aspartic acid, glutamic acid, cysteine and combinations thereof) of the protein.

[0222] One may specifically desire proteins chemically modified at the N-terminus. Using polyethylene glycol as an illustration of the present composition, one may select from a variety of polyethylene glycol molecules (by molecular weight, branching, etc.), the proportion of polyethylene glycol molecules to protein (polypeptide) molecules in the reaction mix, the type of pegylation reaction to be performed, and the method of obtaining the selected N-terminally pegylated protein. The method of obtaining the N-terminally pegylated preparation (i.e., separating this moiety from other monopegylated moieties if necessary) may be by purification of the N-terminally pegylated material from a population of pegylated protein molecules. Selective proteins chemically modified at the N-terminus modification may be accomplished by reductive alkylation which exploits differential reactivity of different types of primary amino groups (lysine versus the N-terminal) available for derivatization in a particular protein. Under the appropriate reaction conditions, substantially selective derivatization of the protein at the N-terminus with a carbonyl group containing polymer is achieved.

[0223] As indicated above, pegylation of the proteins of the invention may be accomplished by any number of means. For example, polyethylene glycol may be attached to the protein either directly or by an intervening linker. Linkerless systems for attaching polyethylene glycol to proteins are described in Delgado et al., Crit. Rev. Thera. Drug Carrier Sys. 9:249-304 (1992); Francis et al., Intern. J. of Hematol. 68:1-18 (1998); U.S. Pat. Nos. 4,002,531; 5,349,052; WO 95/06058; and WO 98/32466, the disclosures of each of which are incorporated herein by reference.

[0224] One system for attaching polyethylene glycol directly to amino acid residues of proteins without an intervening linker employs tresylated MPEG, which is produced by the modification of monmethoxy polyethylene glycol (MPEG) using tresylchloride (ClSO₂CH₂CF₃). Upon reaction of protein with tresylated MPEG, polyethylene glycol is directly attached to amine groups of the protein. Thus, the invention includes protein-polyethylene glycol conjugates produced by reacting proteins of the invention with a polyethylene glycol molecule having a 2,2,2-trifluoreothane sulphonyl group.

[0225] Polyethylene glycol can also be attached to proteins using a number of different intervening linkers. For example, U.S. Pat. No. 5,612,460, the entire disclosure of which is incorporated herein by reference, discloses urethane linkers for connecting polyethylene glycol to proteins. Protein-polyethylene glycol conjugates wherein the polyethylene glycol is attached to the protein by a linker can also be produced by reaction of proteins with compounds such as MPEG-succinimidylsuccinate, MPEG activated with 1,1′-carbonyldiimidazole, MPEG-2,4,5-trichloropenylcarbonate, MPEG-p-nitrophenolcarbonate, and various MPEG-succinate derivatives. A number of additional polyethylene glycol derivatives and reaction chemistries for attaching polyethylene glycol to proteins are described in International Publication No. WO 98/32466, the entire disclosure of which is incorporated herein by reference. Pegylated protein products produced using the reaction chemistries set out herein are included within the scope of the invention.

[0226] The number of polyethylene glycol moieties attached to each protein of the invention (i.e., the degree of substitution) may also vary. For example, the pegylated proteins of the invention may be linked, on average, to 1, 2, 3, 4, 5, 6, 7, 8, 9, 10, 12, 15, 17, 20, or more polyethylene glycol molecules. Similarly, the average degree of substitution within ranges such as 1-3, 2-4, 3-5, 4-6, 5-7, 6-8, 7-9, 8-10, 9-11, 10-12, 11-13, 12-14, 13-15, 14-16, 15-17, 16-18, 17-19, or 18-20 polyethylene glycol moieties per protein molecule. Methods for determining the degree of substitution are discussed, for example, in Delgado et al., Crit. Rev. Thera. Drug Carrier Sys. 9:249-304 (1992).

[0227] The cardiovascular system associated polypeptides of the invention can be recovered and purified from chemical synthesis and recombinant cell cultures by standard methods which include, but are not limited to, ammonium sulfate or ethanol precipitation, acid extraction, anion or cation exchange chromatography, phosphocellulose chromatography, hydrophobic interaction chromatography, affinity chromatography, hydroxylapatite chromatography and lectin chromatography. Most preferably, high performance liquid chromatography (“HPLC”) is employed for purification. Well known techniques for refolding protein may be employed to regenerate active conformation when the polypeptide is denatured during isolation and/or purification.

[0228] Cardiovascular system associated polynucleotides and polypeptides may be used in accordance with the present invention for a variety of applications, particularly those that make use of the chemical and biological properties of cardiovascular system associated antigens. Among these are applications in the detection, prevention, diagnosis and/or treatment of diseases associated with cardiovascular system, such as e.g., cardiovascular system cancer, tumors, cardiovascular abnormalities (e.g., congenital heart defects, cerebral arteriovenous malformations, and septal defects), heart disease (e.g., heart failure, cardiomyopathy, pericarditis, and endocarditis), arrhythmias, heart valve disease (e.g., stenosis, regurgitation, and prolapse), vascular diseases (e.g., arteriosclerosis, coronary artery disease, angina, varicose veins, hypertension, and shock), electrolyte imbalance disorders (e.g., hypo- and hypernatremia, and hypo- and hyperkalemia), and/or those disorders or diseases as described under “Cardiovascular Disorders”. Additional applications relate to diagnosis and to treatment of disorders of cells, tissues and organisms. These aspects of the invention are discussed further below.

[0229] In a preferred embodiment, polynucleotides expressed in a particular tissue type are used to detect, diagnose, treat, prevent and/or prognose disorders associated with the tissue type.

[0230] The polypeptides of the invention may be in monomers or multimers (i.e., dimers, trimers, tetramers and higher multimers). Accordingly, the present invention relates to monomers and multimers of the polypeptides of the invention, their preparation, and compositions (preferably, Therapeutics) containing them. In specific embodiments, the polypeptides of the invention are monomers, dimers, trimers or tetramers. In additional embodiments, the multimers of the invention are at least dimers, at least trimers, or at least tetramers.

[0231] Multimers encompassed by the invention may be homomers or heteromers. As used herein, the term homomer refers to a multimer containing only polypeptides corresponding to a protein of the invention (e.g., the amino acid sequence of SEQ ID NO:Y, an amino acid sequence encoded by SEQ ID NO:X or the complement of SEQ ID NO:X, the amino acid sequence encoded by the portion of SEQ ID NO:X as defined in columns 8 and 9 of Table 2, and/or an amino acid sequence encoded by cDNA contained in Clone ID NO:Z (including fragments, variants, splice variants, and fusion proteins, corresponding to these as described herein)). These homomers may contain polypeptides having identical or different amino acid sequences. In a specific embodiment, a homomer of the invention is a multimer containing only polypeptides having an identical amino acid sequence. In another specific embodiment, a homomer of the invention is a multimer containing polypeptides having different amino acid sequences. In specific embodiments, the multimer of the invention is a homodimer (e.g., containing two polypeptides having identical or different amino acid sequences) or a homotrimer (e.g., containing three polypeptides having identical and/or different amino acid sequences). In additional embodiments, the homomeric multimer of the invention is at least a homodimer, at least a homotrimer, or at least a homotetramer.

[0232] As used herein, the term heteromer refers to a multimer containing two or more heterologous polypeptides (i.e., polypeptides of different proteins) in addition to the polypeptides of the invention. In a specific embodiment, the multimer of the invention is a heterodimer, a heterotrimer, or a heterotetramer. In additional embodiments, the heteromeric multimer of the invention is at least a heterodimer, at least a heterotrimer, or at least a heterotetramer.

[0233] Multimers of the invention may be the result of hydrophobic, hydrophilic, ionic and/or covalent associations and/or may be indirectly linked by, for example, liposome formation. Thus, in one embodiment, multimers of the invention, such as, for example, homodimers or homotrimers, are formed when polypeptides of the invention contact one another in solution. In another embodiment, heteromultimers of the invention, such as, for example, heterotrimers or heterotetramers, are formed when polypeptides of the invention contact antibodies to the polypeptides of the invention (including antibodies to the heterologous polypeptide sequence in a fusion protein of the invention) in solution. In other embodiments, multimers of the invention are formed by covalent associations with and/or between the polypeptides of the invention. Such covalent associations may involve one or more amino acid residues contained in the polypeptide sequence (e.g., that recited in SEQ ID NO:Y, encoded by the portion of SEQ ID NO:X as defined in columns 8 and 9 of Table 2, and/or encoded by the cDNA contained in Clone ID NO:Z). In one instance, the covalent associations are cross-linking between cysteine residues located within the polypeptide sequences which interact in the native (i.e., naturally occurring) polypeptide. In another instance, the covalent associations are the consequence of chemical or recombinant manipulation. Alternatively, such covalent associations may involve one or more amino acid residues contained in the heterologous polypeptide sequence in a fusion protein. In one example, covalent associations are between the heterologous sequence contained in a fusion protein of the invention (see, e.g., U.S. Pat. No. 5,478,925). In a specific example, the covalent associations are between the heterologous sequence contained in a Fc fusion protein of the invention (as described herein). In another specific example, covalent associations of fusion proteins of the invention are between heterologous polypeptide sequence from another protein that is capable of forming covalently associated multimers, such as for example, osteoprotegerin (see, e.g., international Publication NO: WO 98/49305, the contents of which-are herein incorporated by reference in its entirety). In another embodiment, two or more polypeptides of the invention are joined through peptide linkers. Examples include those peptide linkers described in U.S. Pat. No. 5,073,627 (hereby incorporated by reference). Proteins comprising multiple polypeptides of the invention separated by peptide linkers may be produced using conventional recombinant DNA technology.

[0234] Another method for preparing multimer polypeptides of the invention involves use of polypeptides of the invention fused to a leucine zipper or isoleucine zipper polypeptide sequence. Leucine zipper and isoleucine zipper domains are polypeptides that promote multimerization of the proteins in which they are found. Leucine zippers were originally identified in several DNA-binding proteins (Landschulz et al., Science 240:1759, (1988)), and have since been found in a variety of different proteins. Among the known leucine zippers are naturally occurring peptides and derivatives thereof that dimerize or trimerize. Examples of leucine zipper domains suitable for producing soluble multimeric proteins of the invention are those described in PCT application WO 94/10308, hereby incorporated by reference. Recombinant fusion proteins comprising a polypeptide of the invention fused to a polypeptide sequence that dimerizes or trimerizes in solution are expressed in suitable host cells, and the resulting soluble multimeric fusion protein is recovered from the culture supernatant using techniques known in the art.

[0235] Trimeric polypeptides of the invention may offer the advantage of enhanced biological activity. Preferred leucine zipper moieties and isoleucine moieties are those that preferentially form trimers. One example is a leucine zipper derived from lung surfactant protein D (SPD), as described in Hoppe et al. (FEBS Letters 344:191, (1994)) and in U.S. patent application Ser. No. 08/446,922, hereby incorporated by reference. Other peptides derived from naturally occurring trimeric proteins may be employed in preparing trimeric polypeptides of the invention.

[0236] In another example, proteins of the invention are associated by interactions between Flag® polypeptide sequence contained in fusion proteins of the invention containing Flag® polypeptide sequence. In a further embodiment, proteins of the invention are associated by interactions between heterologous polypeptide sequence contained in Flag® fusion proteins of the invention and anti-Flag® antibody.

[0237] The multimers of the invention may be generated using chemical techniques known in the art. For example, polypeptides desired to be contained in the multimers of the invention may be chemically cross-linked using linker molecules and linker molecule length optimization techniques known in the art (see, e.g., U.S. Pat. No. 5,478,925, which is herein incorporated by reference in its entirety). Additionally, multimers of the invention may be generated using techniques known in the art to form one or more inter-molecule cross-links between the cysteine residues located within the sequence of the polypeptides desired to be contained in the multimer (see, e.g., U.S. Pat. No. 5,478,925, which is herein incorporated by reference in its entirety). Further, polypeptides of the invention may be routinely modified by the addition of cysteine or biotin to the C-terminus or N-terminus of the polypeptide and techniques known in the art may be applied to generate multimers containing one or more of these modified polypeptides (see, e.g., U.S. Pat. No. 5,478,925, which is herein incorporated by reference in its entirety). Additionally, techniques known in the art may be applied to generate liposomes containing the polypeptide components desired to be contained in the multimer of the invention (see, e.g., U.S. Pat. No. 5,478,925, which is herein incorporated by reference in its entirety).

[0238] Alternatively, multimers of the invention may be generated using genetic engineering techniques known in the art. In one embodiment, polypeptides contained in multimers of the invention are produced recombinantly using fusion protein technology described herein or otherwise known in the art (see, e.g., U.S. Pat. No. 5,478,925, which is herein incorporated by reference in its entirety). In a specific embodiment, polynucleotides coding for a homodimer of the invention are generated by ligating a polynucleotide sequence encoding a polypeptide of the invention to a sequence encoding a linker polypeptide and then further to a synthetic polynucleotide encoding the translated product of the polypeptide in the reverse orientation from the original C-terminus to the N-terminus (lacking the leader sequence) (see, e.g., U.S. Pat. No. 5,478,925, which is herein incorporated by reference in its entirety). In another embodiment, recombinant techniques described herein or otherwise known in the art are applied to generate recombinant polypeptides of the invention which contain a transmembrane domain (or hydrophobic or signal peptide) and which can be incorporated by membrane reconstitution techniques into liposomes (see, e.g., U.S. Pat. No. 5,478,925, which is herein incorporated by reference in its entirety).

[0239] Antibodies

[0240] Further polypeptides of the invention relate to antibodies and T-cell antigen receptors (TCR) which immunospecifically bind a polypeptide, polypeptide fragment, or variant of the invention (e.g., a polypeptide or fragment or variant of the amino acid sequence of SEQ ID NO:Y or a polypeptide encoded by the cDNA contained in Clone ID NO:Z, and/or an epitope, of the present invention) as determined by immunoassays well known in the art for assaying specific antibody-antigen binding. Antibodies of the invention include, but are not limited to, polyclonal, monoclonal, multispecific, human, humanized or chimeric antibodies, single chain antibodies, Fab fragments, F(ab′) fragments, fragments produced by a Fab expression library, anti-idiotypic (anti-Id) antibodies (including, e.g., anti-Id antibodies to antibodies of the invention), intracellularly-made antibodies (i.e., intrabodies), and epitope-binding fragments of any of the above. The term “antibody,” as used herein, refers to immunoglobulin molecules and immunologically active portions of immunoglobulin molecules, i.e., molecules that contain an antigen binding site that immunospecifically binds an antigen. The immunoglobulin molecules of the invention can be of any type (e.g., IgG, IgE, IgM, IgD, IgA and IgY), class (e.g., IgG1, IgG2, IgG3, IgG4, IgA1 and IgA2) or subclass of immunoglobulin molecule. In preferred embodiments, the immunoglobulin molecules of the invention are IgG1. In other preferred embodiments, the immunoglobulin molecules of the invention are IgG4.

[0241] Most preferably the antibodies are human antigen-binding antibody fragments of the present invention and include, but are not limited to, Fab, Fab′ and F(ab′)2, Fd, single-chain Fvs (scFv), single-chain antibodies, disulfide-linked Fvs (sdFv) and fragments comprising either a VL or VH domain. Antigen-binding antibody fragments, including single-chain antibodies, may comprise the variable region(s) alone or in combination with the entirety or a portion of the following: hinge region, CH1, CH2, and CH3 domains. Also included in the invention are antigen-binding fragments also comprising any combination of variable region(s) with a hinge region, CH1, CH2, and CH3 domains. The antibodies of the invention may be from any animal origin including birds and mammals. Preferably, the antibodies are human, murine (e.g., mouse and rat), donkey, ship rabbit, goat, guinea pig, camel, horse, or chicken. As used herein, “human” antibodies-include antibodies having the amino acid sequence of a human immunoglobulin and include antibodies isolated from human immunoglobulin libraries or from animals transgenic for one or more human immunoglobulin and that do not express endogenous immunoglobulins, as described infra and, for example in, U.S. Pat. No. 5,939,598 by Kucherlapati et al.

[0242] The antibodies of the present invention may be monospecific, bispecific, trispecific or of greater multispecificity. Multispecific antibodies may be specific for different epitopes of a polypeptide of the present invention or may be specific for both a polypeptide of the present invention as well as for a heterologous epitope, such as a heterologous polypeptide or solid support material. See, e.g., PCT publications WO 93/17715; WO 92/08802; WO 91/00360; WO 92/05793; Tutt, et al., J. Immunol. 147:60-69 (1991); U.S. Pat. Nos. 4,474,893; 4,714,681; 4,925,648; 5,573,920; 5,601,819; Kostelny et al., J. Immunol. 148:1547-1553 (1992).

[0243] Antibodies of the present invention may be described or specified in terms of the epitope(s) or portion(s) of a polypeptide of the present invention which they recognize or specifically bind. The epitope(s) or polypeptide portion(s) may be specified as described herein, e.g., by N-terminal and C-terminal positions, or by size in contiguous amino acid residues, or listed in the Tables and Figures. Preferred epitopes of the invention include those shown in column 6 of Table 1A, as well as polynucleotides that encode these epitopes. Antibodies, which specifically bind any epitope or polypeptide of the present invention may also be excluded. Therefore, the present invention includes antibodies that specifically bind polypeptides of the present invention, and allows for the exclusion of the same.

[0244] Antibodies of the present invention may also be described or specified in terms of their cross-reactivity. Antibodies that do not bind any other analog, ortholog, or homolog of a polypeptide of the present invention are included. Antibodies that bind polypeptides with at least 95%, at least 90%, at least 85%, at least 80%, at least 75%, at least 70%, at least 65%, at least 60%, at least 55%, and at least 50% identity (as calculated using methods known in the art and described herein) to a polypeptide of the present invention are also included in the present invention. In specific embodiments, antibodies of the present invention cross-react with murine, rat and/or rabbit homologs of human proteins and the corresponding epitopes thereof. Antibodies that do not bind polypeptides with less than 95%, less than 90%, less than 85%, less than 80%, less than 75%, less than 70%, less than 65%, less than 60%, less than 55%, and less than 50% identity (as calculated using methods known in the art and described herein) to a polypeptide of the present invention are also included in the present invention. In a specific embodiment, the above-described cross-reactivity is with respect to any single specific antigenic or immunogenic polypeptide, or combination(s) of 2, 3, 4, 5, or more of the specific antigenic and/or immunogenic polypeptides disclosed herein. Further included in the present invention are antibodies, which bind polypeptides encoded by polynucleotides, which hybridize to a polynucleotide of the present invention under stringent hybridization conditions (as described herein). Antibodies of the present invention may also be described or specified in terms of their binding affinity to a polypeptide of the invention. Preferred binding affinities include those with a dissociation constant or Kd less than 5×10⁻² M, 10⁻² M, 5×10⁻³ M, 10⁻³ M, 5×10⁻⁴ M, 10⁻⁴ M, 5×10⁻⁵ M, 10⁻⁵ M, 5×10⁻⁶ M, 10⁻⁶ M, 5×10⁻⁷ M, 10⁷ M, 5×10⁻⁸ M, 10⁻⁸ M, 5×10⁻⁹ M, 10⁻⁹ M, 5×10⁻¹⁰ M, 10⁻¹⁰ M, 5×10⁻¹¹ M, 10⁻¹¹ M, 5×10⁻¹² M, 10⁻¹² M, 5×10⁻¹³ M, 10⁻¹³ M, 5×10⁻¹⁴ M, 10⁻¹⁴ M, 5×10⁻¹⁵ M, or 10⁻¹⁵ M.

[0245] The invention also provides antibodies that competitively inhibit binding of an antibody to an epitope of the invention as determined by any method known in the art for determining competitive binding, for example, the immunoassays described herein. In preferred embodiments, the antibody competitively inhibits binding to the epitope by at least 95%, at least 90%, at least 85%, at least 80%, at least 75%, at least 70%, at least 60%, or at least 50%.

[0246] Antibodies of the present invention may act as agonists or antagonists of the polypeptides of the present invention. For example, the present invention includes antibodies, which disrupt the receptor/ligand interactions with the polypeptides of the invention either partially or fully. Preferably, antibodies of the present invention bind an antigenic epitope disclosed herein, or a portion thereof. The invention features both receptor-specific antibodies and ligand-specific antibodies. The invention also features receptor-specific antibodies, which do not prevent ligand binding but prevent receptor activation. Receptor activation (i.e., signaling) may be determined by techniques described herein or otherwise known in the art. For example, receptor activation can be determined by detecting the phosphorylation (e.g., tyrosine or serine/threonine) of the receptor or its substrate by immunoprecipitation followed by western blot analysis (for example, as described supra). In specific embodiments, antibodies are provided that inhibit ligand activity or receptor activity by at least 95%, at least 90%, at least 85%, at least 80%, at least 75%, at least 70%, at least 60%, or at least 50% of the activity in absence of the antibody.

[0247] The invention also features receptor-specific antibodies which both prevent ligand binding and receptor activation as well as antibodies that recognize the receptor-ligand complex, and, preferably, do not specifically recognize the unbound receptor or the unbound ligand. Likewise, included in the invention are neutralizing antibodies which bind the ligand and prevent binding of the ligand to the receptor, as well as antibodies which bind the ligand, thereby preventing receptor activation, but do not prevent the ligand from binding the receptor. Further included in the invention are antibodies, which activate the receptor. These antibodies may act as receptor agonists, i.e., potentiate or activate either all or a subset of the biological activities of the ligand-mediated receptor activation, for example, by inducing dimerization of the receptor. The antibodies may be specified as agonists, antagonists or inverse agonists for biological activities comprising the specific biological activities of the peptides of the invention disclosed herein. The above antibody agonists can be made using methods known in the art. See, e.g., PCT publication WO 96/40281; U.S. Pat. No. 5,811,097; Deng et al., Blood 92(6):1981-1988 (1998); Chen et al., Cancer Res. 58(16):3668-3678 (1998); Harrop et al., J. Immunol. 161(4):1786-1794 (1998); Zhu et al., Cancer Res. 58(15):3209-3214 (1998); Yoon et al., J. Immunol. 160(7):3170-3179 (1998); Prat et al., J. Cell. Sci. 111(Pt2):237-247 (1998); Pitard et al., J. Immunol. Methods 205(2):177-190 (1997); Liautard et al., Cytokine 9(4):233-241 (1997); Carlson et al., J. Biol. Chem. 272(17):1 1295-11301 (1997); Taryman et al., Neuron 14(4):755-762 (1995); Muller et al., Structure 6(9):1153-1167 (1998); Bartunek et al., Cytokine 8(1):14-20 (1996) (which are all incorporated by reference herein in their entireties).

[0248] Antibodies of the present invention may be used, for example, to purify, detect, and target the polypeptides of the present invention, including both in vitro and in vivo diagnostic and therapeutic methods. For example, the antibodies have utility in immunoassays for qualitatively and quantitatively measuring levels of the polypeptides of the present invention in biological samples. See, e.g., Harlow et al., Antibodies: A Laboratory Manual, (Cold Spring Harbor Laboratory Press, 2nd ed. 1988); incorporated by reference herein in its entirety.

[0249] As discussed in more detail below, the antibodies of the present invention may be used either alone or in combination with other compositions. The antibodies may further be recombinantly fused to a heterologous polypeptide at the N- or C-terminus or chemically conjugated (including covalent and non-covalent conjugations) to polypeptides or other compositions. For example, antibodies of the present invention may be recombinantly fused or conjugated to molecules useful as labels in detection assays and effector molecules such as heterologous polypeptides, drugs, radionuclides, or toxins. See, e.g., PCT publications WO 92/08495; WO 91/14438; WO 89/12624; U.S. Pat. No. 5,314,995; and EP 396,387; the disclosures of which are incorporated herein by reference in their entireties.

[0250] The antibodies of the invention include derivatives that are modified, i.e., by the covalent attachment of any type of molecule to the antibody such that covalent attachment does not prevent the antibody from generating an anti-idiotypic response. For example, but not by way of limitation, the antibody derivatives include antibodies that have been modified, e.g., by glycosylation, acetylation, pegylation, phosphylation, amidation, derivatization by known protecting/blocking groups, proteolytic cleavage, linkage to a cellular ligand or other protein, etc. Any of numerous chemical modifications may be carried out by known techniques, including, but not limited to specific chemical cleavage, acetylation, formylation, metabolic synthesis of tunicamycin, etc. Additionally, the derivative may contain one or more non-classical amino acids.

[0251] The antibodies of the present invention may be generated by any suitable method known in the art. Polyclonal antibodies to an antigen-of-interest can be produced by various procedures well known in the art. For example, a polypeptide of the invention can be administered to various host animals including, but not limited to, rabbits, mice, rats, etc. to induce the production of sera containing polyclonal antibodies specific for the antigen. Various adjuvants may be used to increase the immunological response, depending on the host species, and include but are not limited to, Freund's (complete and incomplete), mineral gels such as aluminum hydroxide, surface active substances such as lysolecithin, pluronic polyols, polyanions, peptides, oil emulsions, keyhole limpet hemocyanins, dinitrophenol, and potentially useful human adjuvants such as BCG (bacille Calmette-Guerin) and corynebacterium parvum. Such adjuvants are also well known in the art.

[0252] Monoclonal antibodies can be prepared using a wide variety of techniques known in the art including the use of hybridoma, recombinant, and phage display technologies, or a combination thereof. For example, monoclonal antibodies can be produced using hybridoma techniques including those known in the art and taught, for example, in Harlow et al., Antibodies: A Laboratory Manual, (Cold Spring Harbor Laboratory Press, 2nd ed. 1988); Hammerling, et al., in: Monoclonal Antibodies and T-Cell Hybridomas 563-681 (Elsevier, N.Y., 1981) (said references incorporated by reference in their entireties). The term “monoclonal antibody” as used herein is not limited to antibodies produced through hybridoma technology. The term “monoclonal antibody” refers to an antibody that is derived from a single clone, including any eukaryotic, prokaryotic, or phage clone, and not the method by which it is produced.

[0253] Methods for producing and screening for specific antibodies using hybridoma technology are routine and well known in the art and are discussed in detail in the Examples. In a non-limiting example, mice can be immunized with a polypeptide of the invention or a cell expressing such peptide. Once an immune response is detected, e.g., antibodies specific for the antigen are detected in the mouse serum, the mouse spleen is harvested and splenocytes isolated. The splenocytes are then fused by well known techniques to any suitable myeloma cells, for example cells from cell line SP20 available from the ATCC. Hybridomas are selected and cloned by limited dilution. The hybridoma clones are then assayed by methods known in the art for cells that secrete antibodies capable of binding a polypeptide of the invention. Ascites fluid, which generally contains high levels of antibodies, can be generated by immunizing mice with positive hybridoma clones.

[0254] Accordingly, the present invention provides methods of generating monoclonal antibodies as well as antibodies produced by the method comprising culturing a hybridoma cell secreting an antibody of the invention wherein, preferably, the hybridoma is generated by fusing splenocytes isolated from a mouse immunized with an antigen of the invention with myeloma cells and then screening the hybridomas resulting from the fusion for hybridoma clones that secrete an antibody able to bind a polypeptide of the invention.

[0255] Another well known method for producing both polyclonal and monoclonal human B cell lines is transformation using Epstein Barr Virus (EBV). Protocols for generating EBV-transformed B cell lines are commonly known in the art, such as, for example, the protocol outlined in Chapter 7.22 of Current Protocols in Immunology, Coligan et al., Eds., 1994, John Wiley & Sons, NY, which is hereby incorporated in its entirety by reference herein. The source of B cells for transformation is commonly human peripheral blood, but B cells for transformation may also be derived from other sources including, but not limited to, lymph nodes, tonsil, spleen, tumor tissue, and infected tissues. Tissues are generally made into single cell suspensions prior to EBV transformation. Additionally, steps may be taken to either physically remove or inactivate T cells (e.g., by treatment with cyclosporin A) in B cell-containing samples, because T cells from individuals seropositive for anti-EBV antibodies can suppress B cell immortalization by EBV.

[0256] In general, the sample containing human B cells is innoculated with EBV, and cultured for 3-4 weeks. A typical source of EBV is the culture supernatant of the B95-8 cell line (ATCC #VR-1492). Physical signs of EBV transformation can generally be seen towards the end of the 3-4 week culture period. By phase-contrast microscopy, transformed cells may appear large, clear, hairy and tend to aggregate in tight clusters of cells. Initially, EBV lines are generally polyclonal. However, over prolonged periods of cell cultures, EBV lines may become monoclonal or polyclonal as a result of the selective outgrowth of particular B cell clones. Alternatively, polyclonal EBV transformed lines may be subcloned (e.g., by limiting dilution culture) or fused with a suitable fusion partner and plated at limiting dilution to obtain monoclonal B cell lines. Suitable fusion partners for EBV transformed cell lines include mouse myeloma cell lines (e.g., SP2/0, X63-Ag8.653), heteromyeloma cell lines (human x mouse; e.g., SPAM-8, SBC-H20, and CB-F7), and human cell lines (e.g., GM 1500, SKO-007, RPMI 8226, and KR-4). Thus, the present invention also provides a method of generating polyclonal or monoclonal human antibodies against polypeptides of the invention or fragments thereof, comprising EBV-transformation of human B cells.

[0257] Antibody fragments which recognize specific epitopes may be generated by known techniques. For example, Fab and F(ab′)2 fragments of the invention may be produced by proteolytic cleavage of immunoglobulin molecules, using enzymes such as papain (to produce Fab fragments) or pepsin (to produce F(ab′)2 fragments). F(ab′)2 fragments contain the variable region, the light chain constant region and the CH1 domain of the heavy chain. For example, the antibodies of the present invention can also be generated using various phage display methods known in the art and as discussed in detail in the Examples (e.g., Example 10). In phage display methods, functional antibody domains are displayed on the surface of phage particles, which carry the polynucleotide sequences encoding them. In a particular embodiment, such phage can be utilized to display antigen binding domains expressed from a repertoire or combinatorial antibody library (e.g., human or murine). Phage expressing an antigen binding domain that binds the antigen of interest can be selected or identified with antigen, e.g., using labeled antigen or antigen bound or captured to a solid surface or bead. Phage used in these methods are typically filamentous phage including fd and M13 binding domains expressed from phage with Fab, Fv or disulfide stabilized Fv antibody domains recombinantly fused to either the phage gene III or gene VIII protein. Examples of phage display methods that can be used to make the antibodies of the present invention include those disclosed in Brinkman et al., J. Immunol. Methods 182:41-50 (1995); Ames et al., J. Immunol. Methods 184:177-186 (1995); Kettleborough et al., Eur. J. Immunol. 24:952-958 (1994); Persic et al., Gene 187 9-18 (1997); Burton et al., Advances in Immunology 57:191-280 (1994); PCT application No. PCT/GB91/01134; PCT publications WO 90/02809; WO 91/10737; WO 92/01047; WO 92/18619; WO 93/11236; WO 95/15982; WO 95/20401; and U.S. Pat. Nos. 5,698,426; 5,223,409; 5,403,484; 5,580,717; 5,427,908; 5,750,753; 5,821,047; 5,571,698; 5,427,908; 5,516,637; 5,780,225; 5,658,727; 5,733,743 and 5,969,108; each of which is incorporated herein by reference in its entirety.

[0258] As described in the above references, after phage selection, the antibody coding regions from the phage can be isolated and used to generate whole antibodies, including human antibodies, or any other desired antigen binding fragment, and expressed in any desired host, including mammalian cells, insect cells, plant cells, yeast, and bacteria, e.g., as described in detail below. For example, techniques to recombinantly produce Fab, Fab′and F(ab′)2 fragments can also be employed using methods known in the art such as those disclosed in PCT publication WO 92/22324; Mullinax et al., BioTechniques 12(6):864-869 (1992); and Sawai et al., AJRI 34:26-34 (1995); and Better et al., Science 240:1041-1043 (1988) (said references incorporated by reference in their entireties).

[0259] Examples of techniques which can be used to produce single-chain Fvs and antibodies include those described in U.S. Pat. Nos. 4,946,778 and 5,258,498; Huston et al., Methods in Enzymology 203:46-88 (1991); Shu et al., PNAS 90:7995-7999 (1993); and Skerra et al., Science 240:1038-1040 (1988). For some uses, including in vivo use of antibodies in humans and in vitro detection assays, it may be preferable to use chimeric, humanized, or human antibodies. A chimeric antibody is a molecule in which different portions of the antibody are derived from different animal species, such as antibodies having a variable region derived from a murine monoclonal antibody and a human immunoglobulin constant region. Methods for producing chimeric antibodies are known in the art. See e.g., Morrison, Science 229:1202 (1985); Oi et al., BioTechniques 4:214 (1986); Gillies et al., (1989) J. Immunol. Methods 125:191-202; U.S. Pat. Nos. 5,807,715; 4,816,567; and 4,816397, which are incorporated herein by reference in their entirety. Humanized antibodies are antibody molecules from non-human species antibody that binds the desired antigen having one or more complementarity determining regions (CDRs) from the non-human species and a frameworkregions from a human immunoglobulin molecule. Often, framework residues in the human framework regions will be substituted with the corresponding residue from the CDR donor antibody to alter, preferably improve, antigen binding. These framework substitutions are identified by methods well known in the art, e.g., by modeling of the interactions of the CDR and framework residues to identify framework residues important for antigen binding and sequence comparison to identify unusual framework residues at particular positions. (See, e.g., Queen et al., U.S. Pat. No. 5,585,089; Riechmann et al., Nature 332:323 (1988), which are incorporated herein by reference in their entireties.) Antibodies can be humanized using a variety of techniques known in the art including, for example, CDR-grafting (EP 239,400; PCT publication WO 91/09967; U.S. Pat. Nos. 5,225,539; 5,530,101; and 5,585,089), veneering or resurfacing (EP 592,106; EP 519,596; Padlan, Molecular Immunology 28(4/5):489-498 (1991); Studnicka et al., Protein Engineering 7(6):805-814 (1994); Roguska. et al., PNAS 91:969-973 (1994)), and chain shuffling (U.S. Pat. No. 5,565,332).

[0260] Completely human antibodies are particularly desirable for therapeutic treatment of human patients. Human antibodies can be made by a variety of methods known in the art including phage display methods described above using antibody libraries derived from human immunoglobulin sequences. See also, U.S. Pat. Nos. 4,444,887 and 4,716,111; and PCT publications WO 98/46645, WO 98/50433, WO 98/24893, WO 98/16654, WO 96/34096, WO 96/33735, and WO 91/10741; each of which is incorporated herein by reference in its entirety.

[0261] Human antibodies can also be produced using transgenic mice which are incapable of expressing functional endogenous immunoglobulins, but which can express human immunoglobulin genes. For example, the human heavy and light chain immunoglobulin gene complexes may be introduced randomly or by homologous recombination into mouse embryonic stem cells. Alternatively, the human variable region, constant region, and diversity region may be introduced into mouse embryonic stem cells in addition to the human heavy and light chain genes. The mouse heavy and light chain immunoglobulin genes may be rendered non-functional separately or simultaneously with the introduction of human immunoglobulin loci by homologous recombination. In particular, homozygous deletion of the JH region prevents endogenous antibody production. The modified embryonic stem cells are expanded and microinjected into blastocysts to produce chimeric mice. The chimeric mice are then bred to produce homozygous offspring, which express human antibodies. The transgenic mice are immunized in the normal fashion with a selected antigen, e.g., all or a portion of a polypeptide of the invention. Monoclonal antibodies directed against the antigen can be obtained from the immunized, transgenic mice using conventional hybridoma technology. The human immunoglobulin transgenes harbored by the transgenic mice rearrange during B cell differentiation, and subsequently undergo class switching and somatic mutation. Thus, using such a technique, it is possible to produce therapeutically useful IgG, IgA, IgM and IgE antibodies. For an overview of this technology for producing human antibodies, see Lonberg and Huszar, Int. Rev. Immunol. 13:65-93 (1995). For a detailed discussion of this technology for producing human antibodies and human monoclonal antibodies and protocols for producing such antibodies, see, e.g., PCT publications WO 98/24893; WO 92/01047; WO 96/34096; WO 96/33735; European Patent No. 0 598 877; U.S. Pat. Nos. 5,413,923; 5,625,126; 5,633,425; 5,569,825; 5,661,016; 5,545,806; 5,814,318; 5,885,793; 5,916,771; 5,939,598; 6,075,181 and 6,114,598, which are incorporated by reference herein in their entirety. In addition, companies such as Abgenix, Inc. (Freemont, Calif.) and Genpharm (San Jose, Calif.) can be engaged to provide human antibodies directed against a selected antigen using technology similar to that described above.

[0262] Completely human antibodies, which recognize a selected epitope can be generated using a technique referred to as “guided selection.” In this approach a selected non-human monoclonal antibody, e.g., a mouse antibody, is used to guide the selection of a completely human antibody recognizing the same epitope. (Jespers et al., Bio/technology 12:899-903 (1988)).

[0263] Further, antibodies to the polypeptides of the invention can, in turn, be utilized to generate anti-idiotype antibodies that “mimic” polypeptides of the invention using techniques well known to those skilled in the art. (See, e.g., Greenspan & Bona, FASEB J. 7(5):437-444; (1989) and Nissinoff, J. Immunol. 147(8):2429-2438 (1991)). For example, antibodies which bind to and competitively inhibit polypeptide multimerization and/or binding of a polypeptide of the invention to a ligand can be used to generate anti-idiotypes that “mimic” the polypeptide multimerization and/or binding domain and, as a consequence, bind to and neutralize polypeptide and/or its ligand. Such neutralizing anti-idiotypes or Fab fragments of such anti-idiotypes can be used in therapeutic regimens to neutralize polypeptide ligand/receptor. For example, such anti-idiotypic antibodies can be used to bind a polypeptide of the invention and/or to bind its ligand(s)/receptor(s), and thereby block its biological activity. Alternatively, antibodies, which bind to and enhance polypeptide multimerization and/or binding, and/or receptor/ligand multimerization, binding and/or signaling can be used to generate anti-idiotypes that function as agonists of a polypeptide of the invention and/or its ligand/receptor. Such agonistic anti-idiotypes or Fab fragments of such anti-idiotypes can be used in therapeutic regimens as agonists of the polypeptides of the invention or its ligand(s)/receptor(s). For example, such anti-idiotypic antibodies can be used to bind a polypeptide of the invention and/or to bind its ligand(s)/receptor(s), and thereby promote or enhance its biological activity.

[0264] Intrabodies of the invention can be produced using methods known in the art, such as those disclosed and reviewed in Chen et al., Hum. Gene Ther. 5:595-601 (1994); Marasco, W. A., Gene Ther. 4:11-15 (1997); Rondon and Marasco, Annu. Rev. Microbiol. 51:257-283 (1997); Proba et al., J. Mol. Biol. 275:245-253 (1998); Cohen et al., Oncogene 17:2445-2456 (1998); Ohage and Steipe, J. Mol. Biol. 291:1119-1128 (1999); Ohage et al., J. Mol. Biol. 291:1129-1134 (1999); Wirtz and Steipe, Protein Sci. 8:2245-2250 (1999); Zhu et al., J. Immunol. Methods 231:207-222 (1999); and references cited therein.

[0265] Polynucleotides Encoding Antibodies

[0266] The invention further provides polynucleotides comprising a nucleotide sequence encoding an antibody of the invention and fragments thereof. The invention also encompasses polynucleotides that hybridize under stringent or alternatively, under lower stringency hybridization conditions, e.g., as defined supra, to polynucleotides that encode an antibody, preferably, that specifically binds to a polypeptide of the invention, preferably, an antibody that binds to a polypeptide having the amino acid sequence of SEQ ID NO:Y, to a polypeptide encoded by a portion of SEQ ID NO:X as defined in columns 8 and 9 of Table 2, and/or to a polypeptide encoded by the cDNA contained in Clone ID NO:Z.

[0267] The polynucleotides may be obtained, and the nucleotide sequence of the polynucleotides determined, by any method known in the art. For example, if the nucleotide sequence of the antibody is known, a polynucleotide encoding the antibody may be assembled from chemically synthesized oligonucleotides (e.g., as described in Kutmeier et al., BioTechniques 17:242 (1994)), which, briefly, involves the synthesis of overlapping oligonucleotides containing portions of the sequence encoding the antibody, annealing and ligating of those oligonucleotides, and then amplification of the ligated oligonucleotides by PCR.

[0268] Alternatively, a polynucleotide encoding an antibody may be generated from nucleic acid from a suitable source. If a clone containing a nucleic acid encoding a particular antibody is not available, but the sequence of the antibody molecule is known, a nucleic acid encoding the immunoglobulin may be chemically synthesized or obtained from a suitable source (e.g., an antibody cDNA library, or a cDNA library generated from, or nucleic acid, preferably poly A+ RNA, isolated from, any tissue or cells expressing the antibody, such as hybridoma cells selected to express an antibody of the invention) by PCR amplification using synthetic primers hybridizable to the 3′ and 5′ ends of the sequence or by cloning using an oligonucleotide probe specific for the particular gene sequence to identify, e.g., a cDNA clone from a cDNA library that encodes the antibody. Amplified nucleic acids generated by PCR may then be cloned into replicable cloning vectors using any method well known in the art.

[0269] Once the nucleotide sequence and corresponding amino acid sequence of the antibody is determined, the nucleotide sequence of the antibody may be manipulated using methods well known in the art for the manipulation of nucleotide sequences, e.g., recombinant DNA techniques, site directed mutagenesis, PCR, etc. (see, for example, the techniques described in Sambrook et al., 1990, Molecular Cloning, A Laboratory Manual, 2d Ed., Cold Spring Harbor Laboratory, Cold Spring Harbor, N.Y. and Ausubel et al., eds., 1998, Current Protocols in Molecular Biology, John Wiley & Sons, NY, which are both incorporated by reference herein in their entireties ), to generate antibodies having a different amino acid sequence, for example to create amino acid substitutions, deletions, and/or insertions.

[0270] In a specific embodiment, the amino acid sequence of the heavy and/or light chain variable domains may be inspected to identify the sequences of the complementarity determining regions (CDRs) by methods that are well know in the art, e.g., by comparison to known amino acid sequences of other heavy and light chain variable regions to determine the regions of sequence hypervariability. Using routine recombinant DNA techniques, one or more of the CDRs may be inserted within framework regions, e.g., into human framework regions to humanize a non-human antibody, as described supra. The framework regions may be naturally occurring or consensus framework regions, and preferably human framework regions (see, e.g., Chothia et al., J. Mol. Biol. 278: 457-479 (1998) for a listing of human framework regions). Preferably, the polynucleotide generated by the combination of the framework regions and CDRs encodes an antibody that specifically binds a polypeptide of the invention. Preferably, as discussed supra, one or more amino acid substitutions may be made within the framework regions, and, preferably, the amino acid substitutions improve binding of the antibody to its antigen. Additionally, such methods may be used to make amino acid substitutions or deletions of one or more variable region cysteine residues participating in an intrachain disulfide bond to generate antibody molecules lacking one or more intrachain disulfide bonds. Other alterations to the polynucleotide are encompassed by the present invention and within the skill of the art.

[0271] In addition, techniques developed for the production of “chimeric antibodies” (Morrison et al., Proc. Natl. Acad. Sci. 81:851-855 (1984); Neuberger et al., Nature 312:604-608 (1984); Takeda et al., Nature 314:452-454 (1985)) by splicing genes from a mouse antibody molecule of appropriate antigen specificity together with genes from a human antibody molecule of appropriate biological activity can be used. As described supra, a chimeric antibody is a molecule in which different portions are derived from different animal species, such as those having a variable region derived from a murine mAb and a human immunoglobulin constant region, e.g., humanized antibodies.

[0272] Alternatively, techniques described for the production of single chain antibodies (U.S. Pat. No. 4,946,778; Bird, Science 242:423-42 (1988); Huston et al., Proc. Natl. Acad. Sci. USA 85:5879-5883 (1988); and Ward et al., Nature 334:544-54 (1989)) can be adapted to produce single chain antibodies. Single chain antibodies are formed by linking the heavy and light chain fragments of the Fv region via an amino acid bridge, resulting in a single chain polypeptide. Techniques for the assembly of functional Fv fragments in E. coli may also be used (Skerra et al., Science 242:1038-1041 (1988)).

[0273] Methods of Producing Antibodies

[0274] The antibodies of the invention can be produced by any method known in the art for the synthesis of antibodies, in particular, by chemical synthesis or preferably, by recombinant expression techniques. Methods of producing antibodies include, but are not limited to, hybridoma technology, EBV transformation, and other methods discussed herein as well as through the use recombinant DNA technology, as discussed below.

[0275] Recombinant expression of an antibody of the invention, or fragment, derivative or analog thereof, (e.g., a heavy or light chain of an antibody of the invention or a single chain antibody of the invention), requires construction of an expression vector containing a polynucleotide that encodes the antibody. Once a polynucleotide encoding an antibody molecule or a heavy or light chain of an antibody, or portion thereof (preferably containing the heavy or light chain variable domain), of the invention has been obtained, the vector for the production of the antibody molecule may be produced by recombinant DNA technology using techniques well known in the art. Thus, methods for preparing a protein by expressing a polynucleotide containing an antibody encoding nucleotide sequence are described herein. Methods which are well known to those skilled in the art can be used to construct expression vectors containing antibody coding sequences and appropriate transcriptional and translational control signals. These methods include, for example, in vitro recombinant DNA techniques, synthetic techniques, and in vivo genetic recombination. The invention, thus, provides replicable vectors comprising a nucleotide sequence encoding an antibody molecule of the invention, or a heavy or light chain thereof, or a heavy or light chain variable domain, operably linked to a promoter. Such vectors may include the nucleotide sequence encoding the constant region of the antibody molecule (see, e.g., PCT Publication WO 86/05807; PCT Publication WO 89/01036; and U.S. Pat. No. 5,122,464) and the variable domain of the antibody may be cloned into such a vector for expression of the entire heavy or light chain.

[0276] The expression vector is transferred to a host cell by conventional techniques and the transfected cells are then cultured by conventional techniques to produce an antibody of the invention. Thus, the invention includes host cells containing a polynucleotide encoding an antibody of the invention, or a heavy or light chain thereof, or a single chain antibody of the invention, operably linked to a heterologous promoter. In preferred embodiments for the expression of double-chained antibodies, vectors encoding both the heavy and light chains may be co-expressed expressed in the host cell for expression of the entire immunoglobulin molecule, as detailed below.

[0277] A variety of host-expression vector systems may be utilized to express the antibody molecules of the invention. Such host-expression systems represent vehicles by which the coding sequences of interest may be produced and subsequently purified, but also represent cells which may, when transformed or transfected with the appropriate nucleotide coding sequences, express an antibody molecule of the invention in situ. These include but are not limited to microorganisms such as bacteria (e.g., E. coli, B. subtilis) transformed with recombinant bacteriophage DNA, plasmid DNA or cosmid DNA expression vectors containing antibody coding sequences; yeast (e.g., Saccharomyces, Pichia) transformed with recombinant yeast expression vectors containing antibody coding sequences; insect cell systems infected with recombinant virus expression vectors (e.g., baculovirus) containing antibody coding sequences; plant cell systems infected with recombinant virus expression vectors (e.g., cauliflower mosaic virus, CaMV; tobacco mosaic virus, TMV) or transformed with recombinant plasmid expression vectors (e.g., Ti plasmid) containing antibody coding sequences; or mammalian cell systems (e.g., COS, CHO, BHK, 293, 3T3 cells) harboring recombinant expression constructs containing promoters derived from the genome of mammalian cells (e.g., metallothionein promoter) or from mammalian viruses (e.g., the adenovirus late promoter; the vaccinia virus 7.5K promoter). Preferably, bacterial cells such as Escherichia coli, and more preferably, eukaryotic cells, especially for the expression of whole recombinant antibody molecule, are used for the expression of a recombinant antibody molecule. For example, mammalian cells such as Chinese hamster ovary cells (CHO), in conjunction with a vector such as the major intermediate early gene promoter element from human cytomegalovirus is an effective expression system for antibodies (Foecking et al., Gene 45:101 (1986); Cockett et al., Bio/Technology 8:2 (1990)).

[0278] In bacterial systems, a number of expression vectors may be advantageously selected depending upon the use intended for the antibody molecule being expressed. For example, when a large quantity of such a protein is to be produced, for the generation of pharmaceutical compositions of an antibody molecule, vectors which direct the expression of high levels of fusion protein products that are readily purified may be desirable. Such vectors include, but are not limited, to the E. coli expression vector pUR278 (Ruther et al., EMBO J. 2:1791 (1983)), in which the antibody coding sequence may be ligated individually into the vector in frame with the lac Z coding region so that a fusion protein is produced; pIN vectors (Inouye & Inouye, Nucleic Acids Res. 13:3101-3109 (1985); Van Heeke & Schuster, J. Biol. Chem. 24:5503-5509 (1989)); and the like. pGEX vectors may also be used to express foreign polypeptides as fusion proteins with glutathione S-transferase (GST). In general, such fusion proteins are soluble and can easily be purified from lysed cells by adsorption and binding to matrix glutathione-agarose beads followed by elution in the presence of free glutathione. The pGEX vectors are designed to include thrombin or factor Xa protease cleavage sites so that the cloned target gene product can be released from the GST moiety.

[0279] In an insect system, Autographa californica nuclear polyhedrosis virus (AcNPV) is used as a vector to express foreign genes. The virus grows in Spodoptera frugiperda cells. The antibody coding sequence may be cloned individually into non-essential regions (for example the polyhedrin gene) of the virus and placed under control of an AcNPV promoter (for example the polyhedrin promoter).

[0280] In mammalian host cells, a number of viral-based expression systems may be utilized. In cases where an adenovirus is used as an expression vector, the antibody coding sequence of interest may be ligated to an adenovirus transcription/translation control complex, e.g., the late promoter and tripartite leader sequence. This chimeric gene may then be inserted in the adenovirus genome by in vitro or in vivo recombination. Insertion in a non-essential region of the viral genome (e.g., region E1 or E3) will result in a recombinant virus that is viable and capable of expressing the antibody molecule in infected hosts. (e.g., see Logan & Shenk, Proc. Natl. Acad. Sci. USA 81:355-359 (1984)). Specific initiation signals may also be required for efficient translation of inserted antibody coding sequences. These signals include the ATG initiation codon and adjacent sequences. Furthermore, the initiation codon must be in phase with the reading frame of the desired coding sequence to ensure translation of the entire insert. These exogenous translational control signals and initiation codons can be of a variety of origins, both natural and synthetic. The efficiency of expression may be enhanced by the inclusion of appropriate transcription enhancer elements, transcription terminators, etc. (see Bittner et al., Methods in Enzymol. 153:51-544 (1987)).

[0281] In addition, a host cell strain may be chosen, which modulates the expression of the inserted sequences, or modifies and processes the gene product in the specific fashion desired. Such modifications (e.g., glycosylation) and processing (e.g., cleavage) of protein products may be important for the function of the protein. Different host cells have characteristic and specific mechanisms for the post-translational processing and modification of proteins and gene products. Appropriate cell lines or host systems can be chosen to ensure the correct modification and processing of the foreign protein expressed. To this end, eukaryotic host cells, which possess the cellular machinery for proper processing of the primary transcript, glycosylation, and phosphorylation of the gene product may be used. Such mammalian host cells include but are not limited to CHO, VERY, BHK, Hela, COS, MDCK, 293, 3T3, W138, and in particular, breast cancer cell lines such as, for example, BT483, Hs578T, HTB2, BT20 and T47D, and normal mammary gland cell line such as, for example, CRL7030 and Hs578Bst.

[0282] For long-term, high-yield production of recombinant proteins, stable expression is preferred. For example, cell lines, which stably express the antibody molecule may be engineered. Rather than using expression vectors which contain viral origins of replication, host cells can be transformed with DNA controlled by appropriate expression control elements (e.g., promoter, enhancer, sequences, transcription terminators, polyadenylation sites, etc.), and a selectable marker. Following the introduction of the foreign DNA, engineered cells may be allowed to grow for 1-2 days in an enriched media, and then are switched to a selective media. The selectable marker in the recombinant plasmid confers resistance to the selection and allows cells to stably integrate the plasmid into their chromosomes and grow to form foci which in turn can be cloned and expanded into cell lines. This method may advantageously be used to engineer cell lines, which express the antibody molecule. Such engineered cell lines may be particularly useful in screening and evaluation of compounds that interact directly or indirectly with the antibody molecule.

[0283] A number of selection systems may be used, including but not limited to the herpes simplex virus thymidine kinase (Wigler et al., Cell 11:223 (1977)), hypoxanthine-guanine phosphoribosyltransferase (Szybalska & Szybalski, Proc. Natl. Acad. Sci. USA 48:202 (1992)), and adenine phosphoribosyltransferase (Lowy et al., Cell 22:817 (1980)) genes can be employed in tk-, hgprt- or aprt-cells, respectively. Also, antimetabolite resistance can be used as the basis of selection for the following genes: dhfr, which confers resistance to methotrexate (Wigler et al., Natl. Acad. Sci. USA 77:357 (1980); O'Hare et al., Proc. Natl. Acad. Sci. USA 78:1527 (1981)); gpt, which confers resistance to mycophenolic acid (Mulligan & Berg, Proc. Natl. Acad. Sci. USA 78:2072 (1981)); neo, which confers resistance to the aminoglycoside G-418 Clinical Pharmacy 12:488-505; Wu and Wu, Biotherapy 3:87-95 (1991); Tolstoshev, Ann. Rev. Pharmacol. Toxicol. 32:573-596 (1993); Mulligan, Science 260:926-932 (1993); and Morgan and Anderson, Ann. Rev. Biochem. 62:191-217 (1993); TIB TECH 11(5):155-215 (1993)); and hygro, which confers resistance to hygromycin (Santerre et al., Gene 30:147 (1984)). Methods commonly known in the art of recombinant DNA technology may be routinely applied to select the desired recombinant clone, and such methods are described, for example, in Ausubel et al. (eds.), Current Protocols in Molecular Biology, John Wiley & Sons, NY (1993); Kriegler, Gene Transfer and Expression, A Laboratory Manual, Stockton Press, NY (1990); and in Chapters 12 and 13, Dracopoli et al. (eds), Current Protocols in Human Genetics, John Wiley & Sons, NY (1994); Colberre-Garapin et al., J. Mol. Biol. 150:1 (1981), which are incorporated by reference herein in their entireties.

[0284] The expression levels of an antibody molecule can be increased by vector amplification (for a review, see Bebbington and Hentschel, The use of vectors based on gene amplification for the expression of cloned genes in mammalian cells in DNA cloning, Vol.3. (Academic Press, New York, 1987)). When a marker in the vector system expressing antibody is amplifiable, increase in the level of inhibitor present in culture of host cell will increase the number of copies of the marker gene. Since the amplified region is associated with the antibody gene, production of the antibody will also increase (Crouse et al., Mol. Cell. Biol. 3:257 (1983)).

[0285] Vectors, which use glutamine synthase (GS) or DHFR as the selectable markers, can be amplified in the presence of the drugs methionine sulphoximine or methotrexate, respectively. An advantage of glutamine synthase based vectors are the availability of cell lines (e.g., the murine myeloma cell line, NS0) which are glutamine synthase negative. Glutamine synthase expression systems can also function in glutamine synthase expressing cells (e.g., Chinese Hamster Ovary (CHO) cells) by providing additional inhibitor to prevent the functioning of the endogenous gene. A glutamine synthase expression system and components thereof are detailed in PCT publications: WO87/04462; WO86/05807; WO89/01036; WO89/10404; and WO91/06657 which are incorporated in their entireties by reference herein. Additionally, glutamine synthase expression vectors that may be used according to the present invention are commercially available from suppliers, including, for example Lonza Biologics, Inc. (Portsmouth, N.H.). Expression and production of monoclonal antibodies using a GS expression system in murine myeloma cells is described in Bebbington et al., Bio/technology 10:169(1992) and in Biblia and Robinson Biotechnol. Prog. 11:1 (1995) which are incorporated in their entireties by reference herein.

[0286] The host cell may be co-transfected with two expression vectors of the invention, the first vector encoding a heavy chain derived polypeptide and the second vector encoding a light chain derived polypeptide. The two vectors may contain identical selectable markers, which enable equal expression of heavy and light chain polypeptides. Alternatively, a single vector may be used which encodes, and is capable of expressing, both heavy and light chain polypeptides. In such situations, the light chain should be placed before the heavy chain to avoid an excess of toxic free heavy chain (Proudfoot, Nature 322:52 (1986); Kohler, Proc. Natl. Acad. Sci. USA 77:2197 (1980)). The coding sequences for the heavy and light chains may comprise cDNA or genomic DNA.

[0287] Once an antibody molecule of the invention has been produced by an animal, chemically synthesized, or recombinantly expressed, it may be purified by any method known in the art for purification of an immunoglobulin molecule, for example, by chromatography (e.g., ion exchange, affinity, particularly by affinity for the specific antigen after Protein A, and sizing column chromatography), centrifugation, differential solubility, or by any other standard technique for the purification of proteins. In addition, the antibodies of the present invention or fragments thereof can be fused to heterologous polypeptide sequences described herein or otherwise known in the art, to facilitate purification.

[0288] The present invention encompasses antibodies recombinantly fused or chemically conjugated (including both covalently and non-covalently conjugations) to a polypeptide (or portion thereof, preferably at least 10, 20, 30, 40, 50, 60, 70, 80, 90 or 100 amino acids of the polypeptide) of the present invention to generate fusion proteins. The fusion does not necessarily need to be direct, but may occur through linker sequences. The antibodies may be specific for antigens other than polypeptides (or portion thereof, preferably at least 10, 20, 30, 40, 50, 60, 70, 80, 90 or 100 amino acids of the polypeptide) of the present invention. For example, antibodies may be used to target the polypeptides of the present invention to particular cell types, either in vitro or in vivo, by fusing or conjugating the polypeptides of the present invention to antibodies specific for particular cell surface receptors. Antibodies fused or conjugated to the polypeptides of the present invention may also be used in in vitro immunoassays and purification methods using methods known in the art. See e.g., Harbor et al., supra, and PCT publication WO 93/21232; EP 439,095; Naramura et al., Immunol. Lett. 39:91-99 (1994); U.S. Pat. No. 5,474,981; Gillies et al., PNAS 89:1428-1432 (1992); Fell et al., J. Immunol. 146:2446-2452 (1991), which are incorporated by reference in their entireties.

[0289] The present invention further includes compositions comprising the polypeptides of the present invention fused or conjugated to antibody domains other than the variable regions. For example, the polypeptides of the present invention may be fused or conjugated to an antibody Fc region, or portion thereof. The antibody portion fused to a polypeptide of the present invention may comprise the constant region, hinge region, CH1 domain, CH2 domain, and CH3 domain or any combination of whole domains or portions thereof. The polypeptides may also be fused or conjugated to the above antibody portions to form multimers. For example, Fc portions fused to the polypeptides of the present invention can form dimers through disulfide bonding between the Fc portions. Higher multimeric forms can be made by fusing the polypeptides to portions of IgA and IgM. Methods for fusing or conjugating the polypeptides of the present invention to antibody portions are known in the art. See, e.g., U.S. Pat. Nos. 5,336,603; 5,622,929; 5,359,046; 5,349,053; 5,447,851; 5,112,946; EP 307,434; EP 367,166; PCT publications WO 96/04388; WO 91/06570; Ashkenazi et al., Proc. Natl. Acad. Sci. USA 88:10535-10539 (1991); Zheng et al., J. Immunol. 154:5590-5600 (1995); and Vil et al., Proc. Natl. Acad. Sci. USA 89:11337-11341 (1992) (said references incorporated by reference in their entireties).

[0290] As discussed, supra, the polypeptides corresponding to a polypeptide, polypeptide fragment, or a variant of SEQ ID NO:Y may be fused or conjugated to the above antibody portions to increase the in vivo half life of the polypeptides or for use in immunoassays using methods known in the art. Further, the polypeptides corresponding to SEQ ID NO:Y may be fused or conjugated to the above antibody portions to facilitate purification. One reported example describes chimeric proteins consisting of the first two domains of the human CD4-polypeptide and various domains of the constant regions of the heavy or light chains of mammalian immunoglobulins. See EP 394,827; Traunecker et al., Nature 331:84-86 (1988). The polypeptides of the present invention fused or conjugated to an antibody having disulfide-linked dimeric structures (due to the IgG) may also be more efficient in binding and neutralizing other molecules, than the monomeric secreted protein or protein fragment alone. See, for example, Fountoulakis et al., J. Biochem. 270:3958-3964 (1995). In many cases, the Fc part in a fusion protein is beneficial in therapy and diagnosis, and thus can result in, for example, improved pharmacokinetic properties. See, for example, EP A 232,262. Alternatively, deleting the Fc part after the fusion protein has been expressed, detected, and purified, would be desired. For example, the Fc portion may hinder therapy and diagnosis if the fusion protein is used as an antigen for immunizations. In drug discovery, for example, human proteins, such as-hIL-5, have been fused with Fc portions for the purpose of high-throughput screening assays to identify antagonists of hIL-5. (See, Bennett et al., J. Molecular Recognition 8:52-58 (1995); Johanson et al., J. Biol. Chem. 270:9459-9471 (1995)).

[0291] Moreover, the antibodies or fragments thereof of the present invention can be fused to marker sequences, such as a peptide to facilitate purification. In preferred embodiments, the marker amino acid sequence is a hexa-histidine peptide, such as the tag provided in a pQE vector (QIAGEN, Inc., 9259 Eton Avenue, Chatsworth, Calif., 91311), among others, many of which are commercially available. As described in Gentz et al., Proc. Natl. Acad. Sci. USA 86:821-824 (1989), for instance, hexa-histidine provides for convenient purification of the fusion protein. Other peptide tags useful for purification include, but are not limited to, the “HA” tag, which corresponds to an epitope derived from the influenza hemagglutinin protein (Wilson et al., Cell 37:767 (1984)) and the “flag” tag.

[0292] The present invention further encompasses antibodies or fragments thereof conjugated to a diagnostic or therapeutic agent. The antibodies can be used diagnostically to, for example, monitor the development or progression of a tumor as part of a clinical testing procedure to, e.g., determine the efficacy of a given treatment regimen. Detection can be facilitated by coupling the antibody to a detectable substance. Examples of detectable substances include various enzymes, prosthetic groups, fluorescent materials, luminescent materials, bioluminescent materials, radioactive materials, positron emitting metals using various positron emission tomographies, and nonradioactive paramagnetic metal ions. The detectable substance may be coupled or conjugated either directly to the antibody (or fragment thereof) or indirectly, through an intermediate (such as, for example, a linker known in the art) using techniques known in the art. See, for example, U.S. Pat. No. 4,741,900 for metal ions which can be conjugated to antibodies for use as diagnostics according to the present invention.

[0293] Further, an antibody or fragment thereof may be conjugated to a therapeutic moiety such as a cytotoxin, e.g., a cytostatic or cytocidal agent, a therapeutic agent or a radioactive metal ion, e.g., alpha-emitters such as, for example, 213Bi. A cytotoxin or cytotoxic agent includes any agent that is detrimental to cells. Examples include paclitaxol, cytochalasin B, gramicidin D, ethidium bromide, emetine, mitomycin, etoposide, tenoposide, vincristine, vinblastine, colchicin, doxorubicin, daunorubicin, dihydroxy anthracin dione, mitoxantrone, mithramycin, actinomycin D, 1-dehydrotestosterone, glucocorticoids, procaine, tetracaine, lidocaine, propranolol, and puromycin and analogs or homologs thereof. Therapeutic agents include, but are not limited to, antimetabolites (e.g., methotrexate, 6-mercaptopurine, 6-thioguanine, cytarabine, 5-fluorouracil decarbazine), alkylating agents (e.g., mechlorethamine, thioepa chlorambucil, melphalan, carmustine (BSNU) and lomustine (CCNU), cyclothosphamide, busulfan, dibromomannitol, streptozotocin, mitomycin C, and cis-dichlorodiamine platinum (II) (DDP) cisplatin), anthracyclines (e.g., daunorubicin (formerly daunomycin) and doxorubicin), antibiotics (e.g., dactinomycin (formerly actinomycin), bleomycin, mithramycin, and anthramycin (AMC)), and anti-mitotic agents (e.g., vincristine and vinblastine).

[0294] The conjugates of the invention can be used for modifying a given biological response, the therapeutic agent or drug moiety is not to be construed as limited to classical chemical therapeutic agents. For example, the drug moiety may be a protein or polypeptide possessing a desired biological activity. Such proteins may include, for example, a toxin such as abrin, ricin A, pseudomonas exotoxin, or diphtheria toxin; a protein such as tumor necrosis factor, a-interferon, β-interferon, nerve growth factor, platelet derived growth factor, tissue plasminogen activator, an apoptotic agent, e.g., TNF-alpha, TNF-beta, AIM I (See, International Publication No. WO 97/33899), AIM II (See, International Publication No. WO 97/34911), Fas Ligand (Takahashi et al., Int. Immunol., 6:1567-1574 (1994)), VEGI (See, International Publication No. WO 99/23105), a thrombotic agent or an anti-angiogenic agent, e.g., angiostatin or endostatin; or, biological response modifiers such as, for example, lymphokines, interleukin-1 (“IL-1”), interleukin-2 (“IL-2”), interleukin-6 (“IL-6”), granulocyte macrophage colony stimulating factor (“GM-CSF”), granulocyte colony stimulating factor (“G-CSF”), or other growth factors.

[0295] Antibodies may also be attached to solid supports, which are particularly useful for immunoassays or purification of the target antigen. Such solid supports include, but are not limited to, glass, cellulose, polyacrylamide, nylon, polystyrene, polyvinyl chloride or polypropylene.

[0296] Techniques for conjugating such therapeutic moiety to antibodies are well known. See, for example, Arnon et al., “Monoclonal Antibodies For Immunotargeting Of Drugs In Cancer Therapy”, in Monoclonal Antibodies And Cancer Therapy, Reisfeld et al. (eds.), pp. 243-56 (Alan R. Liss, Inc. 1985); Hellstrom et al., “Antibodies For Drug Delivery”, in Controlled Drug Delivery (2nd Ed.), Robinson et al. (eds.), pp. 623-53 (Marcel Dekker, Inc. 1987); Thorpe, “Antibody Carriers Of Cytotoxic Agents In Cancer Therapy: A Review”, in Monoclonal Antibodies '84: Biological And Clinical Applications, Pinchera et al. (eds.), pp. 475-506 (1985); “Analysis, Results, And Future Prospective Of The Therapeutic Use Of Radiolabeled Antibody In Cancer Therapy”, in Monoclonal Antibodies For Cancer Detection And Therapy, Baldwin et al. (eds.), pp. 303-16 (Academic Press 1985), and Thorpe et al., “The Preparation And Cytotoxic Properties Of Antibody-Toxin Conjugates”, Immunol. Rev. 62:119-58 (1982).

[0297] Alternatively, an antibody can be conjugated to a second antibody to form an antibody heteroconjugate as described by Segal in U.S. Pat. No. 4,676,980, which is incorporated herein by reference in its entirety.

[0298] An antibody, with or without a therapeutic moiety conjugated to it, administered alone or in combination with cytotoxic factor(s) and/or cytokine(s) can be used as a therapeutic.

[0299] Immunophenotyping

[0300] The antibodies of the invention may be utilized for immunophenotyping of cell lines and biological samples. Translation products of the genes of the present invention may be useful as cell specific markers, or more specifically as cellular markers that are differentially expressed at various stages of differentiation and/or maturation of particular cell types. Monoclonal antibodies directed against a specific epitope, or combination of epitopes, will allow for the screening of cellular populations expressing the marker. Various techniques can be utilized using monoclonal antibodies to screen for cellular populations expressing the marker(s), and include magnetic separation using antibody-coated magnetic beads, “panning” with antibody attached to a solid matrix (i.e., plate), and flow cytometry (See, e.g., U.S. Pat. No. 5,985,660; and Morrison et al., Cell, 96:737-49 (1999)).

[0301] These techniques allow for the screening of particular populations of cells, such as might be found with hematological malignancies (i.e. minimal residual disease (MRD) in acute leukemic patients) and “non-self” cells in transplantations to prevent Graft-versus-Host Disease (GVHD). Alternatively, these techniques allow for the screening of hematopoietic stem and progenitor cells capable of undergoing proliferation and/or differentiation, as might be found in human umbilical cord blood.

[0302] Assays for Antibody Binding

[0303] The antibodies of the invention may be assayed for immunospecific binding by any method known in the art. The immunoassays which can be used include but are not limited to competitive and non-competitive assay systems using techniques such as western blots, radioimmunoassays, ELISA (enzyme linked immunosorbent assay), “sandwich” immunoassays, immunoprecipitation assays, precipitin reactions, gel diffusion precipitin reactions, immunodiffusion assays, agglutination assays, complement-fixation assays, immunoradiometric assays, fluorescent immunoassays, and protein A immunoassays, to name but a few. Such assays are routine and well known in the art (see, e.g., Ausubel et al, eds, 1994, Current Protocols in Molecular Biology, Vol. 1, John Wiley & Sons, Inc., New York, which is incorporated by reference herein in its entirety). Exemplary immunoassays are described briefly below (but are not intended by way of limitation).

[0304] Immunoprecipitation protocols generally comprise lysing a population of cells in a lysis buffer such as RIPA buffer (1% NP-40 or Triton X-100, 1% sodium deoxycholate, 0.1% SDS, 0.15 M NaCl, 0.01 M sodium phosphate at pH 7.2, 1% Trasylol) supplemented with protein phosphatase and/or protease inhibitors (e.g., EDTA, PMSF, aprotinin, sodium vanadate), adding the antibody of interest to the cell lysate, incubating for a period of time (e.g., 1-4 hours) at 4° C., adding protein A and/or protein G sepharose beads to the cell lysate, incubating for about an hour or more at 4° C., washing the beads in lysis buffer and resuspending the beads in SDS/sample buffer. The ability of the antibody of interest to immunoprecipitate a particular antigen can be assessed by, e.g., western blot analysis. One of skill in the art would be knowledgeable as to the parameters that can be modified to increase the binding of the antibody to an antigen and decrease the background (e.g., pre-clearing the cell lysate with sepharose beads). For further discussion regarding immunoprecipitation protocols see, e.g., Ausubel et al., eds., (1994), Current Protocols in Molecular Biology, Vol. 1, John Wiley & Sons, Inc., New York, section 10.16.1.

[0305] Western blot analysis generally comprises preparing protein samples, electrophoresis of the protein samples in a polyacrylamide gel (e.g., 8%-20% SDS-PAGE depending on the molecular weight of the antigen), transferring the protein sample from the polyacrylamide gel to a membrane such as nitrocellulose, PVDF or nylon, blocking the membrane in blocking solution (e.g., PBS with 3% BSA or non-fat milk), washing the membrane in washing buffer (e.g., PBS-Tween 20), blocking the membrane with primary antibody (the antibody of interest) diluted in blocking buffer, washing the membrane in washing buffer, blocking the membrane with a secondary antibody (which recognizes the primary antibody, e.g., an anti-human antibody) conjugated to an enzymatic substrate (e.g., horseradish peroxidase or alkaline phosphatase) or radioactive molecule (e.g., 32P or 125I) diluted in blocking buffer, washing the membrane in wash buffer, and detecting the presence of the antigen. One of skill in the art would be knowledgeable as to the parameters that can be modified to increase the signal detected and to reduce the background noise. For further discussion regarding western blot protocols see, e.g., Ausubel et al., eds., (1994), Current Protocols in Molecular Biology, Vol. 1, John Wiley & Sons, Inc., New York, section 10.8.1.

[0306] ELISAs comprise preparing antigen, coating the well of a 96 well microtiter plate with the antigen, adding the antibody of interest conjugated to a detectable compound such as an enzymatic substrate (e.g., horseradish peroxidase or alkaline phosphatase) to the well and incubating for a period of time, and detecting the presence of the antigen. In ELISAs the antibody of interest does not have to be conjugated to a detectable compound; instead, a second antibody (which recognizes the antibody of interest) conjugated to a detectable compound may be added to the well. Further, instead of coating the well with the antigen, the antibody may be coated to the well. In this case, a second antibody conjugated to a detectable compound may be added following the addition of the antigen of interest to the coated well. One of skill in the art would be knowledgeable as to the parameters that can be modified to increase the signal detected as well as other variations of ELISAs known in the art. For further discussion regarding ELISAs see, e.g., Ausubel et al., eds., (1994), Current Protocols in Molecular Biology, Vol. 1, John Wiley & Sons, Inc., New York, section 11.2.1.

[0307] The binding affinity of an antibody to an antigen and the off-rate of an antibody-antigen interaction can be determined by competitive binding assays. One example of a competitive binding assay is a radioimmunoassay comprising the incubation of labeled antigen (e.g., 3H or 125I) with the antibody of interest in the presence of increasing amounts of unlabeled antigen, and the detection of the antibody bound to the labeled antigen. The affinity of the antibody of interest for a particular antigen and the binding off-rates can be determined from the data by scatchard plot analysis. Competition with a second antibody can also be determined using radioimmunoassays. In this case, the antigen is incubated with antibody of interest conjugated to a labeled compound (e.g., 3H or 125I) in the presence of increasing amounts of an unlabeled second antibody.

[0308] Antibodies of the invention may be characterized using immunocytochemisty methods on cells (e.g., mammalian cells, such as CHO cells) transfected with a vector enabling the expression of a cardiovascular system antigen or with vector alone using techniques commonly known in the art. Antibodies that bind cardiovascular system antigen transfected cells, but not vector-only transfected cells, are cardiovascular system antigen specific.

[0309] Therapeutic Uses

[0310] The present invention is further directed to antibody-based therapies which involve administering antibodies of the invention to an animal, preferably a mammal, and most preferably a human, patient for treating one or more of the disclosed diseases, disorders, or conditions. Therapeutic compounds of the invention include, but are not limited to, antibodies of the invention (including fragments, analogs and derivatives thereof as described herein) and nucleic acids encoding antibodies of the invention (including fragments, analogs and derivatives thereof and anti-idiotypic antibodies as described herein). The antibodies of the invention can be used to treat, inhibit or prevent diseases, disorders or conditions associated with aberrant expression and/or activity of a polypeptide of the invention, including, but not limited to, any one or more of the diseases, disorders, or conditions described herein. The treatment and/or prevention of diseases, disorders, or conditions associated with aberrant expression and/or activity of a polypeptide of the invention includes, but is not limited to, alleviating symptoms associated with those diseases, disorders or conditions. Antibodies of the invention may be provided in pharmaceutically acceptable compositions as known in the art or as described herein.

[0311] In a specific and preferred embodiment, the present invention is directed to antibody-based therapies which involve administering antibodies of the invention to an animal, preferably a mammal, and most preferably a human, patient for treating one or more of the diseases, disorders, or conditions of the cardiovascular system, including, but not limited to, cardiovascular abnormalities (e.g., congenital heart defects, cerebral arteriovenous malformations, and septal defects), heart disease (e.g., heart failure, cardiomyopathy, pericarditis, and endocarditis), arrhythmias, heart valve disease (e.g., stenosis, regurgitation, and prolapse), vascular diseases (e.g., arteriosclerosis, coronary artery disease, angina, varicose veins, hypertension, and shock), electrolyte imbalance disorders (e.g., hypo- and hypernatremia, and hypo- and hyperkalemia), and/or those disorders or diseases as described under “Cardiovascular Disorders”. Therapeutic compounds of the invention include, but are not limited to, antibodies of the invention (e.g., antibodies directed to the full length protein expressed on the cell surface of a mammalian cell; antibodies directed to an epitope of a cardiovascular system associated polypeptide of the invention (such as, a linear epitope (shown in Table 1A, column 6) or a conformational epitope), including fragments, analogs and derivatives thereof as described herein) and nucleic acids encoding antibodies of the invention (including fragments, analogs and derivatives thereof and anti-idiotypic antibodies as described herein). The antibodies of the invention can be used to treat, inhibit or prevent diseases, disorders or conditions associated with aberrant expression and/or activity of a polypeptide of the invention, including, but not limited to, any one or more of the diseases, disorders, or conditions of the cardiovascular system described herein. The treatment and/or prevention of diseases, disorders, or conditions of the cardiovascular system associated with aberrant expression and/or activity of a polypeptide of the invention includes, but is not limited to, alleviating symptoms associated with those diseases, disorders or conditions. Antibodies of the invention may be provided in pharmaceutically acceptable compositions as known in the art or as described herein.

[0312] A summary of the ways in which the antibodies of the present invention may be used therapeutically includes binding polynucleotides or polypeptides of the present invention locally or systemically in the body or by direct cytotoxicity of the antibody, e.g. as mediated by complement (CDC) or by effector cells (ADCC). Some of these approaches are described in more detail below. Armed with the teachings provided herein, one of ordinary skill in the art will know how to use the antibodies of the present invention for diagnostic, monitoring or therapeutic purposes without undue experimentation.

[0313] The antibodies of this invention may be advantageously utilized in combination with other monoclonal or chimeric antibodies, or with lymphokines or hematopoietic growth factors (such as, e.g., IL-2, IL-3 and IL-7), for example, which serve to increase the number or activity of effector cells which interact with the antibodies.

[0314] The antibodies of the invention may be administered alone or in combination with other types of treatments (e.g., radiation therapy, chemotherapy, hormonal therapy, immunotherapy and anti-tumor agents). Generally, administration of products of a species origin or species reactivity (in the case of antibodies) that is the same species as that of the patient is preferred. Thus, in a preferred embodiment, human antibodies, fragments derivatives, analogs, or nucleic acids, are administered to a human patient for therapy or prophylaxis.

[0315] It is preferred to use high affinity and/or potent in vivo inhibiting and/or neutralizing antibodies against polypeptides or polynucleotides of the present invention, fragments or regions thereof, for both immunoassays directed to and therapy of disorders related to polynucleotides or polypeptides, including fragments thereof, of the present invention. Such antibodies, fragments, or regions, will preferably have an affinity for polynucleotides or polypeptides of the invention, including fragments thereof. Preferred binding affinities include those with a dissociation constant or Kd less than 5×10⁻² M, 10⁻² M, 5×10⁻³ M, 10⁻³ M, 5×10⁻⁴ M, 10⁻⁴ M, 5×10⁻⁵ M, 10⁻⁵ M, 5×10⁻⁶ M, 10⁻⁶ M, 5×10⁻⁷ M, 10⁻⁷ M, 5×10⁻⁸ M, 10⁻⁸ M, 5×10⁻⁹ M, 10⁻⁹ M, 5×10⁻¹⁰ M, 10⁻¹⁰ M, 5×10⁻¹¹ M, 10⁻¹¹ M, 5×10⁻¹² M, 10⁻¹² M, 5×10⁻¹³ M, 10⁻¹³ M, 5×10⁻¹⁴ M, 10⁻¹⁴ M, 5×10⁻¹⁵ M, and b 10⁻¹⁵ M.

[0316] Gene Therapy

[0317] In a specific embodiment, nucleic acids comprising sequences encoding antibodies or functional derivatives thereof, are administered to treat, inhibit or prevent a disease or disorder associated with aberrant expression and/or activity of a polypeptide of the invention, by way of gene therapy. Gene therapy refers to therapy performed by the administration to a subject of an expressed or expressible nucleic acid. In this embodiment of the invention, the nucleic acids produce their encoded protein that mediates a therapeutic effect.

[0318] Any of the methods for gene therapy available in the art can be used according to the present invention. Exemplary methods are described below.

[0319] For general reviews of the methods of gene therapy, see Goldspiel et al., Clinical Pharmacy 12:488-505 (1993); Wu and Wu, Biotherapy 3:87-95 (1991); Tolstoshev, Ann. Rev. Pharmacol. Toxicol. 32:573-596 (1993); Mulligan, Science 260:926-932 (1993); and Morgan and Anderson, Ann. Rev. Biochem. 62:191-217 (1993); May, TIBTECH 11(5):155-215 (1993). Methods commonly known in the art of recombinant DNA technology which can be used are described in Ausubel et al. (eds.), Current Protocols in Molecular Biology, John Wiley & Sons, NY (1993); and Kriegler, Gene Transfer and Expression, A Laboratory Manual, Stockton Press, NY (1990).

[0320] In a preferred embodiment, the compound comprises nucleic acid sequences encoding an antibody, said nucleic acid sequences being part of expression vectors that express the antibody or fragments or chimeric proteins or heavy or light chains thereof in a suitable host. In particular, such nucleic acid sequences have promoters operably linked to the antibody coding region, said promoter being inducible or constitutive, and, optionally, tissue-specific. In another particular embodiment, nucleic acid molecules are used in which the antibody coding sequences and any other desired sequences are flanked by regions that promote homologous recombination at a desired site in the genome, thus providing for intrachromosomal expression of the antibody encoding nucleic acids (Koller and Smithies, Proc. Natl. Acad. Sci. USA 86:8932-8935 (1989); Zijlstra et al., Nature 342:435-438 (1989). In specific embodiments, the expressed antibody molecule is a single chain antibody; alternatively, the nucleic acid sequences include sequences encoding both the heavy and light chains, or fragments thereof, of the antibody.

[0321] Delivery of the nucleic acids into a patient may be either direct, in which case the patient is directly exposed to the nucleic acid or nucleic acid-carrying vectors, or indirect, in which case, cells are first transformed with the nucleic acids in vitro, then transplanted into the patient. These two approaches are known, respectively, as in vivo or ex vivo gene therapy.

[0322] In a specific embodiment, the nucleic acid sequences are directly administered in vivo, where it is expressed to produce the encoded product. This can be accomplished by any of numerous methods known in the art, e.g., by constructing them as part of an appropriate nucleic acid expression vector and administering it so that they become intracellular, e.g., by infection using defective or attenuated retrovirals or other viral vectors (see U.S. Pat. No. 4,980,286), or by direct injection of naked DNA, or by use of microparticle bombardment (e.g., a gene gun; Biolistic, Dupont), or coating with lipids or cell-surface receptors or transfecting agents, encapsulation in liposomes, microparticles, or microcapsules, or by administering them in linkage to a peptide which is known to enter the nucleus, by administering it in linkage to a ligand subject to receptor-mediated endocytosis (see, e.g., Wu and Wu, J. Biol. Chem. 262:4429-4432 (1987)) (which can be used to target cell types specifically expressing the receptors), etc. In another embodiment, nucleic acid-ligand complexes can be formed in which the ligand comprises a fusogenic viral peptide to disrupt endosomes, allowing the nucleic acid to avoid lysosomal degradation. In yet another embodiment, the nucleic acid can be targeted in vivo for cell specific uptake and expression, by targeting a specific receptor (see, e.g., PCT Publications WO 92/06180; WO 92/22635; WO92/20316; WO93/14188, WO 93/20221). Alternatively, the nucleic acid can be introduced intracellularly and incorporated within host cell DNA for expression, by homologous recombination (Koller and Smithies, Proc. Natl. Acad. Sci. USA 86:8932-8935 (1989); Zijlstra et al., Nature 342:435-438 (1989)).

[0323] In a specific embodiment, viral vectors that contain nucleic acid sequences encoding an antibody of the invention are used. For example, a retroviral vector can be used (see Miller et al., Meth. Enzymol. 217:581-599 (1993)). These retroviral vectors contain the components necessary for the correct packaging of the viral genome and integration into the host cell DNA. The nucleic acid sequences encoding the antibody to be used in gene therapy are cloned into one or more vectors, which facilitates delivery of the gene into a patient. More detail about retroviral vectors can be found in Boesen et al., Biotherapy 6:291-302 (1994), which describes the use of a retroviral vector to deliver the mdr1 gene to hematopoietic stem cells in order to make the stem cells more resistant to chemotherapy. Other references illustrating the use of retroviral vectors in gene therapy are: Clowes et al., J. Clin. Invest. 93:644-651 (1994); Kiem et al., Blood 83:1467-1473 (1994); Salmons and Gunzberg, Human Gene Therapy 4:129-141 (1993); and Grossman and Wilson, Curr. Opin. in Genetics and Devel. 3:110-114 (1993).

[0324] Adenoviruses are other viral vectors that can be used in gene therapy. Adenoviruses are especially attractive vehicles for delivering genes to respiratory epithelia. Adenoviruses naturally infect respiratory epithelia where they cause a mild disease. Other targets for adenovirus-based delivery systems are liver, the central nervous system, endothelial cells, and muscle. Adenoviruses have the advantage of being capable of infecting non-dividing cells. Kozarsky and Wilson, Current Opinion in Genetics and Development 3:499-503 (1993) present a review of adenovirus-based gene therapy. Bout et al., Human Gene Therapy 5:3-10 (1994) demonstrated the use of adenovirus vectors to transfer genes to the respiratory epithelia of rhesus monkeys. Other instances of the use of adenoviruses in gene therapy can be found in Rosenfeld et al., Science 252:431-434 (1991); Rosenfeld et al., Cell 68:143-155 (1992); Mastrangeli et al., J. Clin. Invest. 91:225-234 (1993); PCT Publication WO94/12649; and Wang, et al., Gene Therapy 2:775-783 (1995). In a preferred embodiment, adenovirus vectors are used.

[0325] Adeno-associated virus (AAV) has also been proposed for use in gene therapy (Walsh et al., Proc. Soc. Exp. Biol. Med. 204:289-300 (1993); U.S. Pat. No. 5,436,146).

[0326] Another approach to gene therapy involves transferring a gene to cells in tissue culture by such methods as electroporation, lipofection, calcium phosphate mediated transfection, or viral infection. Usually, the method of transfer includes the transfer of a selectable marker to the cells. The cells are then placed under selection to isolate those cells that have taken up and are expressing the transferred gene. Those cells are then delivered to a patient.

[0327] In this embodiment, the nucleic acid is introduced into a cell prior to administration in vivo of the resulting recombinant cell. Such introduction can be carried out by any method known in the art, including but not limited to transfection, electroporation, microinjection, infection with a viral or bacteriophage vector containing the nucleic acid sequences, cell fusion, chromosome-mediated gene transfer, microcell-mediated gene transfer, spheroplast fusion, etc. Numerous techniques are known in the art for the introduction of foreign genes into cells (see, e.g., Loeffler and Behr, Meth. Enzymol. 217:599-618 (1993); Cohen et al., Meth. Enzymol. 217:618-644 (1993); Cline, Pharmac. Ther. 29:69-92m (1985) and may be used in accordance with the present invention, provided that the necessary developmental and physiological functions of the recipient cells are not disrupted. The technique should provide for the stable transfer of the nucleic acid to the cell, so that the nucleic acid is expressible by the cell and preferably heritable and expressible by its cell progeny.

[0328] The resulting recombinant cells can be delivered to a patient by various methods known in the art. Recombinant blood cells (e.g., hematopoietic stem or progenitor cells) are preferably administered intravenously. The amount of cells envisioned for use depends on the desired effect, patient state, etc., and can be determined by one skilled in the art.

[0329] Cells into which a nucleic acid can be introduced for purposes of gene therapy encompass any desired, available cell type, and include but are not limited to, epithelial cells, endothelial cells, keratinocytes, fibroblasts, muscle cells, hepatocytes; blood cells such as T lymphocytes, B lymphocytes, monocytes, macrophages, neutrophils, eosinophils, megakaryocytes, granulocytes; various stem or progenitor cells, in particular hematopoietic stem or progenitor cells, e.g., as obtained from bone marrow, umbilical cord blood, peripheral blood, fetal liver, etc.

[0330] In a preferred embodiment, the cell used for gene therapy is autologous to the patient.

[0331] In an embodiment in which recombinant cells are used in gene therapy, nucleic acid sequences encoding an antibody are introduced into the cells such that they are expressible by the cells or their progeny, and the recombinant cells are then administered in vivo for therapeutic effect. In a specific embodiment, stem or progenitor cells are used. Any stem and/or progenitor cells which can be isolated and maintained in vitro can potentially be used in accordance with this embodiment of the present invention (see e.g. PCT Publication WO 94/08598; Stemple and Anderson, Cell 71:973-985 (1992); Rheinwald, Meth. Cell Bio. 21A:229 (1980); and Pittelkow and Scott, Mayo Clinic Proc. 61:771 (1986)).

[0332] In a specific embodiment, the nucleic acid to be introduced for purposes of gene therapy comprises an inducible promoter operably linked to the coding region, such that expression of the nucleic acid is controllable by the presence or absence of an appropriate inducer of transcription.

[0333] Demonstration of Therapeutic or Prophylactic Activity

[0334] The compounds or pharmaceutical compositions of the invention are preferably tested in vitro, and then in vivo for the desired therapeutic or prophylactic activity, prior to use in humans. For example, in vitro assays to demonstrate the therapeutic or prophylactic utility of a compound or pharmaceutical composition include, the effect of a compound on a cell line or a patient tissue sample. The effect of the compound or composition on the cell line and/or tissue sample can be determined utilizing techniques known to those of skill in the art including, but not limited to, rosette formation assays and cell lysis assays. In accordance with the invention, in vitro assays which can be used to determine whether administration of a specific compound is indicated, include in vitro cell culture assays in which a patient tissue sample is grown in culture, and exposed to or otherwise administered a compound, and the effect of such compound upon the tissue sample is observed.

[0335] Therapeutic/Prophylactic Administration and Composition

[0336] The invention provides methods of treatment, inhibition and prophylaxis by administration to a subject of an effective amount of a compound or pharmaceutical composition of the invention, preferably a polypeptide or antibody of the invention. In a preferred embodiment, the compound is substantially purified (e.g., substantially free from substances that limit its effect or produce undesired side-effects). The subject is preferably an animal, including but not limited to animals such as cows, pigs, horses, chickens, cats, dogs, etc., and is preferably a mammal, and most preferably human.

[0337] Formulations and methods of administration that can be employed when the compound comprises a nucleic acid or an immunoglobulin are described above; additional appropriate formulations and routes of administration can be selected from among those described herein below.

[0338] Various delivery systems are known and can be used to administer a compound of the invention, e.g., encapsulation in liposomes, microparticles, microcapsules, recombinant cells capable of expressing the compound, receptor-mediated endocytosis (see, e.g., Wu and Wu, J. Biol. Chem. 262:4429-4432 (1987)), construction of a nucleic acid as part of a retroviral or other vector, etc. Methods of introduction include but are not limited to intradermal, intramuscular, intraperitoneal, intravenous, subcutaneous, intranasal, epidural, and oral routes. The compounds or compositions may be administered by any convenient route, for example by infusion or bolus injection, by absorption through epithelial or mucocutaneous linings (e.g., oral mucosa, rectal and intestinal mucosa, etc.) and may be administered together with other biologically active agents. Administration can be systemic or local. In addition, it may be desirable to introduce the pharmaceutical compounds or compositions of the invention into the central nervous system by any suitable route, including intraventricular and intrathecal injection; intraventricular injection may be facilitated by an intraventricular catheter, for example, attached to a reservoir, such as an Ommaya reservoir. Pulmonary administration can also be employed, e.g., by use of an inhaler or nebulizer, and formulation with an aerosolizing agent.

[0339] In a specific embodiment, it may be desirable to administer the pharmaceutical compounds or compositions of the invention locally to the area in need of treatment; this may be achieved by, for example, and not by way of limitation, local infusion during surgery, topical application, e.g., in conjunction with a wound dressing after surgery, by injection, by means of a catheter, by means of a suppository, or by means of an implant, said implant being of a porous, non-porous, or gelatinous material, including membranes, such as sialastic membranes, or fibers. Preferably, when administering a protein, including an antibody, of the invention, care must be taken to use materials to which the protein does not absorb.

[0340] In another embodiment, the compound or composition can be delivered in a vesicle, in particular a liposome (see Langer, Science 249:1527-1533 (1990); Treat et al., in Liposomes in the Therapy of Infectious Disease and Cancer, Lopez-Berestein and Fidler (eds.), Liss, New York, pp. 353-365 (1989); Lopez-Berestein, ibid., pp.317-327; see generally ibid.)

[0341] In yet another embodiment, the compound or composition can be delivered in a controlled release system. In one embodiment, a pump may be used (see Langer, supra; Sefton, CRC Crit. Ref. Biomed. Eng. 14:201 (1987); Buchwald et al., Surgery 88:507 (1980); Saudek et al., N. Engl. J. Med. 321:574 (1989)). In another embodiment, polymeric materials can be used (see Medical Applications of Controlled Release, Langer and Wise (eds.), CRC Pres., Boca Raton, Fla. (1974); Controlled Drug Bioavailability, Drug Product Design and Performance, Smolen and Ball (eds.), Wiley, New York (1984); Ranger and Peppas, J., Macromol. Sci. Rev. Macromol. Chem. 23:61 (1983); see also Levy et al., Science 228:190 (1985); During et al., Ann. Neurol. 25:351 (1989); Howard et al., J. Neurosurg. 71:105 (1989)). In yet another embodiment, a controlled release system can be placed in proximity of the therapeutic target, e.g., the brain, thus requiring only a fraction of the systemic dose (see, e.g., Goodson, in Medical Applications of Controlled Release, supra, vol. 2, pp. 115-138 (1984)).

[0342] Other controlled release systems are discussed in the review by Langer (Science 249:1527-1533 (1990)).

[0343] In a specific embodiment where the compound of the invention is a nucleic acid encoding a protein, the nucleic acid can be administered in vivo to promote expression of its encoded protein, by constructing it as part of an appropriate nucleic acid expression vector and administering it so that it becomes intracellular, e.g., by use of a retroviral vector (see U.S. Pat. No. 4,980,286), or by direct injection, or by use of microparticle bombardment (e.g., a gene gun; Biolistic, Dupont), or coating with lipids or cell-surface receptors or transfecting agents, or by administering it in linkage to a homeobox-like peptide which is known to enter the nucleus (see e.g., Joliot et al., Proc. Natl. Acad. Sci. USA 88:1864-1868 (1991)), etc. Alternatively, a nucleic acid can be introduced intracellularly and incorporated within host cell DNA for expression, by homologous recombination.

[0344] The present invention also provides pharmaceutical compositions. Such compositions comprise a therapeutically effective amount of a compound, and a pharmaceutically acceptable carrier. In a specific embodiment, the term “pharmaceutically acceptable” means approved by a regulatory agency of the Federal or a state government or listed in the U.S. Pharmacopeia or other generally recognized pharmacopeia for use in animals, and more particularly in humans. The term “carrier” refers to a diluent, adjuvant, excipient, or vehicle with which the therapeutic is administered. Such pharmaceutical carriers can be sterile liquids, such as water and oils, including those of petroleum, animal, vegetable or synthetic origin, such as peanut oil, soybean oil, mineral oil, sesame oil and the like. Water is a preferred carrier when the pharmaceutical composition is administered intravenously. Saline solutions and aqueous dextrose and glycerol solutions can also be employed as liquid carriers, particularly for injectable solutions. Suitable pharmaceutical excipients include starch, glucose, lactose, sucrose, gelatin, malt, rice, flour, chalk, silica gel, sodium stearate, glycerol monostearate, talc, sodium chloride, dried skim milk, glycerol, propylene, glycol, water, ethanol and the like. The composition, if desired, can also contain minor amounts of wetting or emulsifying agents, or pH buffering agents. These compositions can take the form of solutions, suspensions, emulsion, tablets, pills, capsules, powders, sustained-release formulations and the like. The composition can be formulated as a suppository, with traditional binders and carriers such as triglycerides. Oral formulation can include standard carriers such as pharmaceutical grades of mannitol, lactose, starch, magnesium stearate, sodium saccharine, cellulose, magnesium carbonate, etc. Examples of suitable pharmaceutical carriers are described in “Remington's Pharmaceutical Sciences” by E. W. Martin. Such compositions will contain a therapeutically effective amount of the compound, preferably in purified form, together with a suitable amount of carrier so as to provide the form for proper administration to the patient. The formulation should suit the mode of administration.

[0345] In a preferred embodiment, the composition is formulated in accordance with routine procedures as a pharmaceutical composition adapted for intravenous administration to human beings. Typically, compositions for intravenous administration are solutions in sterile isotonic aqueous buffer. Where necessary, the composition may also include a solubilizing agent and a local anesthetic such as lignocaine to ease pain at the site of the injection. Generally, the ingredients are supplied either separately or mixed together in unit dosage form, for example, as a dry lyophilized powder or water free concentrate in a hermetically sealed container such as an ampoule or sachette indicating the quantity of active agent. Where the composition is to be administered by infusion, it can be dispensed with an infusion bottle containing sterile pharmaceutical grade water or saline. Where the composition is administered by injection, an ampoule of sterile water for injection or saline can be provided so that the ingredients may be mixed prior to administration.

[0346] The compounds of the invention can be formulated as neutral or salt forms. Pharmaceutically acceptable salts include those formed with anions such as those derived from hydrochloric, phosphoric, acetic, oxalic, tartaric acids, etc., and those formed with cations such as those derived from sodium, potassium, ammonium, calcium, ferric hydroxides, isopropylamine, triethylamine, 2-ethylamino ethanol, histidine, procaine, etc.

[0347] The amount of the compound of the invention which will be effective in the treatment, inhibition and prevention of a disease or disorder associated with aberrant expression and/or activity of a polypeptide of the invention can be determined by standard clinical techniques. In addition, in vitro assays may optionally be employed to help identify optimal dosage ranges. The precise dose to be employed in the formulation will also depend on the route of administration, and the seriousness of the disease or disorder, and should be decided according to the judgment of the practitioner and each patient's circumstances. Effective doses may be extrapolated from dose-response curves derived from in vitro or animal model test systems.

[0348] For antibodies, the dosage administered to a patient is typically 0.1 mg/kg to 100 mg/kg of the patient's body weight. Preferably, the dosage administered to a patient is between 0.1 mg/kg and 20 mg/kg of the patient's body weight, more preferably 1 mg/kg to 10 mg/kg of the patient's body weight. Generally, human antibodies have a longer half-life within the human body than antibodies from other species due to the immune response to the foreign polypeptides. Thus, lower dosages of human antibodies and less frequent administration is often possible. Further, the dosage and frequency of administration of antibodies of the invention may be reduced by enhancing uptake and tissue penetration (e.g., into the brain) of the antibodies by modifications such as, for example, lipidation.

[0349] The invention also provides a pharmaceutical pack or kit comprising one or more containers filled with one or more of the ingredients of the pharmaceutical compositions of the invention. Optionally associated with such container(s) can be a notice in the form prescribed by a governmental agency regulating the manufacture, use or sale of pharmaceuticals or biological products, which notice reflects approval by the agency of manufacture, use or sale for human administration.

[0350] Diagnosis and Imaging

[0351] Labeled antibodies, and derivatives and analogs thereof, which specifically bind to a polypeptide of interest can be used for diagnostic purposes to detect, diagnose, or monitor diseases, disorders, and/or conditions associated with the aberrant expression-and/or activity of a polypeptide of the invention. The invention provides for the detection of aberrant expression of a polypeptide of interest, comprising (a) assaying the expression of the polypeptide of interest in cells or body fluid of an individual using one or more antibodies specific to the polypeptide interest and (b) comparing the level of gene expression with a standard gene expression level, whereby an increase or decrease in the assayed polypeptide gene expression level compared to the standard expression level is indicative of aberrant expression.

[0352] The invention provides a diagnostic assay for diagnosing a cardiovascular system disorder, comprising (a) assaying the expression of the polypeptide of interest in cells or body fluid of an individual using one or more antibodies specific to the polypeptide interest and (b) comparing the level of gene expression with a standard gene expression level, whereby an increase or decrease in the assayed polypeptide gene expression level compared to the standard expression level is indicative of a particular disorder. With respect to cancer, the presence of a relatively high amount of transcript in biopsied tissue from an individual may indicate a predisposition for the development of the disease, or may provide a means for detecting the disease prior to the appearance of actual clinical symptoms. A more definitive diagnosis of this type may allow health professionals to employ preventative measures or aggressive treatment earlier thereby preventing the development or further progression of the cancer.

[0353] Antibodies of the invention can be used to assay protein levels in a biological sample using classical immunohistological methods known to those of skill in the art (e.g., see Jalkanen et al., J. Cell. Biol. 101:976-985 (1985); Jalkanen et al., J. Cell. Biol. 105:3087-3096 (1987)). Other antibody-based methods useful for detecting protein gene expression include immunoassays, such as the enzyme linked immunosorbent assay (ELISA) and the radioimmunoassay (RIA). Suitable antibody assay labels are known in the art and include enzyme labels, such as, glucose oxidase; radioisotopes, such as iodine (125I, 121I), carbon (14C), sulfur (35S), tritium (3H), indium (112In), and technetium (99Tc); luminescent labels, such as luminol; and fluorescent labels, such as fluorescein and rhodamine, and biotin.

[0354] One facet of the invention is the detection and diagnosis of a disease or disorder associated with aberrant expression of a polypeptide of interest in an animal, preferably a mammal and most preferably a human. A preferred embodiment of the invention is the detection and diagnosis of a disease or disorder of the cardiovascular system associated with aberrant expression of a cardiovascular system antigen in an animal, preferably a mammal and most preferably a human. In one embodiment, diagnosis comprises: a) administering (for example, parenterally, subcutaneously, or intraperitoneally) to a subject an effective amount of a labeled molecule which specifically binds to the polypeptide of interest; b) waiting for a time interval following the administering for permitting the labeled molecule to preferentially concentrate at sites in the subject where the polypeptide is expressed (and for unbound labeled molecule to be cleared to background level); c) determining background level; and d) detecting the labeled molecule in the subject, such that detection of labeled molecule above the background level indicates that the subject has a particular disease or disorder associated with aberrant expression of the polypeptide of interest. Background level can be determined by various methods including, comparing the amount of labeled molecule detected to a standard value previously determined for a particular system.

[0355] It will be understood in the art that the size of the subject and the imaging system used will determine the quantity of imaging moiety needed to produce diagnostic images. In the case of a radioisotope moiety, for a human subject, the quantity of radioactivity injected will normally range from about 5 to 20 millicuries of 99mTc. The labeled antibody or antibody fragment will then preferentially accumulate at the location of cells which contain the specific protein. In vivo tumor imaging is described in S. W. Burchiel et al., “Immunopharmacokinetics of Radiolabeled Antibodies and Their Fragments.” (Chapter 13 in Tumor Imaging: The Radiochemical Detection of Cancer, S. W. Burchiel and B. A. Rhodes, eds., Masson Publishing Inc. (1982)).

[0356] Depending on several variables, including the type of label used and the mode of administration, the time interval following the administration for permitting the labeled molecule to preferentially concentrate at sites in the subject and for unbound labeled molecule to be cleared to background level is 6 to 48 hours or 6 to 24 hours or 6 to 12 hours. In another embodiment the time interval following administration is 5 to 20 days or 5 to 10 days.

[0357] In an embodiment, monitoring of the disease or disorder is carried out by repeating the method for diagnosing the disease or disorder, for example, one month after initial diagnosis, six months after initial diagnosis, one year after initial diagnosis, etc.

[0358] Presence of the labeled molecule can be detected in the patient using methods known in the art for in vivo scanning. These methods depend upon the type of label used. Skilled artisans will be able to determine the appropriate method for detecting a particular label. Methods and devices that may be used in the diagnostic methods of the invention include, but are not limited to, computed tomography (CT), whole body scan such as position emission tomography (PET), magnetic resonance imaging (MRI), and sonography.

[0359] In a specific embodiment, the molecule is labeled with a radioisotope and is detected in the patient using a radiation responsive surgical instrument (Thurston et al., U.S. Pat. No. 5,441,050). In another embodiment, the molecule is labeled with a fluorescent compound and is detected in the patient using a fluorescence responsive scanning instrument. In another embodiment, the molecule is labeled with a positron emitting metal and is detected in the patent using positron emission-tomography. In yet another embodiment, the molecule is labeled with a paramagnetic label and is detected in a patient using magnetic resonance imaging (MRI).

[0360] Kits

[0361] The present invention provides kits that can be used in the above methods. In one embodiment, a kit comprises an antibody of the invention, preferably a purified antibody, in one or more containers. In a specific embodiment, the kits of the present invention contain a substantially isolated polypeptide comprising an epitope, which is specifically immunoreactive with an antibody included in the kit. Preferably, the kits of the present invention further comprise a control antibody, which does not react with the polypeptide of interest. In another specific embodiment, the kits of the present invention contain a means for detecting the binding of an antibody to a polypeptide of interest (e.g., the antibody may be conjugated to a detectable substrate such as a fluorescent compound, an enzymatic substrate, a radioactive compound or a luminescent compound, or a second antibody which recognizes the first antibody may be conjugated to a detectable substrate).

[0362] In another specific embodiment of the present invention, the kit is a diagnostic kit for use in screening serum containing antibodies specific against proliferative and/or cancerous polynucleotides and polypeptides. Such a kit may include a control antibody that does not react with the polypeptide of interest. Such a kit may include a substantially isolated polypeptide antigen comprising an epitope which is specifically immunoreactive with at least one anti-polypeptide antigen antibody. Further, such a kit includes means for detecting the binding of said antibody to the antigen (e.g., the antibody may be conjugated to a fluorescent compound such as fluorescein or rhodamine which can be detected by flow cytometry). In specific embodiments, the kit may include a recombinantly produced or chemically synthesized polypeptide antigen. The polypeptide antigen of the kit may also be attached to a solid support.

[0363] In a more specific embodiment the detecting means of the above-described kit includes a solid support to which said polypeptide antigen is attached. Such a kit may also include a non-attached reporter-labeled anti-human antibody. In this embodiment, binding of the antibody to the polypeptide antigen can be detected by binding of the said reporter-labeled antibody.

[0364] In an additional embodiment, the invention includes a diagnostic kit for use in screening serum-containing antigens of the polypeptide of the invention. The diagnostic kit includes a substantially isolated antibody specifically immunoreactive with polypeptide or polynucleotide antigens, and means for detecting the binding of the polynucleotide or polypeptide antigen to the antibody. In one embodiment, the antibody is attached to a solid support. In a specific embodiment, the antibody may be a monoclonal antibody. The detecting means of the kit may include a second, labeled monoclonal antibody. Alternatively, or in addition, the detecting means may include a labeled, competing antigen.

[0365] In one diagnostic configuration, test serum is reacted with a solid phase reagent having a surface-bound antigen obtained by the methods of the present invention. After binding with specific antigen antibody to the reagent and removing unbound serum components by washing, the reagent is reacted with reporter-labeled anti-human antibody to bind reporter to the reagent in proportion to the amount of bound anti-antigen antibody on the solid support. The reagent is again washed to remove unbound labeled antibody, and the amount of reporter associated with the reagent is determined. Typically, the reporter is an enzyme, which is detected by incubating the solid phase in the presence of a suitable fluorometric, luminescent or calorimetric substrate (Sigma, St. Louis, Mo.).

[0366] The solid surface reagent in the above assay is prepared by known techniques for attaching protein material to solid support material, such as polymeric beads, dip sticks, 96-well plate or filter material. These attachment methods generally include non-specific adsorption of the protein to the support or covalent attachment of the protein, typically through a free amine group, to a chemically reactive group on the solid support, such as an activated carboxyl, hydroxyl, or aldehyde group. Alternatively, streptavidin coated plates can be used in conjunction with biotinylated antigen(s).

[0367] Thus, the invention provides an assay system or kit for carrying out this diagnostic method. The kit generally includes a support with surface-bound recombinant antigens, and a reporter-labeled anti-human antibody for detecting surface-bound anti-antigen antibody.

[0368] Uses of the Polynucleotides

[0369] Each of the polynucleotides identified herein can be used in numerous ways as reagents. The following description should be considered exemplary and utilizes known techniques.

[0370] The polynucleotides of the present invention are useful for chromosome identification. There exists an ongoing need to identify new chromosome markers, since few chromosome marking reagents, based on actual sequence data (repeat polymorphisms), are presently available. Each sequence is specifically targeted to and can hybridize with a particular location on an individual human chromosome, thus each polynucleotide of the present invention can routinely be used as a chromosome marker using techniques known in the art. Table 1A, column 8 provides the chromosome location of some of the polynucleotides of the invention.

[0371] Briefly, sequences can be mapped to chromosomes by preparing PCR primers (preferably at least 15 bp (e.g., 15-25 bp) from the sequences shown in SEQ ID NO:X. Primers can optionally be selected using computer analysis so that primers do not span more than one predicted exon in the genomic DNA. These primers are then used for PCR screening of somatic cell hybrids containing individual human chromosomes. Only those hybrids containing the human gene corresponding to SEQ ID NO:X will yield an amplified fragment.

[0372] Similarly, somatic hybrids provide a rapid method of PCR mapping the polynucleotides to particular chromosomes. Three or more clones can be assigned per day using a single thermal cycler. Moreover, sublocalization of the polynucleotides can be achieved with panels of specific chromosome fragments. Other gene mapping strategies that can be used include in situ hybridization, prescreening with labeled flow-sorted chromosomes, preselection by hybridization to construct chromosome specific-cDNA libraries, and computer mapping techniques (See, e.g., Shuler, Trends Biotechnol 16:456-459 (1998) which is hereby incorporated by reference in its entirety).

[0373] Precise chromosomal location of the polynucleotides can also be achieved using fluorescence in situ hybridization (FISH) of a metaphase chromosomal spread. This technique uses polynucleotides as short as 500 or 600 bases; however, polynucleotides 2,000-4,000 bp are preferred. For a review of this technique, see Verma et al., “Human Chromosomes: a Manual of Basic Techniques,” Pergamon Press, New York (1988).

[0374] For chromosome mapping, the polynucleotides can be used individually (to mark a single chromosome or a single site on that chromosome) or in panels (for marking multiple sites and/or multiple chromosomes).

[0375] Thus, the present invention also provides a method for chromosomal localization which involves (a) preparing PCR primers from the polynucleotide sequences in Table 1A and/or Table 2 and SEQ ID NO:X and (b) screening somatic cell hybrids containing individual chromosomes.

[0376] The polynucleotides of the present invention would likewise be useful for radiation hybrid mapping, HAPPY mapping, and long range restriction mapping. For a review of these techniques and others known in the art, see, e.g. Dear, “Genome Mapping: A Practical Approach,” IRL Press at Oxford University Press, London (1997); Aydin, J. Mol. Med. 77:691-694 (1999); Hacia et al., Mol. Psychiatry 3:483-492 (1998); Herrick et al., Chromosome Res. 7:409-423 (1999); Hamilton et al., Methods Cell Biol. 62:265-280 (2000); and/or Ott, J. Hered. 90:68-70 (1999), each of which is hereby incorporated by reference in its entirety.

[0377] Once a polynucleotide has been mapped to a precise chromosomal location, the physical position of the polynucleotide can be used in linkage analysis. Linkage analysis establishes coinheritance between a chromosomal location and presentation of a particular disease. (Disease mapping data are found, for example, in V. McKusick, Mendelian Inheritance in Man (available on line through Johns Hopkins University Welch Medical Library).) Column 9 of Table 1A provides an OMIM reference identification number of diseases associated with the cytologic band disclosed in column 8 of Table 1A, as determined using techniques described herein and by reference to Table 5. Assuming 1 megabase mapping resolution and one gene per 20 kb, a cDNA precisely localized to a chromosomal region associated with the disease could be one of 50-500 potential causative genes.

[0378] Thus, once coinheritance is established, differences in a polynucleotide of the invention and the corresponding gene between affected and unaffected individuals can be examined. First, visible structural alterations in the chromosomes, such as deletions or translocations, are examined in chromosome spreads or by PCR. If no structural alterations exist, the presence of point mutations are ascertained. Mutations observed in some or all affected individuals, but not in normal individuals, indicate that the mutation may cause the disease. However, complete sequencing of the polypeptide and the corresponding gene from several normal individuals is required to distinguish the mutation from a polymorphism. If a new polymorphism is identified, this polymorphic polypeptide can be used for further linkage analysis.

[0379] Furthermore, increased or decreased expression of the gene in affected individuals as compared to unaffected individuals can be assessed using the polynucleotides of the invention. Any of these alterations (altered expression, chromosomal rearrangement, or mutation) can be used as a diagnostic or prognostic marker. Diagnostic and prognostic methods, kits and reagents encompassed by the present invention are briefly described below and more thoroughly elsewhere herein (see e.g., the sections labeled “Antibodies”, “Diagnostic Assays”, and “Methods for Detecting Cardiovascular System Disease, Including Cancer”).

[0380] Thus, the invention also provides a diagnostic method useful during diagnosis of a disorder, involving measuring the expression level of polynucleotides of the present invention in cells or body fluid from an individual and comparing the measured gene expression level with a standard level of polynucleotide expression level, whereby an increase or decrease in the gene expression level compared to the standard is indicative of a disorder. Additional non-limiting examples of diagnostic methods encompassed by the present invention are more thoroughly described elsewhere herein (see, e.g., Example 12).

[0381] In still another embodiment, the invention includes a kit for analyzing samples for the presence of proliferative and/or cancerous polynucleotides derived from a test subject, as further described herein. In a general embodiment, the kit includes at least one polynucleotide probe containing a nucleotide sequence that will specifically hybridize with a polynucleotide of the invention and a suitable container. In a specific embodiment, the kit includes two polynucleotide probes defining an internal region of the polynucleotide of the invention, where each probe has one strand containing a 31′mer-end internal to the region. In a further embodiment, the probes may be useful as primers for polymerase chain reaction amplification.

[0382] Where a diagnosis of a related disorder, including, for example, diagnosis of a tumor, has already been made according to conventional methods, the present invention is useful as a prognostic indicator, whereby patients exhibiting enhanced or depressed polynucleotide of the invention expression will experience a worse clinical outcome relative to patients expressing the gene at a level nearer the standard level.

[0383] By “measuring the expression level of polynucleotides of the invention” is intended qualitatively or quantitatively measuring or estimating the level of the polypeptide of the invention or the level of the mRNA encoding the polypeptide of the invention in a first biological sample either directly (e.g., by determining or estimating absolute protein level or mRNA level) or relatively (e.g., by comparing to the polypeptide level or mRNA level in a second biological sample). Preferably, the polypeptide level or mRNA level in the first biological sample is measured or estimated and compared to a standard polypeptide level or mRNA level, the standard being taken from a second biological sample obtained from an individual not having the related disorder or being determined by averaging levels from a population of individuals not having a related disorder. As will be appreciated in the art, once a standard polypeptide level or mRNA level is known, it can be used repeatedly as a standard for comparison.

[0384] By “biological sample” is intended any biological sample obtained from an individual, body fluid, cell line, tissue culture, or other source which contains polypeptide of the present invention or the corresponding mRNA. As indicated, biological samples include body fluids (such as semen, lymph, vaginal pool, sera, plasma, urine, synovial fluid and spinal fluid) which contain the polypeptide of the present invention, and tissue sources found to express the polypeptide of the present invention. Methods for obtaining tissue biopsies and body fluids from mammals are well known in the art. Where the biological sample is to include mRNA, a tissue biopsy is the preferred source.

[0385] The method(s) provided above may preferably be applied in a diagnostic method and/or kits in which polynucleotides and/or polypeptides of the invention are attached to a solid support. In one exemplary method, the support may be a “gene chip” or a “biological chip” as described in U.S. Pat. Nos. 5,837,832, 5,874,219, and 5,856,174. Further, such a gene chip with polynucleotides of the invention attached may be used to identify polymorphisms between the isolated polynucleotide sequences of the invention, with polynucleotides isolated from a test subject. The knowledge of such polymorphisms (i.e., their location, as well as, their existence) would be beneficial in identifying disease loci for many disorders, such as for example, in neural disorders, immune system disorders, muscular disorders, reproductive disorders, gastrointestinal disorders, pulmonary disorders, digestive disorders, cardiovascular disorders, renal disorders, proliferative disorders, and/or cancerous diseases and conditions. Such a method is described in U.S. Pat. Nos. 5,858,659 and 5,856,104. The U.S. Patents referenced supra are hereby incorporated by reference in their entirety herein.

[0386] The present invention encompasses polynucleotides of the present invention that are chemically synthesized, or reproduced as peptide nucleic acids (PNA), or according to other methods known in the art. The use of PNAs would serve as the preferred form if the polynucleotides of the invention are incorporated onto a solid support, or gene chip. For the purposes of the present invention, a peptide nucleic acid (PNA) is a polyamide type of DNA analog and the monomeric units for adenine, guanine, thymine and cytosine are available commercially (Perceptive Biosystems). Certain components of DNA, such as phosphorus, phosphorus oxides, or deoxyribose derivatives, are not present in PNAs. As disclosed by Nielsen et al., Science 254:1497 (1991); and Egholm et al., Nature 365:666 (1993), PNAs bind specifically and tightly to complementary DNA strands and are not degraded by nucleases. In fact, PNA binds more strongly to DNA than DNA itself does. This is probably because there is no electrostatic repulsion between the two strands, and also the polyamide backbone is more flexible. Because of this, PNA/DNA duplexes bind under a wider range of stringency conditions than DNA/DNA duplexes, making it easier to perform multiplex hybridization. Smaller probes can be used than with DNA due to the strong binding. In addition, it is more likely that single base mismatches can be determined with PNA/DNA hybridization because a single mismatch in a PNA/DNA 15-mer lowers the melting point (T.sub.m) by 8°-20° C., vs. 4°-16° C. for the DNA/DNA 15-mer duplex. Also, the absence of charge groups in PNA means that hybridization can be done at low ionic strengths and reduce possible interference by salt during the analysis.

[0387] The compounds of the present invention have uses, which include, but are not limited to, detecting cancer in mammals. In particular the invention is useful during diagnosis of pathological cell proliferative neoplasias which include, but are not limited to: acute myelogenous leukemias including acute monocytic leukemia, acute myeloblastic leukemia, acute promyelocytic leukemia, acute myelomonocytic leukemia, acute erythroleukemia, acute megakaryocytic leukemia, and acute undifferentiated leukemia, etc.; and chronic myelogenous leukemias including chronic myelomonocytic leukemia, chronic granulocytic leukemia, etc. Preferred mammals include monkeys, apes, cats, dogs, cows, pigs, horses, rabbits and humans. Particularly preferred are humans.

[0388] The compounds of the present invention have preferred uses, which include, but are not limited to, detecting cardiovascular system cancer in mammals. In particular the invention is useful during diagnosis of pathological cell proliferative neoplasias, which include, but are not limited to: myxomas, fibromas, and rhabdomyomas. Preferred mammals include monkeys, apes, cats, dogs, cows, pigs, horses, rabbits and humans. Particularly preferred are humans.

[0389] Pathological cell proliferative disorders are often associated with inappropriate activation of proto-oncogenes. (Gelmann, E. P. et al., “The Etiology of Acute Leukemia: Molecular Genetics and Viral Oncology,” in Neoplastic Diseases of the Blood, Vol 1., Wiernik, P. H. et al. eds., 161-182 (1985)). Neoplasias are now believed to result from the qualitative alteration of a normal cellular gene product, or from the quantitative modification of gene expression by insertion into the chromosome of a viral sequence, by chromosomal translocation of a gene to a more actively transcribed region, or by some other mechanism. (Gelmann et al., supra) It is likely that mutated or altered expression of specific genes is involved in the pathogenesis of some leukemias, among other tissues and cell types. (Gelmann et al., supra) Indeed, the human counterparts of the oncogenes involved in some animal neoplasias have been amplified or translocated in some cases of human leukemia and carcinoma. (Gelmann et al., supra)

[0390] For example, c-myc expression is highly amplified in the non-lymphocytic leukemia cell line HL-60. When HL-60 cells are chemically induced to stop proliferation, the level of c-myc is found to be downregulated. (International Publication Number WO 91/15580). However, it has been shown that exposure of HL-60 cells to a DNA construct that is complementary to the 5′ end of c-myc or c-myb blocks translation of the corresponding mRNAs which downregulates expression of the c-myc or c-myb proteins and causes arrest of cell proliferation and differentiation of the treated cells. (International Publication Number WO 91/15580; Wickstrom et al., Proc. Natl. Acad. Sci. 85:1028 (1988); Anfossi et al., Proc. Natl. Acad. Sci. 86:3379 (1989)). However, the skilled artisan would appreciate the present invention's usefulness is not be limited to treatment, prevention, diagnosis and/or prognosis, of proliferative disorders of cells and tissues of hematopoietic origin, in light of the numerous cells and cell types of varying origins which are known to exhibit proliferative phenotypes. In preferred embodiments, the compounds and/or methods of the invention are used to treat, prevent, diagnose, and/or prognose, proliferative disorders of cardiovascular system cells and tissues.

[0391] In addition to the foregoing, a polynucleotide of the present invention can be used to control gene expression through triple helix formation or through antisense DNA or RNA. Antisense techniques are discussed, for example, in Okano, J. Neurochem. 56: 560 (1991); “Oligodeoxynucleotides as Antisense Inhibitors of Gene Expression, CRC Press, Boca Raton, Fla. (1988). Triple helix formation is discussed in, for instance Lee et al., Nucleic Acids Research 6: 3073 (1979); Cooney et al., Science 241: 456 (1988); and Dervan et al., Science 251: 1360 (1991). Both methods rely on binding of the polynucleotide to a complementary DNA or RNA. For these techniques, preferred polynucleotides are usually oligonucleotides 20 to 40 bases in length and complementary to either the region of the gene involved in transcription (triple helix—see Lee et al., Nucl. Acids Res. 6:3073 (1979); Cooney et al., Science 241:456 (1988); and Dervan et al., Science 251:1360 (1991)) or to the mRNA itself (antisense—Okano, J. Neurochem. 56:560 (1991); Oligodeoxy-nucleotides as Antisense Inhibitors of Gene Expression, CRC Press, Boca Raton, Fla. (1988).) Triple helix formation optimally results in a shut-off of RNA transcription from DNA, while antisense RNA hybridization blocks translation of an mRNA molecule into polypeptide. The oligonucleotide described above can also be delivered to cells such that the antisense RNA or DNA may be expressed in vivo to inhibit production of polypeptide of the present invention antigens. Both techniques are effective in model systems, and the information disclosed herein can be used to design antisense or triple helix polynucleotides in an effort to treat disease, and in particular, for the treatment of proliferative diseases and/or conditions. Non-limiting antisense and triple helix methods encompassed by the present invention are more thoroughly described elsewhere herein (see, e.g., the section labeled “Antisense and Ribozyme (Antagonists)”).

[0392] Polynucleotides of the present invention are also useful in gene therapy. One goal of gene therapy is to insert a normal gene into an organism having a defective gene, in an effort to correct the genetic defect. The polynucleotides disclosed in the present invention offer a means of targeting such genetic defects in a highly accurate manner. Another goal is to insert a new gene that was not present in the host genome, thereby producing a new trait in the host cell. Additional non-limiting examples of gene therapy methods encompassed by the present invention are more thoroughly described elsewhere herein (see, e.g., the sections labeled “Gene Therapy Methods” and Examples 16, 17 and 18).

[0393] The polynucleotides are also useful for identifying individuals from minute biological samples. The United States military, for example, is considering the use of restriction fragment length polymorphism (RFLP) for identification of its personnel. In this technique, an individual's genomic DNA is digested with one or more restriction enzymes, and probed on a Southern blot to yield unique bands for identifying personnel. This method does not suffer from the current limitations of “Dog Tags” which can be lost, switched, or stolen, making positive identification difficult. The polynucleotides of the present invention can be used as additional DNA markers for RFLP.

[0394] The polynucleotides of the present invention can also be used as an alternative to RFLP, by determining the actual base-by-base DNA sequence of selected portions of an individual's genome. These sequences can be used to prepare PCR primers for amplifying and isolating such selected DNA, which can then be sequenced. Using this technique, individuals can be identified because each individual will have a unique set of DNA sequences. Once an unique ID database is established for an individual, positive identification of that individual, living or dead, can be made from extremely small tissue samples.

[0395] Forensic biology also benefits from using DNA-based identification techniques as disclosed herein. DNA sequences taken from very small biological samples such as tissues, e.g., hair or skin, or body fluids, e.g., blood, saliva, semen, synovial fluid, amniotic fluid, breast milk, lymph, pulmonary sputum or surfactant, urine, fecal matter, etc., can be amplified using PCR. In one prior art technique, gene sequences amplified from polymorphic loci, such as DQa class II HLA gene, are used in forensic biology to identify individuals. (Erlich, H., PCR Technology, Freeman and Co. (1992).) Once these specific polymorphic loci are amplified, they are digested with one or more restriction enzymes, yielding an identifying set of bands on a Southern blot probed with DNA corresponding to the DQa class II HLA gene. Similarly, polynucleotides of the present invention can be used as polymorphic markers for forensic purposes.

[0396] There is also a need for reagents capable of identifying the source of a particular tissue. Such need arises, for example, in forensics when presented with tissue of unknown origin. Appropriate reagents can comprise, for example, DNA probes or primers prepared from the sequences of the present invention, specific to tissues, including but not limited to, those sequences referred to in Table 1A. Panels of such reagents can identify tissue by species and/or by organ type. In a similar fashion, these reagents can be used to screen tissue cultures for contamination. Additional non-limiting examples of such uses are further described herein.

[0397] Because cardiovascular system antigens are found expressed in the cardiovascular system, the polynucleotides of the present invention are also useful as hybridization probes for differential identification of the tissue(s) or cell type(s) present in a biological sample. Similarly, polypeptides and antibodies directed to polypeptides of the present invention are useful to provide immunological probes for differential identification of the tissue(s) (e.g., immunohistochemistry assays) or cell type(s) (e.g., immunocytochemistry assays). In a specific embodiment, the polynucleotides of the present invention are also useful as hybridization probes for differential identification of cardiovascular system tissue(s) or cell type(s) present in a biological sample. Similarly, polypeptides and antibodies directed to polypeptides of the present invention are useful to provide immunological probes for differential identification of cardiovascular system tissue(s) (e.g., immunohistochemistry assays) or cell type(s) (e.g., immunocytochemistry assays). In addition, for a number of disorders of the above tissues or cells, significantly higher or lower levels of gene expression of the polynucleotides/polypeptides of the present invention may be detected in certain tissues (e.g., tissues expressing polypeptides and/or polynucleotides of the present invention, for example, normal cardiovascular system or diseased cardiovascular system tissues, and/or those tissues/cells corresponding to the library source relating to a polynucleotide sequence of the invention as disclosed in column 7 of Table 1A, and/or cancerous and/or wounded tissues) or bodily fluids (e.g., semen, lymph, vaginal pool, serum, plasma, urine, synovial fluid or spinal fluid) taken from an individual having such a disorder, relative to a “standard” gene expression level, i.e., the expression level in healthy tissue from an individual not having the disorder.

[0398] Thus, the invention provides a diagnostic method of a disorder, which involves: (a) assaying gene expression level in cells or body fluid of an individual; (b) comparing the gene expression level with a standard gene expression level, whereby an increase or decrease in the assayed gene expression level compared to the standard expression level is indicative of a disorder.

[0399] In the very least, the polynucleotides of the present invention can be used as molecular weight markers on Southern gels, as diagnostic probes for the presence of a specific mRNA in a particular cell type, as a probe to “subtract-out” known sequences in the process of discovering novel polynucleotides, for selecting and making oligomers for attachment to a “gene chip” or other support, to raise anti-DNA antibodies using DNA immunization techniques, and as an antigen to elicit an immune response.

[0400] Uses of the Polypeptides

[0401] Each of the polypeptides identified herein can be used in numerous ways. The following description should be considered exemplary and utilizes known techniques.

[0402] Polypeptides and antibodies directed to polypeptides of the present invention are useful to provide immunological probes for differential identification of the tissue(s) (e.g., immunohistochemistry assays such as, for example, ABC immunoperoxidase (Hsu et al., J. Histochem. Cytochem. 29:577-580 (1981)) or cell type(s) (e.g., immunocytochemistry assays).

[0403] Antibodies can be used to assay levels of polypeptides encoded by polynucleotides of the invention in a biological sample using classical immunohistological methods known to those of skill in the art (see, e.g., Jalkanen, et al., J. Cell. Biol. 101:976-985 (1985); Jalkanen, et al., J. Cell. Biol. 105:3087-3096 (1987)). Other antibody-based methods useful for detecting protein gene expression include immunoassays, such as the enzyme linked immunosorbent assay (ELISA) and the radioimmunoassay (RIA). Suitable antibody assay labels are known in the art and include enzyme labels, such as, glucose oxidase; radioisotopes, such as iodine (¹³¹I, ¹²⁵I, ¹²³I, ¹²¹I), carbon (¹⁴C), sulfur (³⁵S), tritium (³H), indium (^{115m}In, ^{113m}In, ¹¹²In, ¹¹¹In), and technetium (⁹⁹Tc, ^{99m}Tc), thallium (²⁰¹Ti), gallium (⁶⁸Ga, ⁶⁷Ga), palladium (¹⁰³Pd), molybdenum (⁹⁹Mo), xenon (¹³³Xe), fluorine (¹⁸F), ¹⁵³Sm, ¹⁷⁷Lu, ¹⁵⁹Gd ¹⁴⁹Pm, ¹⁴⁰La ¹⁷⁵Yb, ¹⁶⁶Ho, ⁹⁰Y, ⁴⁷Sc, ¹⁸⁶Re, ¹⁸⁸Re, ¹⁴²Pr, ¹⁰⁵Rh, ⁹⁷Ru; luminescent labels, such as luminol; and fluorescent labels, such as fluorescein and rhodamine, and biotin.

[0404] In addition to assaying levels of polypeptide of the present invention in a biological sample, proteins can also be detected in vivo by imaging. Antibody labels or markers for in vivo imaging of protein include those detectable by X-radiography, NMR or ESR. For X-radiography, suitable labels include radioisotopes such as barium or cesium, which emit detectable radiation but are not overtly harmful to the subject. Suitable markers for NMR and ESR include those with a detectable characteristic spin, such as deuterium, which may be incorporated into the antibody by labeling of nutrients for the relevant hybridoma.

[0405] A cardiovascular system antigen-specific antibody or antibody fragment which has been labeled with an appropriate detectable imaging moiety, such as a radioisotope (for example, ¹³¹I, ¹¹²In, ^{99m}Tc, (¹³¹I, ¹²⁵I, ¹²³I, ¹²¹I, carbon (¹⁴C), sulfur (³⁵S), tritium (³H), indium (^{115m}In, ^{113m}In, ¹¹²In, ¹¹¹In), and technetium (⁹⁹Tc, ^{99m}Tc), thallium (²⁰¹Ti), gallium (⁶⁸Ga, ⁶⁷Ga), palladium (¹⁰³Pd), molybdenum (⁹⁹Mo), xenon (¹³³Xe), fluorine (¹⁸F, ¹⁵³Sm, ¹⁷⁷Lu, ¹⁵⁹Gd, ¹⁴⁹Pm, ¹⁴⁰La, ¹⁷⁵Yb, ¹⁶⁶Ho, ⁹⁰Y, ⁴⁷Sc, ¹⁸⁶Re, ¹⁸⁸Re, ¹⁴²Pr, ¹⁰⁵Rh, ⁹⁷Ru), a radio-opaque substance, or a material detectable by nuclear magnetic resonance, is introduced (for example, parenterally, subcutaneously or intraperitoneally) into the mammal to be examined for cardiovascular system disorder. It will be understood in the art that the size of the subject and the imaging system used will determine the quantity of imaging moiety needed to produce diagnostic images. In the case of a radioisotope moiety, for a human subject, the quantity of radioactivity injected will normally range from about 5 to 20 millicuries of ^{99m}Tc. The labeled antibody or antibody fragment will then preferentially accumulate at the location of cells which express the polypeptide encoded by a polynucleotide of the invention. In vivo tumor imaging is described in S. W. Burchiel et al., “Immunopharmacokinetics of Radiolabeled Antibodies and Their Fragments” (Chapter 13 in Tumor Imaging: The Radiochemical Detection of Cancer, S. W. Burchiel and B. A. Rhodes, eds., Masson Publishing Inc. (1982)).

[0406] In one embodiment, the invention provides a method for the specific delivery of compositions of the invention to cells by administering polypeptides of the invention (e.g., polypeptides encoded by polynucleotides of the invention and/or antibodies) that are associated with heterologous polypeptides or nucleic acids. In one example, the invention provides a method for delivering a therapeutic protein into the targeted cell. In another example, the invention provides a method for delivering a single stranded nucleic acid (e.g., antisense or ribozymes) or double stranded nucleic acid (e.g., DNA that can integrate into the cell's genome or replicate episomally and that can be transcribed) into the targeted cell.

[0407] In another embodiment, the invention provides a method for the specific destruction of cells (e.g., the destruction of tumor cells) by administering polypeptides of the invention in association with toxins or cytotoxic prodrugs.

[0408] In a preferred embodiment, the invention provides a method for the specific destruction of cardiovascular system cells (e.g., aberrant cardiovascular system cells, cardiovascular system neoplasm) by administering polypeptides of the invention (e.g., polypeptides encoded by polynucleotides of the invention and/or antibodies) in association with toxins or cytotoxic prodrugs. In another preferred embodiment the invention provides a method for the specific destruction of tissues/cells corresponding to the library source relating to a polynucleotide sequence of the invention as disclosed in column 7 of Table 1A by administering polypeptides of the invention in association with toxins or cytotoxic prodrugs.

[0409] By “toxin” is meant one or more compounds that bind and activate endogenous cytotoxic effector systems, radioisotopes, holotoxins, modified toxins, catalytic subunits of toxins, or any molecules or enzymes not normally present in or on the surface of a cell that under defined conditions cause the cell's death. Toxins that may be used according to the methods of the invention include, but are not limited to, radioisotopes known in the art, compounds such as, for example, antibodies (or complement fixing containing portions thereof) that bind an inherent or induced endogenous cytotoxic effector system, thymidine kinase, endonuclease, RNAse, alpha toxin, ricin, abrin, Pseudomonas exotoxin A, diphtheria toxin, saporin, momordin, gelonin, pokeweed antiviral protein, alpha-sarcin and cholera toxin. “Toxin” also includes a cytostatic or cytocidal agent, a therapeutic agent or a radioactive metal ion, e.g., alpha-emitters such as, for example, ²¹³Bi, or other radioisotopes such as, for example, ¹⁰³Pd, ¹³³Xe, ¹³¹I, ¹¹¹In, ⁶⁸Ge ⁵⁷Co, ⁶⁵Zn, ⁸⁵Sr, ³²P, ³⁵S, ⁹⁰Y, ¹⁵³Sm, ¹⁵³Gd, ¹⁶⁹Yb, ⁵¹Cr, ⁵⁴Mn, ⁷⁵Se, ¹¹³Sn, ⁹⁰Yttrium, ¹¹⁷Tin, ¹⁸⁶Rhenium, ¹⁶⁶Holmium, and ¹⁸⁸Rhenium; luminescent labels, such as luminol; and fluorescent labels, such as fluorescein and rhodamine, and biotin.

[0410] In a specific embodiment, the invention provides a method for the specific destruction of cells (e.g., the destruction of tumor cells) by administering polypeptides of the invention or antibodies of the invention in association with the radioisotope ⁹⁰Y. In another specific embodiment, the invention provides a method for the specific destruction of cells (e.g., the destruction of tumor cells) by administering polypeptides of the invention or antibodies of the invention in association with the radioisotope ¹¹¹In. In a further specific embodiment, the invention provides a method for the specific destruction of cells (e.g., the destruction of tumor cells) by administering polypeptides of the invention or antibodies of the invention in association with the radioisotope ¹³¹I.

[0411] Techniques known in the art may be applied to label polypeptides of the invention (including antibodies). Such techniques include, but are not limited to, the use of bifunctional conjugating agents (see e.g., U.S. Pat. Nos. 5,756,065; 5,714,631; 5,696,239; 5,652,361; 5,505,931; 5,489,425; 5,435,990; 5,428,139; 5,342,604; 5,274,119; 4,994,560; and 5,808,003; the contents of each of which are hereby incorporated by reference in its entirety).

[0412] Thus, the invention provides a diagnostic method of a disorder, which involves (a) assaying the expression level of a polypeptide of the present invention in cells or body fluid of an individual; and (b) comparing the assayed polypeptide expression level with a standard polypeptide expression level, whereby an increase or decrease in the assayed polypeptide expression level compared to the standard expression level is indicative of a disorder. With respect to cancer, the presence of a relatively high amount of transcript in biopsied tissue from an individual may indicate a predisposition for the development of the disease, or may provide a means for detecting the disease prior to the appearance of actual clinical symptoms. A more definitive diagnosis of this type may allow health professionals to employ preventative measures or aggressive treatment earlier thereby preventing the development or further progression of the cancer.

[0413] Moreover, polypeptides of the present invention can be used to treat or prevent diseases or conditions of the cardiovascular system such as, for example, cardiovascular abnormalities (e.g., congenital heart defects, cerebral arteriovenous malformations, and septal defects), heart disease (e.g., heart failure, cardiomyopathy, pericarditis, and endocarditis), arrhythmias, heart valve disease (e.g., stenosis, regurgitation, and prolapse), vascular diseases (e.g., arteriosclerosis, coronary artery disease, angina, varicose veins, hypertension, and shock), electrolyte imbalance disorders (e.g., hypo- and hypernatremia, and hypo- and hyperkalemia), and/or those disorders or diseases as described under “Cardiovascular Disorders”. In preferred embodiments, polynucleotides expressed in a particular tissue type (see, e.g., Table 1A, column 7) are used to diagnose, detect, prevent, treat and/or prognose disorders associated with the tissue type. For example, patients can be administered a polypeptide of the present invention in an effort to replace absent or decreased levels of the polypeptide (e.g., insulin), to supplement absent or decreased levels of a different polypeptide (e.g., hemoglobin S for hemoglobin B, SOD, catalase, DNA repair proteins), to inhibit the activity of a polypeptide (e.g., an oncogene or tumor supressor), to activate the activity of a polypeptide (e.g., by binding to a receptor), to reduce the activity of a membrane bound receptor by competing with it for free ligand (e.g., soluble TNF receptors used in reducing inflammation), or to bring about a desired response (e.g., blood vessel growth inhibition, enhancement of the immune response to proliferative cells or tissues).

[0414] Similarly, antibodies directed to a polypeptide of the present invention can also be used to treat disease (as described supra, and elsewhere herein). For example, administration of an antibody directed to a polypeptide of the present invention can bind, and/or neutralize the polypeptide, and/or reduce overproduction of the polypeptide. Similarly, administration of an antibody can activate the polypeptide, such as by binding to a polypeptide bound to a membrane (receptor).

[0415] At the very least, the polypeptides of the present invention can be used as molecular weight markers on SDS-PAGE gels or on molecular sieve gel filtration columns using methods well known to those of skill in the art. Polypeptides can also be used to raise antibodies, which in turn are used to measure protein expression from a recombinant cell, as a way of assessing transformation of the host cell. Moreover, the polypeptides of the present invention can be used to test the biological activities described herein.

[0416] Diagnostic Assays

[0417] The compounds of the present invention are useful for diagnosis, treatment, prevention and/or prognosis of various cardiovascular system related disorders in mammals, preferably humans. Such disorders include, but are not limited to, cardiovascular abnormalities (e.g., congenital heart defects, cerebral arteriovenous malformations, and septal defects), heart disease (e.g., heart failure, cardiomyopathy, pericarditis, and endocarditis), arrhythmias, heart valve disease (e.g., stenosis, regurgitation, and prolapse), vascular diseases (e.g., arteriosclerosis, coronary artery disease, angina, varicose veins, hypertension, and shock), electrolyte imbalance disorders (e.g., hypo- and hypernatremia, and hypo- and hyperkalemia), and/or those disorders or diseases as described under “Cardiovascular Disorders”. In preferred embodiments, polynucleotides expressed in a particular tissue type (see, e.g., Table 1A, column 7) are used to diagnose, detect, prevent, treat and/or prognose disorders associated with the tissue type.

[0418] Cardiovascular system antigens are expressed in the cardiovascular system, with an increased expression level in cardiovascular system tissues. For a number of cardiovascular system related disorders, substantially altered (increased or decreased) levels of cardiovascular system antigen gene expression can be detected in cardiovascular system tissue or other cells or bodily fluids (e.g., sera, plasma, urine, semen, synovial fluid or spinal fluid) taken from an individual having such a disorder, relative to a “standard” cardiovascular system antigen gene expression level, that is, the cardiovascular system antigen expression level in cardiovascular system tissues or bodily fluids from an individual not having the cardiovascular system disorder. Thus, the invention provides a diagnostic method useful during diagnosis of a cardiovascular system disorder, which involves measuring the expression level of the gene encoding the cardiovascular system associated polypeptide in cardiovascular system tissue or other cells or body fluid from an individual and comparing the measured gene expression level with a standard cardiovascular system antigens gene expression level, whereby an increase or decrease in the gene expression level(s) compared to the standard is indicative of an cardiovascular system disorder.

[0419] In specific embodiments, the invention provides a diagnostic method useful during diagnosis of a disorder of a normal or diseased tissue/cell source corresponding to column 7 of Table 1A, which involves measuring the expression level of the coding sequence of a polynucleotide sequence associated with this tissue/cell source as disclosed in Table 1A in the tissue/cell source or other cells or body fluid from an individual and comparing the expression level of the coding sequence with a standard expression level of the coding sequence of a polynucleotide sequence, whereby an increase or decrease in the gene expression level(s) compared to the standard is indicative of a disorder of a normal or diseased tissue/cell source corresponding to column 7 of Table 1A.

[0420] In particular, it is believed that certain tissues in mammals with cancer of cells or tissue of the cardiovascular system express significantly enhanced or reduced levels of normal or altered cardiovascular system antigen expression and mRNA encoding the cardiovascular system associated polypeptide when compared to a corresponding “standard” level. Further, it is believed that enhanced or depressed levels of the cardiovascular system associated polypeptide can be detected in certain body fluids (e.g., sera, plasma, urine, and spinal fluid) or cells or tissue from mammals with such a cancer when compared to sera from mammals of the same species not having the cancer.

[0421] For example, as disclosed herein, cardiovascular system associated polypeptides of the invention are expressed in the cardiovascular system. Accordingly, polynucleotides of the invention (e.g., polynucleotide sequences complementary to all or a portion of a cardiovascular system antigen mRNA nucleotide sequence of SEQ ID NO:X, nucleotide sequence encoding SEQ ID NO:Y, nucleotide sequence encoding a polypeptide encoded by SEQ ID NO:X and/or a nucleotide sequence delineated by columns 8 and 9 of Table 2) and antibodies (and antibody fragments) directed against the polypeptides of the invention may be used to quantitate or qualitate concentrations of cells of the cardiovascular system expressing cardiovascular system antigens, preferably on their cell surfaces. These polynucleotides and antibodies additionally have diagnostic applications in detecting abnormalities in the level of cardiovascular system antigens gene expression, or abnormalities in the structure and/or temporal, tissue, cellular, or subcellular location of cardiovascular system antigens. These diagnostic assays may be performed in vivo or in vitro, such as, for example, on blood samples, biopsy tissue or autopsy tissue. In specific embodiments, polynucleotides and antibodies of the invention are used to quantitate or qualitate tissues/cells corresponding to the library source disclosed in column 7 of Table 1A expressing the corresponding cardiovascular system sequence disclosed in the same row of Table 1A, preferably on their cell surface.

[0422] Thus, the invention provides a diagnostic method useful during diagnosis of a cardiovascular system disorder, including cancers, which involves measuring the expression level of the gene encoding the cardiovascular system antigen polypeptide in cardiovascular system tissue or other cells or body fluid from an individual and comparing the measured gene expression level with a standard cardiovascular system antigen gene expression level, whereby an increase or decrease in the gene expression level compared to the standard is indicative of a cardiovascular system disorder. In specific embodiments, polynucleotides and antibodies of the invention are used to quantitate or qualitate tissues/cells corresponding to the library source disclosed in column 7 of Table 1A expressing the corresponding cardiovascular systemcardiovascular system sequence disclosed in the same row of Table 1A, preferably on their cell surface.

[0423] Where a diagnosis of a disorder in the cardiovascular system, including diagnosis of a tumor, has already been made according to conventional methods, the present invention is useful as a prognostic indicator, whereby patients exhibiting enhanced or depressed cardiovascular system antigen gene expression will experience a worse clinical outcome relative to patients expressing the gene at a level nearer the standard level.

[0424] By “assaying the expression level of the gene encoding the cardiovascular system associated polypeptide” is intended qualitatively or quantitatively measuring or estimating the level of the cardiovascular system antigen polypeptide or the level of the mRNA encoding the cardiovascular system antigen polypeptide in a first biological sample either directly (e.g., by determining or estimating absolute protein level or mRNA level) or relatively (e.g., by comparing to the cardiovascular system associated polypeptide level or mRNA level in a second biological sample). Preferably, the cardiovascular system antigen polypeptide expression level or mRNA level in the first biological sample is measured or estimated and compared to a standard cardiovascular system antigen polypeptide level or mRNA level, the standard being taken from a second biological sample obtained from an individual not having the disorder or being determined by averaging levels from a population of individuals not having a disorder of the cardiovascular system. As will be appreciated in the art, once a standard cardiovascular system antigen polypeptide level or mRNA level is known, it can be used repeatedly as a standard for comparison.

[0425] By “biological sample” is intended any biological sample obtained from an individual, cell line, tissue culture, or other source containing cardiovascular system antigen polypeptides (including portions thereof) or mRNA. As indicated, biological samples include body fluids (such as sera, plasma, urine, synovial fluid and spinal fluid) which contain cells expressing cardiovascular system antigen polypeptides, cardiovascular system tissue, and other tissue sources found to express the full length or fragments thereof of a cardiovascular system antigen. Methods for obtaining tissue biopsies and body fluids from mammals are well known in the art. Where the biological sample is to include mRNA, a tissue biopsy is the preferred source.

[0426] Total cellular RNA can be isolated from a biological sample using any suitable technique such as the single-step guanidinium-thiocyanate-phenol-chloroform method described in Chomczynski and Sacchi, Anal. Biochem. 162:156-159 (1987). Levels of mRNA encoding the cardiovascular system antigen polypeptides are then assayed using any appropriate method. These include Northern blot analysis, S1 nuclease mapping, the polymerase chain reaction (PCR), reverse transcription in combination with the polymerase chain reaction (RT-PCR), and reverse transcription in combination with the ligase chain reaction (RT-LCR).

[0427] The present invention also relates to diagnostic assays such as quantitative and diagnostic assays for detecting levels of cardiovascular system antigen polypeptides, in a biological sample (e.g., cells and tissues), including determination of normal and abnormal levels of polypeptides. Thus, for instance, a diagnostic assay in accordance with the invention for detecting over-expression of cardiovascular system antigens compared to normal control tissue samples may be used to detect the presence of tumors. Assay techniques that can be used to determine levels of a polypeptide, such as a cardiovascular system antigen polypeptide of the present invention in a sample derived from a host are well-known to those of skill in the art. Such assay methods include radioimmunoassays, competitive-binding assays, Western Blot analysis and ELISA assays. Assaying cardiovascular system antigen polypeptide levels in a biological sample can occur using any art-known method.

[0428] Assaying cardiovascular system antigen polypeptide levels in a biological sample can occur using antibody-based techniques. For example, cardiovascular system antigen polypeptide expression in tissues can be studied with classical immunohistological methods (Jalkanen et al., J. Cell. Biol. 101:976-985 (1985); Jalkanen, M., et al., J. Cell. Biol. 105:3087-3096 (1987)). Other antibody-based methods useful for detecting cardiovascular system antigen polypeptide gene expression include immunoassays, such as the enzyme linked immunosorbent assay (ELISA) and the radioimmunoassay (RIA). Suitable antibody assay labels are known in the art and include enzyme labels, such as, glucose oxidase, and radioisotopes, such as iodine (¹²⁵I, ¹²¹I), carbon (¹⁴C), sulfur (³⁵S), tritium (³H), indium (¹¹²In), and technetium (^{99m}Tc), and fluorescent labels, such as fluorescein and rhodamine, and biotin.

[0429] The tissue or cell type to be analyzed will generally include those, which are known, or suspected, to express the cardiovascular system antigen gene (such as, for example, cells of the cardiovascular system or cancer of cardiovascular system tissues). The protein isolation methods employed herein may, for example, be such as those described in Harlow and Lane (Harlow, E. and Lane, D., 1988, “Antibodies: A Laboratory Manual”, Cold Spring Harbor Laboratory Press, Cold Spring Harbor, N.Y.), which is incorporated herein by reference in its entirety. The isolated cells can be derived from cell culture or from a patient. The analysis of cells taken from culture may be a necessary step in the assessment of cells that could be used as part of a cell-based gene therapy technique or, alternatively, to test the effect of compounds on the expression of the cardiovascular system antigen gene.

[0430] For example, antibodies, or fragments of antibodies, such as those described herein, may be used to quantitatively or qualitatively detect the presence of cardiovascular system antigen gene products or conserved variants or peptide fragments thereof. This can be accomplished, for example, by immunofluorescence techniques employing a fluorescently labeled antibody coupled with light microscopic, flow cytometric, or fluorimetric detection.

[0431] In a preferred embodiment, antibodies, or fragments of antibodies directed to any one or all of the predicted epitope domains of the cardiovascular system antigen polypeptides (Shown in Table 1A, column 6) may be used to quantitatively or qualitatively detect the presence of cardiovascular system antigen gene products or conserved variants or peptide fragments thereof. This can be accomplished, for example, by immunofluorescence techniques employing a fluorescently labeled antibody coupled with light microscopic, flow cytometric, or fluorimetric detection.

[0432] In an additional preferred embodiment, antibodies, or fragments of antibodies directed to a conformational epitope of a cardiovascular system antigen may be used to quantitatively or qualitatively detect the presence of cardiovascular system antigen gene products or conserved variants or peptide fragments thereof. This can be accomplished, for example, by immunofluorescence techniques employing a fluorescently labeled antibody coupled with light microscopic, flow cytometric, or fluorimetric detection.

[0433] The antibodies (or fragments thereof), and/or cardiovascular system antigen polypeptides of the present invention may, additionally, be employed histologically, as in immunofluorescence, immunoelectron microscopy or non-immunological assays, for in situ detection of cardiovascular system antigen gene products or conserved variants or peptide fragments thereof. In situ detection may be accomplished by removing a histological specimen from a patient, and applying thereto a labeled antibody or cardiovascular system antigen polypeptide of the present invention. The antibody (or fragment thereof) or cardiovascular system antigen polypeptide is preferably applied by overlaying the labeled antibody (or fragment) onto a biological sample. Through the use of such a procedure, it is possible to determine not only the presence of the cardiovascular system antigen gene product, or conserved variants or peptide fragments, or cardiovascular system antigen polypeptide binding, but also its distribution in the examined tissue. Using the present invention, those of ordinary skill will readily perceive that any of a wide variety of histological methods (such as staining procedures) can be modified in order to achieve such in situ detection.

[0434] Immunoassays and non-immunoassays for cardiovascular system antigen gene products or conserved variants or peptide fragments thereof will typically comprise incubating a sample, such as a biological fluid, a tissue extract, freshly harvested cells, or lysates of cells which have been incubated in cell culture, in the presence of a detectably labeled antibody capable of binding cardiovascular system antigen gene products or conserved variants or peptide fragments thereof, and detecting the bound antibody by any of a number of techniques well-known in the art.

[0435] The biological sample may be brought in contact with and immobilized onto a solid phase support or carrier such as nitrocellulose, or other solid support which is capable of immobilizing cells, cell particles or soluble proteins. The support may then be washed with suitable buffers followed by treatment with the detectably labeled anti-cardiovascular system antigen antibody or detectable cardiovascular system antigen polypeptide. The solid phase support may then be washed with the buffer a second time to remove unbound antibody or polypeptide. Optionally the antibody is subsequently labeled. The amount of bound label on solid support may then be detected by conventional means.

[0436] By “solid phase support or carrier” is intended any support capable of binding an antigen or an antibody. Well-known supports or carriers include glass, polystyrene, polypropylene, polyethylene, dextran, nylon, amylases, natural and modified celluloses, polyacrylamides, gabbros, and magnetite. The nature of the carrier can be either soluble to some extent or insoluble for the purposes of the present invention. The support material may have virtually any possible structural configuration so long as the coupled molecule is capable of binding to an antigen or antibody. Thus, the support configuration may be spherical, as in a bead, or cylindrical, as in the inside surface of a test tube, or the external surface of a rod. Alternatively, the surface may be flat such as a sheet, test strip, etc. Preferred supports include polystyrene beads. Those skilled in the art will know many other suitable carriers for binding antibody or antigen, or will be able to ascertain the same by use of routine experimentation.

[0437] The binding activity of a given lot of anti-cardiovascular system antigen antibody or cardiovascular system antigen polypeptide may be determined according to well-known methods. Those skilled in the art will be able to determine operative and optimal assay conditions for each determination by employing routine experimentation.

[0438] In addition to assaying cardiovascular system antigen polypeptide levels or polynucleotide levels in a biological sample obtained from an individual, cardiovascular system antigen polypeptide or polynucleotide can also be detected in vivo by imaging. For example, in one embodiment of the invention, cardiovascular system antigen polypeptide and/or anti-cardiovascular system antigen antibodies are used to image cardiovascular system diseased cells, such as neoplasms. In another embodiment, cardiovascular system antigen polynucleotides of the invention (e.g., polynucleotides complementary to all or a portion of cardiovascular system antigen mRNA) and/or anti-cardiovascular system antigen antibodies (e.g., antibodies directed to any one or a combination of the epitopes of cardiovascular system antigens, antibodies directed to a conformational epitope of cardiovascular system antigens, antibodies directed to the full length polypeptide expressed on the cell surface of a mammalian cell) are used to image diseased or neoplastic cells of the cardiovascular system.

[0439] Antibody labels or markers for in vivo imaging of cardiovascular system antigen polypeptides include those detectable by X-radiography, NMR, MRI, CAT-scans or ESR. For X-radiography, suitable labels include radioisotopes such as barium or cesium, which emit detectable radiation but are not overtly harmful to the subject. Suitable markers for NMR and ESR include those with a detectable characteristic spin, such as deuterium, which may be incorporated into the antibody by labeling of nutrients for the relevant hybridoma. Where in vivo imaging is used to detect enhanced levels of cardiovascular system antigen polypeptides for diagnosis in humans, it may be preferable to use human antibodies or “humanized” chimeric monoclonal antibodies. Such antibodies can be produced using techniques described herein or otherwise known in the art. For example methods for producing chimeric antibodies are known in the art. See, for review, Morrison, Science 229:1202 (1985); Oi et al., BioTechniques 4:214 (1986); Cabilly et al., U.S. Pat. No. 4,816,567; Taniguchi et al., EP 171496; Morrison et al., EP 173494; Neuberger et al., WO 8601533; Robinson et al., WO 8702671; Boulianne et al., Nature 312:643 (1984); Neuberger et al., Nature 314:268 (1985).

[0440] Additionally, any cardiovascular system antigen polypeptides whose presence can be detected, can be administered. For example, cardiovascular system antigen polypeptides labeled with a radio-opaque or other appropriate compound can be administered and visualized in vivo, as discussed, above for labeled antibodies. Further such cardiovascular system antigen polypeptides can be utilized for in vitro diagnostic procedures.

[0441] A cardiovascular system antigen polypeptide-specific antibody or antibody fragment which has been labeled with an appropriate detectable imaging moiety, such as a radioisotope (for example, ¹³¹I, ¹¹²In, ^{99m}Tc), a radio-opaque substance, or a material detectable by nuclear magnetic resonance, is introduced (for example, parenterally, subcutaneously or intraperitoneally) into the mammal to be examined for a cardiovascular system disorder. It will be understood in the art that the size of the subject and the imaging system used will determine the quantity of imaging moiety needed to produce diagnostic images. In the case of a radioisotope moiety, for a human subject, the quantity of radioactivity injected will normally range from about 5 to 20 millicuries of ^{99m}Tc. The labeled antibody or antibody fragment will then preferentially accumulate at the location of cells which contain cardiovascular system antigen protein. In vivo tumor imaging is described in S. W. Burchiel et al., “Immunopharmacokinetics of Radiolabeled Antibodies and Their Fragments” (Chapter 13 in Tumor Imaging: The Radiochemical Detection of Cancer, S. W. Burchiel and B. A. Rhodes, eds., Masson Publishing Inc. (1982)).

[0442] With respect to antibodies, one of the ways in which the anti-cardiovascular system antigen antibody can be detectably labeled is by linking the same to an enzyme and using the linked product in an enzyme immunoassay (EIA) (Voller, A., “The Enzyme Linked Immunosorbent Assay (ELISA)”, 1978, Diagnostic Horizons 2:1-7, Microbiological Associates Quarterly Publication, Walkersville, Md.); Voller et al., J. Clin. Pathol. 31:507-520 (1978); Butler, J. E., Meth. Enzymol. 73:482-523 (1981); Maggio, E. (ed.), 1980, Enzyme Immunoassay, CRC Press, Boca Raton, Fla.,; Ishikawa, E. et al., (eds.), 1981, Enzyme Immunoassay, Kgaku Shoin, Tokyo). The enzyme, which is bound to the antibody will react with an appropriate substrate, preferably a chromogenic substrate, in such a manner as to produce a chemical moiety which can be detected, for example, by spectrophotometric, fluorimetric or by visual means. Enzymes which can be used to detectably label the antibody include, but are not limited to, malate dehydrogenase, staphylococcal nuclease, delta-5-steroid isomerase, yeast alcohol dehydrogenase, alpha-glycerophosphate, dehydrogenase, triose phosphate isomerase, horseradish peroxidase, alkaline phosphatase, asparaginase, glucose oxidase, beta-galactosidase, ribonuclease, urease, catalase, glucose-6-phosphate dehydrogenase, glucoamylase and acetylcholinesterase. Additionally, the detection can be accomplished by colorimetric methods, which employ a chromogenic substrate for the enzyme. Detection may also be accomplished by visual comparison of the extent of enzymatic reaction of a substrate in comparison with similarly prepared standards.

[0443] Detection may also be accomplished using any of a variety of other immunoassays. For example, by radioactively labeling the antibodies or antibody fragments, it is possible to detect cardiovascular system antigens through the use of a radioimmunoassay (RIA) (see, for example, Weintraub, B., Principles of Radioimmunoassays, Seventh Training Course on Radioligand Assay Techniques, The Endocrine Society, March, 1986, which is incorporated by reference herein). The radioactive isotope can be detected by means including, but not limited to, a gamma counter, a scintillation counter, or autoradiography.

[0444] It is also possible to label the antibody with a fluorescent compound. When the fluorescently labeled antibody is exposed to light of the proper wave length, its presence can then be detected due to fluorescence. Among the most commonly used fluorescent labeling compounds are fluorescein isothiocyanate, rhodamine, phycoerythrin, phycocyanin, allophycocyanin, ophthaldehyde and fluorescamine.

[0445] The antibody can also be detectably labeled using fluorescence emitting metals such as ¹⁵²Eu, or others of the lanthanide series. These metals can be attached to the antibody using such metal chelating groups as diethylenetriaminepentacetic acid (DTPA) or ethylenediaminetetraacetic acid (EDTA).

[0446] The antibody also can be detectably labeled by coupling it to a chemiluminescent compound. The presence of the chemiluminescent-tagged antibody is then determined by detecting the presence of luminescence that arises during the course of a chemical reaction. Examples of particularly useful chemiluminescent labeling compounds are luminol, isoluminol, theromatic acridinium ester, imidazole, acridinium salt and oxalate ester.

[0447] Likewise, a bioluminescent compound may be used to label the antibody of the present invention. Bioluminescence is a type of chemiluminescence found in biological systems in, which a catalytic protein increases the efficiency of the chemiluminescent reaction. The presence of a bioluminescent protein is determined by detecting the presence of luminescence. Important bioluminescent compounds for purposes of labeling are luciferin, luciferase and aequonrn.

[0448] Methods for Detecting Cardiovascular System Disease, Including Cancer

[0449] In general, a cardiovascular system disease or cancer may be detected in a patient based on the presence of one or more cardiovascular system antigen proteins of the invention and/or polynucleotides encoding such proteins in a biological sample (for example, blood, sera, urine, and/or tumor biopsies) obtained from the patient. In other words, such proteins and/or polynucleotides may be used as markers to indicate the presence or absence of a cardiovascular system disease or disorder, including cancer. Cancers that may be diagnosed, and/or prognosed using the compositions of the invention include but are not limited to, cancer of cardiovascular system tissues. In addition, such proteins and/or polynucleotides may be useful for the detection of other diseases and cancers, including cancers of tissues/cells corresponding to the library source disclosed in column 7 of Table 1A expressing the corresponding cardiovascular system sequence disclosed in the same row of Table 1A. The binding agents provided herein generally permit detection of the level of antigen that binds to the agent in the biological sample. Polynucleotide primers and probes may be used to detect the level of mRNA encoding cardiovascular system antigen polypeptides, which is also indicative of the presence or absence of a cardiovascular system disease or disorder, including cancer. In general, cardiovascular system antigen polypeptides should be present at a level that is at least three fold higher in diseased tissue than in normal tissue.

[0450] There are a variety of assay formats known to those of ordinary skill in the art for using a binding agent to detect polypeptide markers in a sample. See, e.g., Harlow and Lane, supra. In general, the presence or absence of a cardiovascular system disease in a patient may be determined by (a) contacting a biological sample obtained from a patient with a binding agent; (b) detecting in the sample a level of polypeptide that binds to the binding agent; and (c) comparing the level of polypeptide with a predetermined cut-off value.

[0451] In a preferred embodiment, the assay involves the use of binding agent immobilized on a solid support to bind to and remove the cardiovascular system antigen polypeptide of the invention from the remainder of the sample. The bound polypeptide may then be detected using a detection reagent that contains a reporter group and specifically binds to the binding agent/polypeptide complex. Such detection reagents may comprise, for example, a binding agent that specifically binds to the polypeptide or an antibody or other agent that specifically binds to the binding agent, such as an anti-immunoglobulin, protein G, protein A or a lectin. Alternatively, a competitive assay may be utilized, in which a polypeptide is labeled with a reporter group and allowed to bind to the immobilized binding agent after incubation of the binding agent with the sample. The extent to which components of the sample inhibit the binding of the labeled polypeptide to the binding agent is indicative of the reactivity of the sample with the immobilized binding agent. Suitable polypeptides for use within such assays include cardiovascular system antigen polypeptides and portions thereof, or antibodies, to which the binding agent binds, as described above.

[0452] The solid support may be any material known to those of skill in the art to which cardiovascular system antigen polypeptides of the invention may be attached. For example, the solid support may be a test well in a microtiter plate or a nitrocellulose or other suitable membrane. Alternatively, the support may be a bead or disc, such as glass fiberglass, latex or a plastic material such as polystyrene or polyvinylchloride. The support may also be a magnetic particle or a fiber optic sensor, such as those disclosed, for example, in U.S. Pat. No. 5,359,681. The binding agent may be immobilized on the solid support using a variety of techniques known to those of skill in the art, which are amply described in the patent and scientific literature. In the context of the present invention, the term “immobilization” refers to both noncovalent association, such as adsorption, and covalent attachment (which may be a direct linkage between the agent and functional groups on the support or may be a linkage by way of a cross-linking agent). Immobilization by adsorption to a well in a microtiter plate or to a membrane is preferred. In such cases, adsorption may be achieved by contacting the binding agent, in a suitable buffer, with the solid support for the suitable amount of time. The contact time varies with temperature, but is typically between about 1 hour and about 1 day. In general, contacting a well of plastic microtiter plate (such as polystyrene or polyvinylchloride) with an amount of binding agent ranging from about 10 ng to about 10 ug, and preferably about 100 ng to about 1 ug, is sufficient to immobilize an adequate amount of binding agent.

[0453] Covalent attachment of binding agent to a solid support may generally be achieved by first reacting the support with a bifunctional reagent that will react with both the support and a functional group, such as a hydroxyl or amino group, on the binding agent. For example, the binding agent may be covalently attached to supports having an appropriate polymer coating using benzoquinone or by condensation of an aldehyde group on the support with an amine and an active hydrogen on the binding partner (see, e.g., Pierce Immunotechnology Catalog and Handbook, 1991, at A12-A13).

[0454] Gene Therapy Methods

[0455] Also encompassed by the present invention are gene therapy methods for treating or preventing disorders, diseases and conditions. The gene therapy methods relate to the introduction of nucleic acid (DNA, RNA and antisense DNA or RNA) sequences into an animal to achieve expression of a cardiovascular system antigen of the present invention. This method requires a polynucleotide which codes for a polypeptide of the present invention operatively linked to a promoter and any other genetic elements necessary for the expression of the polypeptide by the target tissue. Such gene therapy and delivery techniques are known in the art, see, for example, WO90/11092, which is herein incorporated by reference.

[0456] Thus, for example, cells from a patient may be engineered with a polynucleotide (DNA or RNA) comprising a promoter operably linked to a polynucleotide of the present invention ex vivo, with the engineered cells then being provided to a patient to be treated with the polypeptide of the present invention. Such methods are well-known in the art. For example, see Belldegrun, A., et al., J. Natl. Cancer Inst. 85: 207-216 (1993); Ferrantini, M. et al., Cancer Research 53: 1107-1112 (1993); Ferrantini, M. et al., J. Immunology 153: 4604-4615 (1994); Kaido, T., et al., Int. J. Cancer 60: 221-229 (1995); Ogura, H., et al., Cancer Research 50: 5102-5106 (1990); Santodonato, L., et al., Human Gene Therapy 7:1-10 (1996); Santodonato, L., et al., Gene Therapy 4:1246-1255 (1997); and Zhang, J.-F. et al., Cancer Gene Therapy 3: 31-38 (1996)), which are herein incorporated by reference. In one embodiment, the cells, which are engineered are arterial cells. The arterial cells may be reintroduced into the patient through direct injection to the artery, the tissues surrounding the artery, or through catheter injection.

[0457] As discussed in more detail below, the polynucleotide constructs can be delivered by any method that delivers injectable materials to the cells of an animal, such as, injection into the interstitial space of tissues (heart, muscle, skin, lung, liver, and the like). The polynucleotide constructs may be delivered in a pharmaceutically acceptable liquid or aqueous carrier.

[0458] In one embodiment, the polynucleotide of the present invention is delivered as a naked polynucleotide. The term “naked” polynucleotide, DNA or RNA refers to sequences that are free from any delivery vehicle that acts to assist, promote or facilitate entry into the cell, including viral sequences, viral particles, liposome formulations, lipofectin or precipitating agents and the like. However, the polynucleotide of the present invention can also be delivered in liposome formulations and lipofectin formulations and the like can be prepared by methods well known to those skilled in the art. Such methods are described, for example, in U.S. Pat. Nos. 5,593,972, 5,589,466, and 5,580,859, which are herein incorporated by reference.

[0459] The polynucleotide vector constructs used in the gene therapy method are preferably constructs that will not integrate into the host genome nor will they contain sequences that allow for replication. Appropriate vectors include pWLNEO, pSV2CAT, pOG44, pXT1 and pSG available from Stratagene; pSVK3, pBPV, pMSG and pSVL available from Pharmacia; and pEF1/V5, pcDNA3.1, and pRc/CMV2 available from Invitrogen. Other suitable vectors will be readily apparent to the skilled artisan.

[0460] Any strong promoter known to those skilled in the art can be used for driving the expression of the polynucleotide sequence. Suitable promoters include adenoviral promoters, such as the adenoviral major late promoter; or heterologous promoters, such as the cytomegalovirus (CMV) promoter; the respiratory syncytial virus (RSV) promoter; inducible promoters, such as the MMT promoter, the metallothionein promoter; heat shock promoters; the albumin promoter; the ApoAI promoter; human globin promoters; viral thymidine kinase promoters, such as the Herpes Simplex thymidine kinase promoter; retroviral LTRs; the b-actin promoter; and human growth hormone promoters. The promoter also may be the native promoter for the polynucleotide of the present invention.

[0461] Unlike other gene therapy techniques, one major advantage of introducing naked nucleic acid sequences into target cells is the transitory nature of the polynucleotide synthesis in the cells. Studies have shown that non-replicating DNA sequences can be introduced into cells to provide production of the desired polypeptide for periods of up to six months.

[0462] The polynucleotide construct can be delivered to the interstitial space of tissues within the an animal, including of muscle, skin, brain, lung, liver, spleen, bone marrow, thymus, heart, lymph, blood, bone, cartilage, pancreas, kidney, gall bladder, stomach, intestine, testis, ovary, uterus, rectum, nervous system, eye, gland, and connective tissue. Interstitial space of the tissues comprises the intercellular, fluid, mucopolysaccharide matrix among the reticular fibers of organ tissues, elastic fibers in the walls of vessels or chambers, collagen fibers of fibrous tissues, or that same matrix within connective tissue ensheathing muscle cells or in the lacunae of bone. It is similarly the space occupied by the plasma of the circulation and the lymph fluid of the lymphatic channels. Delivery to the interstitial space of muscle tissue is preferred for the reasons discussed below. They may be conveniently delivered by injection into the tissues comprising these cells. They are preferably delivered to and expressed in persistent, non-dividing cells which are differentiated, although delivery and expression may be achieved in non-differentiated or less completely differentiated cells, such as, for example, stem cells of blood or skin fibroblasts. In vivo muscle cells are particularly competent in their ability to take up and express polynucleotides.

[0463] For the naked nucleic acid sequence injection, an effective dosage amount of DNA or RNA will be in the range of from about 0.05 mg/kg body weight to about 50 mg/kg body weight. Preferably the dosage will be from about 0.005 mg/kg to about 20 mg/kg and more preferably from about 0.05 mg/kg to about 5 mg/kg. Of course, as the artisan of ordinary skill will appreciate, this dosage will vary according to the tissue site of injection. The appropriate and effective dosage of nucleic acid sequence can readily be determined by those of ordinary skill in the art and may depend on the condition being treated and the route of administration.

[0464] The preferred route of administration is by the parenteral route of injection into the interstitial space of tissues. However, other parenteral routes may also be used, such as, inhalation of an aerosol formulation particularly for delivery to lungs or bronchial tissues, throat or mucous membranes of the nose. In addition, naked DNA constructs can be delivered to arteries during angioplasty by the catheter used in the procedure.

[0465] The naked polynucleotides are delivered by any method known in the art, including, but not limited to, direct needle injection at the delivery site, intravenous injection, topical administration, catheter infusion, and so-called “gene guns”. These delivery methods are known in the art.

[0466] The constructs may also be delivered with delivery vehicles such as viral sequences, viral particles, liposome formulations, lipofectin, precipitating agents, etc. Such methods of delivery are known in the art.

[0467] In certain embodiments, the polynucleotide constructs are complexed in a liposome preparation. Liposomal preparations for use in the instant invention include cationic (positively charged), anionic (negatively charged) and neutral preparations. However, cationic liposomes are particularly preferred because a tight charge complex can be formed between the cationic liposome and the polyanionic nucleic acid. Cationic liposomes have been shown to mediate intracellular delivery of plasmid DNA (Felgner et al., Proc. Natl. Acad. Sci. USA (1987) 84:7413-7416, which is herein incorporated by reference); mRNA (Malone et al., Proc. Natl. Acad. Sci. USA (1989) 86:6077-6081, which is herein incorporated by reference); and purified transcription factors (Debs et al., J. Biol. Chem. (1990) 265:10189-10192, which is herein incorporated by reference), in functional form.

[0468] Cationic liposomes are readily available. For example, N[1-2,3-dioleyloxy)propyl]-N,N,N-triethylammonium (DOTMA) liposomes are particularly useful and are available under the trademark Lipofectin, from GIBCO BRL, Grand Island, N.Y., (see, also, Felgner et al., Proc. Natl Acad. Sci. USA (1987) 84:7413-7416, which is herein incorporated by reference). Other commercially available liposomes include transfectace (DDAB/DOPE) and DOTAP/DOPE (Boehringer).

[0469] Other cationic liposomes can be prepared from readily available materials using techniques well known in the art. See, e.g. PCT Publication No. WO 90/11092 (which is herein incorporated by reference) for a description of the synthesis of DOTAP (1,2-bis(oleoyloxy)-3-(trimethylammonio)propane) liposomes. Preparation of DOTMA liposomes is explained in the literature, see, e.g., P. Felgner et al., Proc. Natl. Acad. Sci. USA 84:7413-7417, which is herein incorporated by reference. Similar methods can be used to prepare liposomes from other cationic lipid materials.

[0470] Similarly, anionic and neutral liposomes are readily available, such as from Avanti Polar Lipids (Birmingham, Ala.), or can be easily prepared using readily available materials. Such materials include phosphatidyl, choline, cholesterol, phosphatidyl ethanolamine, dioleoylphosphatidyl choline (DOPC), dioleoylphosphatidyl glycerol (DOPG), dioleoylphoshatidyl ethanolamine (DOPE), among others. These materials can also be mixed with the DOTMA and DOTAP starting materials in appropriate ratios. Methods for making liposomes using these materials are well known in the art.

[0471] For example, commercially dioleoylphosphatidyl choline (DOPC), dioleoylphosphatidyl glycerol (DOPG), and dioleoylphosphatidyl ethanolamine (DOPE) can be used in various combinations to make conventional liposomes, with or without the addition of cholesterol. Thus, for example, DOPG/DOPC vesicles can be prepared by drying 50 mg each of DOPG and DOPC under a stream of nitrogen gas into a sonication vial. The sample is placed under a vacuum pump overnight and is hydrated the following day with deionized water. The sample is then sonicated for 2 hours in a capped vial, using a Heat Systems model 350 sonicator equipped with an inverted cup (bath type) probe at the maximum setting while the bath is circulated at 15EC. Alternatively, negatively charged vesicles can be prepared without sonication to produce multilamellar vesicles or by extrusion through nucleopore membranes to produce unilamellar vesicles of discrete size. Other methods are known and available to those of skill in the art.

[0472] The liposomes can comprise multilamellar vesicles (MLVs), small unilamellar vesicles (SUVs), or large unilamellar vesicles (LUVs), with SUVs being preferred. The various liposome-nucleic acid complexes are prepared using methods well known in the art. See, e.g., Straubinger et al., Methods of Immunology (1983), 101:512-527, which is herein incorporated by reference. For example, MLVs containing nucleic acid can be prepared by depositing a thin film of phospholipid on the walls of a glass tube and subsequently hydrating with a solution of the material to be encapsulated. SUVs are prepared by extended sonication of MLVs to produce a homogeneous population of unilamellar liposomes. The material to be entrapped is added to a suspension of preformed MLVs and then sonicated. When using liposomes containing cationic lipids, the dried lipid film is resuspended in an appropriate solution such as sterile water or an isotonic buffer solution such as 10 mM Tris/NaCl, sonicated, and then the preformed liposomes are mixed directly with the DNA. The liposome and DNA form a very stable complex due to binding of the positively charged liposomes to the cationic DNA. SUVs find use with small nucleic acid fragments. LUVs are prepared by a number of methods, well known in the art. Commonly used methods include Ca²+-EDTA chelation (Papahadjopoulos et al., Biochim. Biophys. Acta (1975) 394:483; Wilson et al., Cell 17:77 (1979); ether injection (Deamer, D. and Bangham, A., Biochim. Biophys. Acta 443:629 (1976); Ostro et al., Biochem. Biophys. Res. Commun. 76:836 (1977); Fraley et al., Proc. Natl. Acad. Sci. USA 76:3348 (1979)); detergent dialysis (Enoch, H. and Strittmatter, P., Proc. Natl. Acad. Sci. USA 76:145 (1979)); and reverse-phase evaporation (REV) (Fraley et al., J. Biol. Chem. 255:10431 (1980); Szoka et al., Proc. Natl. Acad. Sci. USA 75:145 (1978); Schaefer-Ridder et al., Science 215:166 (1982)), which are herein incorporated by reference.

[0473] Generally, the ratio of DNA to liposomes will be from about 10:1 to about 1:10. Preferably, the ration will be from about 5:1 to about 1:5. More preferably, the ration will be about 3:1 to about 1:3. Still more preferably, the ratio will be about 1:1.

[0474] U.S. Pat. No. 5,676,954 (which is herein incorporated by reference) reports on the injection of genetic material, complexed with cationic liposomes carriers, into mice. U.S. Pat. Nos. 4,897,355, 4,946,787, 5,049,386, 5,459,127, 5,589,466, 5,693,622, 5,580,859, 5,703,055, and international publication no. WO 94/9469 (which are herein incorporated by reference) provide cationic lipids for use in transfecting DNA into cells and mammals. U.S. Pat. Nos. 5,589,466, 5,693,622, 5,580,859, 5,703,055, and International Publication No. WO 94/9469 provide methods for delivering DNA-cationic lipid complexes to mammals.

[0475] In certain embodiments, cells are engineered, ex vivo or in vivo, using a retroviral particle containing RNA, which comprises a sequence encoding a polypeptide of the present invention. Retroviruses from which the retroviral plasmid vectors may be derived include, but are not limited to, Moloney Murine Leukemia Virus, spleen necrosis virus, Rous sarcoma Virus, Harvey Sarcoma Virus, avian leukosis virus, gibbon ape leukemia virus, human immunodeficiency virus, Myeloproliferative Sarcoma Virus, and mammary tumor virus.

[0476] The retroviral plasmid vector is employed to transduce packaging cell lines to form producer cell lines. Examples of packaging cells which may be transfected include, but are not limited to, the PE501, PA317, R-2, R-AM, PA12, T19-14X, VT-19-17-H2, RCRE, RCRIP, GP+E-86, GP+envAm12, and DAN cell lines as described in Miller, Human Gene Therapy 1:5-14 (1990), which is incorporated herein by reference in its entirety. The vector may transduce the packaging cells through any means known in the art. Such means include, but are not limited to, electroporation, the use of liposomes, and CaPO₄ precipitation. In one alternative, the retroviral plasmid vector may be encapsulated into a liposome, or coupled to a lipid, and then administered to a host.

[0477] The producer cell line generates infectious retroviral vector particles, which include polynucleotide encoding a polypeptide of the present invention. Such retroviral vector particles then may be employed, to transduce eukaryotic cells, either in vitro or in vivo. The transduced eukaryotic cells will express a polypeptide of the present invention.

[0478] In certain other embodiments, cells are engineered, ex vivo or in vivo, with polynucleotide contained in an adenovirus vector. Adenovirus can be manipulated such that it encodes and expresses a polypeptide of the present invention, and at the same time is inactivated in terms of its ability to replicate in a normal lytic viral life cycle. Adenovirus expression is achieved without integration of the viral DNA into the host cell chromosome, thereby alleviating concerns about insertional mutagenesis. Furthermore, adenoviruses have been used as live enteric vaccines for many years with an excellent safety profile (Schwartz, et al., Am. Rev. Respir. Dis.109:233-238 (1974)). Finally, adenovirus mediated gene transfer has been demonstrated in a number of instances including transfer of alpha-1-antitrypsin and CFTR to the lungs of cotton rats (Rosenfeld et al., Science 252:431-434 (1991); Rosenfeld et al., Cell 68:143-155 (1991)). Furthermore, extensive studies to attempt to establish adenovirus as a causative agent in human cancer were uniformly negative (Green et al., Proc. Natl. Acad. Sci. USA 76:6606 (1979)).

[0479] Suitable adenoviral vectors useful in the present invention are described, for example, in Kozarsky and Wilson, Curr. Opin. Genet. Devel. 3:499-503 (1993); Rosenfeld et al., Cell 68:143-155 (1992); Engelhardt et al., Human Genet. Ther. 4:759-769 (1993); Yang et al., Nature Genet. 7:362-369 (1994); Wilson et al., Nature 365:691-692 (1993); and U.S. Pat. No. 5,652,224, which are herein incorporated by reference. For example, the adenovirus vector Ad2 is useful and can be grown in human 293 cells. These cells contain the E1 region of adenovirus and constitutively express E1a and E1b, which complement the defective adenoviruses by providing the products of the genes deleted from the vector. In addition to Ad2, other varieties of adenovirus (e.g., Ad3, Ad5, and Ad7) are also useful in the present invention.

[0480] Preferably, the adenoviruses used in the present invention are replication deficient. Replication deficient adenoviruses require the aid of a helper virus and/or packaging cell line to form infectious particles. The resulting virus is capable of infecting cells and can express a polynucleotide of interest which is operably linked to a promoter, but cannot replicate in most cells. Replication deficient adenoviruses may be deleted in one or more of all or a portion of the following genes: E1a, E1b, E3, E4, E2a, or L1 through L5.

[0481] In certain other embodiments, the cells are engineered, ex vivo or in vivo, using an adeno-associated virus (AAV). AAVs are naturally occurring defective viruses that require helper viruses to produce infectious particles (Muzyczka, N., Curr. Topics in Microbiol. Immunol. 158:97 (1992)). It is also one of the few viruses that may integrate its DNA into non-dividing cells. Vectors containing as little as 300 base pairs of AAV can be packaged and can integrate, but space for exogenous DNA is limited to about 4.5 kb. Methods for producing and using such AAVs are known in the art. See, for example, U.S. Pat. Nos. 5,139,941, 5,173,414, 5,354,678, 5,436,146, 5,474,935, 5,478,745, and 5,589,377.

[0482] For example, an appropriate AAV vector for use in the present invention will include all the sequences necessary for DNA replication, encapsidation, and host-cell integration. The polynucleotide construct is inserted into the AAV vector using standard cloning methods, such as those found in Sambrook et al., Molecular Cloning: A Laboratory Manual, Cold Spring Harbor Press (1989). The recombinant AAV vector is then transfected into packaging cells which are infected with a helper virus, using any standard technique, including lipofection, electroporation, calcium phosphate precipitation, etc. Appropriate helper viruses include adenoviruses, cytomegaloviruses, vaccinia viruses, or herpes viruses. Once the packaging cells are transfected and infected, they will produce infectious AAV viral particles, which contain the polynucleotide construct. These viral particles are then used to transduce eukaryotic cells, either ex vivo or in vivo. The transduced cells will contain the polynucleotide construct integrated into its genome, and will express a polypeptide of the invention.

[0483] Another method of gene therapy involves operably associating heterologous control regions and endogenous cardiovascular system antigen polynucleotide sequences (e.g., encoding a cardiovascular system antigen polypeptide of the present invention) via homologous recombination (see, e.g., U.S. Pat. No. 5,641,670, issued Jun. 24, 1997; International Publication No. WO 96/29411, published Sep. 26, 1996; International Publication No. WO 94/12650, published Aug. 4, 1994; Koller et al., Proc. Natl. Acad. Sci. USA 86:8932-8935 (1989); and Zijlstra et al., Nature 342:435-438 (1989), which are herein incorporated by reference. This method involves the activation of a gene which is present in the target cells, but which is not normally expressed in the cells, or is expressed at a lower level than desired.

[0484] Polynucleotide constructs are made, using standard techniques known in the art, which contain the promoter with targeting sequences flanking the promoter. Suitable promoters are described herein. The targeting sequence is sufficiently complementary to an endogenous sequence to permit homologous recombination of the promoter-targeting sequence with the endogenous sequence. The targeting sequence will be sufficiently near the 5′ end of the desired endogenous polynucleotide sequence so the promoter will be operably linked to the endogenous sequence upon homologous recombination.

[0485] The promoter and the targeting sequences can be amplified using PCR. Preferably, the amplified promoter contains distinct restriction enzyme sites on the 5′ and 3′ ends. Preferably, the 3′ end of the first targeting sequence contains the same restriction enzyme site as the 5′ end of the amplified promoter and the 5′ end of the second targeting sequence contains the same restriction site as the 3′ end of the amplified promoter. The amplified promoter and targeting sequences are digested and ligated together.

[0486] The promoter-targeting sequence construct is delivered to the cells, either as naked polynucleotide, or in conjunction with transfection-facilitating agents, such as liposomes, viral sequences, viral particles, whole viruses, lipofection, precipitating agents, etc., described in more detail above. The P promoter-targeting sequence can be delivered by any method, included direct needle injection, intravenous injection, topical administration, catheter infusion, particle accelerators, etc. The methods are described in more detail below.

[0487] The promoter-targeting sequence construct is taken up by cells. Homologous recombination between the construct and the endogenous sequence takes place, such that an endogenous sequence is placed under the control of the promoter. The promoter then drives the expression of the endogenous sequence.

[0488] The polynucleotide encoding a polypeptide of the present invention may contain a secretory signal sequence that facilitates secretion of the protein. Typically, the signal sequence is positioned in the coding region of the polynucleotide to be expressed towards or at the 5′ end of the coding region. The signal sequence may be homologous or heterologous to the cardiovascular system antigen polynucleotide of interest and may be homologous or heterologous to the cells to be transfected. Additionally, the signal sequence may be chemically synthesized using methods known in the art.

[0489] Any mode of administration of any of the above-described polynucleotides constructs can be used so long as the mode results in the expression of one or more molecules in an amount sufficient to provide a therapeutic effect. This includes direct needle injection, systemic injection, catheter infusion, biolistic injectors, particle accelerators (i.e., “gene guns”), gelfoam sponge depots, other commercially available depot materials, osmotic pumps (e.g., Alza minipumps), oral or suppositorial solid (tablet or pill) pharmaceutical formulations, and decanting or topical applications during surgery. For example, direct injection of naked calcium phosphate-precipitated plasmid into rat liver and rat spleen or a protein-coated plasmid into the portal vein has resulted in gene expression of the foreign gene in the rat livers (Kaneda et al., Science 243:375 (1989)).

[0490] A preferred method of local administration is by direct injection. Preferably, a recombinant molecule of the present invention complexed with a delivery vehicle is administered by direct injection into or locally within the area of arteries. Administration of a composition locally within the area of arteries refers to injecting the composition centimeters and preferably, millimeters within arteries.

[0491] Another method of local administration is to contact a polynucleotide construct of the present invention in or around a surgical wound. For example, a patient can undergo surgery and the polynucleotide construct can be coated on the surface of tissue inside the wound or the construct can be injected into areas of tissue inside the wound.

[0492] Therapeutic compositions useful in systemic administration, include recombinant molecules of the present invention complexed to a targeted delivery vehicle of the present invention. Suitable delivery vehicles for use with systemic administration comprise liposomes comprising ligands for targeting the vehicle to a particular site. In specific embodiments, suitable delivery vehicles for use with systemic administration comprise liposomes comprising polypeptides of the invention for targeting the vehicle to a particular site.

[0493] Preferred methods of systemic administration, include intravenous injection, aerosol, oral and percutaneous (topical) delivery. Intravenous injections can be performed using methods standard in the art. Aerosol delivery can also be performed using methods standard in the art (see, for example, Stribling et al., Proc. Natl. Acad. Sci. USA 189:11277-11281, 1992, which is incorporated herein by reference). Oral delivery can be performed by complexing a polynucleotide construct of the present invention to a carrier capable of withstanding degradation by digestive enzymes in the gut of an animal. Examples of such carriers, include plastic capsules or tablets, such as those known in the art. Topical delivery can be performed by mixing a polynucleotide construct of the present invention with a lipophilic reagent (e.g., DMSO) that is capable of passing into the skin

[0494] Determining an effective amount of substance to be delivered can depend upon a number of factors including, for example, the chemical structure and biological activity of the substance, the age and weight of the animal, the precise condition requiring treatment and its severity, and the route of administration. The frequency of treatments depends upon a number of factors, such as the amount of polynucleotide constructs administered per dose, as well as the health and history of the subject. The precise amount, number of doses, and timing of doses will be determined by the attending physician or veterinarian.

[0495] Therapeutic compositions of the present invention can be administered to any animal, preferably to mammals and birds. Preferred mammals include humans, dogs, cats, mice, rats, rabbits sheep, cattle, horses and pigs, with humans being particularly preferred.

[0496] Biological Activities

[0497] Polynucleotides or polypeptides, or agonists or antagonists of the present invention, can be used in assays to test for one or more biological activities. If these polynucleotides or polypeptides, or agonists or antagonists of the present invention, do exhibit activity in a particular assay, it is likely that these molecules may be involved in the diseases associated with the biological activity. Thus, the polynucleotides and polypeptides, and agonists or antagonists could be used to treat, prevent diagnose and/or prognose the associated disease.

[0498] The cardiovascular system antigen polynucleotides and polypeptides of the invention are predicted to have predominant expression in cardiovascular system tissues.

[0499] Thus, the cardiovascular system antigens of the invention may be useful as therapeutic molecules. Each would be useful for diagnosis, detection, treatment and/or prevention of diseases or disorders of the cardiovascular system, including but not limited to cardiovascular abnormalities (e.g., congenital heart defects, cerebral arteriovenous malformations, and septal defects), heart disease (e.g., heart failure, cardiomyopathy, pericarditis, and endocarditis), arrhythmias, heart valve disease (e.g., stenosis, regurgitation, and prolapse), vascular diseases (e.g., arteriosclerosis, coronary artery disease, angina, varicose veins, hypertension, and shock), electrolyte imbalance disorders (e.g., hypo- and hypernatremia, and hypo- and hyperkalemia), and/or as described under “Cardiovascular Disorders” below.

[0500] In a preferred embodiment, polynucleotides of the invention (e.g., a nucleic acid sequence of SEQ ID NO:X or the complement thereof; or the cDNA sequence contained in Clone ID NO:Z, or fragments or variants thereof) and/or polypeptides of the invention (e.g., an amino acid sequence contained in SEQ ID NO:Y, an amino acid sequence encoded by SEQ ID NO:X, or the complement thereof, an amino acid sequence encoded by the cDNA sequence contained in Clone ID NO:Z and fragments or variants thereof as described herein) are useful for the diagnosis, detection, treatment, and/or prevention of diseases or disorders of the tissues/cells corresponding to the library source disclosed in column 7 of Table 1A expressing the corresponding cardiovascular system sequence disclosed in the same row of Table 1A.

[0501] Particularly, the cardiovascular system antigens may be a useful therapeutic for cancer of cardiovascular system tissues. Treatment, diagnosis, detection, and/or prevention of cardiovascular system disorders could be carried out using a cardiovascular system antigen or soluble form of a cardiovascular system antigen, a cardiovascular system antigen ligand, gene therapy, or ex vivo applications. Moreover, inhibitors of a cardiovascular system antigen, either blocking antibodies or mutant forms, could modulate the expression of the cardiovascular system antigen. These inhibitors may be useful to treat, diagnose, detect, and/or prevent diseases associated with the misregulation of a cardiovascular system antigen.

[0502] In one embodiment, the invention provides a method for the specific delivery of compositions of the invention to cells (e.g., normal or diseased cardiovascular system cells) by administering polypeptides of the invention (e.g., cardiovascular system antigen polypeptides or anti-cardiovascular system antigen antibodies) that are associated with heterologous polypeptides or nucleic acids. In one example, the invention provides a method for delivering a therapeutic protein into the targeted cell (e.g., an aberrant cardiovascular system cell or cardiovascular system cancer cell). In another example, the invention provides a method for delivering a single stranded nucleic acid (e.g., antisense or ribozymes) or double stranded nucleic acid (e.g., DNA that can integrate into the cell's genome or replicate episomally and that can be transcribed) into the targeted cell.

[0503] In another embodiment, the invention provides a method for the specific destruction of cells (e.g., the destruction of aberrant cardiovascular system cells, including, but not limited to, cardiovascular system tumor cells) by administering polypeptides of the invention (e.g., cardiovascular system antigen polypeptides or fragments thereof, or anti-cardiovascular system antigen antibodies) in association with toxins or cytotoxic prodrugs.

[0504] By “toxin” is meant compounds that bind and activate endogenous cytotoxic effector systems, radioisotopes, holotoxins, modified toxins, catalytic subunits of toxins, cytotoxins (cytotoxic agents), or any molecules or enzymes not normally present in or on the surface of a cell that under defined conditions cause the cell's death. Toxins that may be used according to the methods of the invention include, but are not limited to, radioisotopes known in the art, compounds such as, for example, antibodies (or complement fixing containing portions thereof) that bind an inherent or induced endogenous cytotoxic effector system, thymidine kinase, endonuclease, RNAse, alpha toxin, ricin, abrin, Pseudomonas exotoxin A, diphtheria toxin, saporin, momordin, gelonin, pokeweed antiviral protein, alpha-sarcin and cholera toxin. “Toxin” also includes a cytostatic or cytocidal agent, a therapeutic agent or a radioactive metal ion, e.g., alpha-emitters such as, for example, ²¹³Bi, or other radioisotopes such as, for example, ¹⁰³Pd, ¹³³Xe, ¹³¹I, ⁶⁸Ge, ⁵⁷Co, ⁶⁵Zn, ⁸⁵Sr, ³²P, ³⁵S, ⁹⁰Y, ¹⁵³Sm, ¹⁵³Gd, 169Yb, ⁵¹Cr, ⁵⁴Mn, ⁷⁵Se, ¹¹³Sn, ⁹⁰Yttrium, ¹¹⁷Tin, ¹⁸⁶Rhenium, ¹⁶⁶Holmium, and ¹⁸⁸Rhenium; luminescent labels, such as luminol; and fluorescent labels, such as fluorescein and rhodamine, and biotin.

[0505] Techniques known in the art may be applied to label antibodies of the invention. Such techniques include, but are not limited to, the use of bifunctional conjugating agents (see e.g., U.S. Pat. Nos. 5,756,065; 5,714,631; 5,696,239; 5,652,361; 5,505,931; 5,489,425; 5,435,990; 5,428,139; 5,342,604; 5,274,119; 4,994,560; and 5,808,003; the contents of each of which are hereby incorporated by reference in its entirety). A cytotoxin or cytotoxic agent includes any agent that is detrimental to cells. Examples include paclitaxol, cytochalasin B, gramicidin D, ethidium bromide, emetine, mitomycin, etoposide, tenoposide, vincristine, vinblastine, colchicin, doxorubicin, daunorubicin, dihydroxy anthracin dione, mitoxantrone, mithramycin, actinomycin D, 1-dehydrotestosterone, glucocorticoids, procaine, tetracaine, lidocaine, propranolol, and puromycin and analogs or homologs thereof. Therapeutic agents include, but are not limited to, antimetabolites (e.g., methotrexate, 6-mercaptopurine, 6-thioguanine, cytarabine, 5-fluorouracil decarbazine), alkylating agents (e.g., mechlorethamine, thioepa chlorambucil, melphalan, carmustine (BSNU) and lomustine (CCNU), cyclothosphamide, busulfan, dibromomannitol, streptozotocin, mitomycin C, and cis-dichlorodiamine platinum (II) (DDP) cisplatin), anthracyclines (e.g., daunorubicin (formerly daunomycin) and doxorubicin), antibiotics (e.g., dactinomycin (formerly actinomycin), bleomycin, mithramycin, and anthramycin (AMC)), and anti-mitotic agents (e.g., vincristine and vinblastine).

[0506] By “cytotoxic prodrug” is meant a non-toxic compound that is converted by an enzyme, normally present in the cell, into a cytotoxic compound. Cytotoxic prodrugs that may be used according to the methods of the invention include, but are not limited to, glutamyl derivatives of benzoic acid mustard alkylating agent, phosphate derivatives of etoposide or mitomycin C, cytosine arabinoside, daunorubisin, and phenoxyacetamide derivatives of doxorubicin.

[0507] It will be appreciated that conditions caused by a decrease in the standard or normal level of a cardiovascular system antigen activity in an individual, particularly disorders of the cardiovascular system, can be treated by administration of a cardiovascular system antigen polypeptide (e.g., such as, for example, the complete cardiovascular system antigen polypeptide, the soluble form of the extracellular domain of a cardiovascular system antigen polypeptide, or cells expressing the complete protein) or agonist. Thus, the invention also provides a method of treatment of an individual in need of an increased level of cardiovascular system antigen activity comprising administering to such an individual a pharmaceutical composition comprising an amount of an isolated cardiovascular system antigen polypeptide of the invention, or agonist thereof (e.g., an agonistic anti-cardiovascular system antigen antibody), effective to increase the cardiovascular system antigen activity level in such an individual.

[0508] It will also be appreciated that conditions caused by a increase in the standard or normal level of cardiovascular system antigen activity in an individual, particularly disorders of the cardiovascular system, can be treated by administration of cardiovascular system antigen polypeptides (e.g., such as, for example, the complete cardiovascular system antigen polypeptide, the soluble form of the extracellular domain of a cardiovascular system antigen polypeptide, or-cells expressing the complete protein) or antagonist (e.g., an antagonistic cardiovascular system antigen antibody). Thus, the invention also provides a method of treatment of an individual in need of an decreased level of cardiovascular system antigen activity comprising administering to such an individual a pharmaceutical composition comprising an amount of an isolated cardiovascular system antigen polypeptide of the invention, or antagonist thereof (e.g., an antagonistic anti-cardiovascular system antigen antibody), effective to decrease the cardiovascular system antigen activity level in such an individual.

[0509] In certain embodiments, a polypeptide of the invention, or polynucleotides, antibodies, agonists, or antagonists corresponding to that polypeptide, may be used to diagnose and/or prognose diseases and/or disorders associated with the tissue(s) in which the polypeptide of the invention is expressed, including one, two, three, four, five, or more tissues disclosed in Table 1A, column 7 (Tissue Distribution Library Code).

[0510] More generally, polynucleotides, translation products and antibodies corresponding to this gene may be useful for the diagnosis, prognosis, prevention, and/or treatment of diseases and/or disorders associated with the following systems.

[0511] Cardiovascular Disorders

[0512] Polynucleotides or polypeptides, or agonists or antagonists of the present invention, may be used to treat, prevent, diagnose, and/or prognose cardiovascular disorders, including, but not limited to, peripheral artery disease, such as limb ischemia.

[0513] Cardiovascular disorders include cardiovascular abnormalities, such as arterio-arterial fistula, arteriovenous fistula, cerebral arteriovenous malformations, congenital heart defects, pulmonary atresia, and Scimitar Syndrome. Congenital heart defects include aortic coarctation, cor triatriatum, coronary vessel anomalies, crisscross heart, dextrocardia, patent ductus arteriosus, Ebstein's anomaly, Eisenmenger complex, hypoplastic left heart syndrome, levocardia, tetralogy of fallot, transposition of great vessels, double outlet right ventricle, tricuspid atresia, persistent truncus arteriosus, total anomalous pulmonary venous connection, hypoplastic left heart syndrome, and heart septal defects, such as aortopulmonary septal defect, endocardial cushion defects, Lutembacher's Syndrome, atrioventricular canal defect, trilogy of Fallot, ventricular heart septal defects.

[0514] Cardiovascular disorders also include heart disease, such as arrhythmias, carcinoid heart disease, high cardiac output, low cardiac output, cardiac tamponade, endocarditis (including bacterial), heart aneurysm, cardiac arrest, sudden cardiac death, congestive heart failure, congestive cardiomyopathy, paroxysmal dyspnea, cardiac edema, heart hypertrophy, congestive cardiomyopathy, left ventricular hypertrophy, right ventricular hypertrophy, post-infarction heart rupture, ventricular septal rupture, heart valve diseases, myocardial diseases, myocardial ischemia, pericardial effusion, pericarditis (including constrictive and tuberculous), pneumopericardium, postpericardiotomy syndrome, pulmonary heart disease, rheumatic heart disease, ventricular dysfunction, hyperemia, cardiovascular pregnancy complications, Scimitar Syndrome, diastolic dysfunction, enlarged heart, heart block, J-curve phenomenon, rheumatic heart disease, Marfan syndrome, cardiovascular syphilis, and cardiovascular tuberculosis.

[0515] Arrhythmias include sinus arrhythmia, atrial fibrillation, atrial flutter, bradycardia, extrasystole, Adams-Stokes Syndrome, bundle-branch block, sinoatrial block, long QT syndrome, parasystole, Lown-Ganong-Levine Syndrome, Mahaim-type pre-excitation syndrome, Wolff-Parkinson-White syndrome, sick sinus syndrome, tachycardias, and ventricular fibrillation. Tachycardias include paroxysmal tachycardia, supraventricular tachycardia, accelerated idioventricular rhythm, atrioventricular nodal reentry tachycardia, ectopic atrial tachycardia, ectopic junctional tachycardia, sinoatrial nodal reentry tachycardia, sinus tachycardia, Torsades de Pointes, and ventricular tachycardia.

[0516] Heart valve disease include aortic valve insufficiency, aortic valve stenosis, heart murmurs, aortic valve prolapse, mitral valve prolapse, tricuspid valve prolapse, mitral valve insufficiency, mitral valve stenosis, pulmonary atresia, pulmonary valve insufficiency, pulmonary valve stenosis, tricuspid atresia, tricuspid valve insufficiency, tricuspid valve stenosis, and bicuspid aortic valve.

[0517] Myocardial diseases include alcoholic cardiomyopathy, congestive cardiomyopathy, hypertrophic cardiomyopathy, aortic subvalvular stenosis, pulmonary subvalvular stenosis, restrictive cardiomyopathy, Chagas cardiomyopathy, endocardial fibroelastosis, endomyocardial fibrosis, Kearns Syndrome, Barth syndrome, myocardial reperfusion injury, and myocarditis.

[0518] Myocardial ischemias include coronary disease, such as angina pectoris, Prinzmetal's angina, unstable angina, coronary aneurysm, coronary arteriosclerosis, coronary thrombosis, coronary vasospasm, myocardial infarction and myocardial stunning.

[0519] Cardiovascular diseases also include vascular diseases such as aneurysms, angiodysplasia, angiomatosis, bacillary angiomatosis, Hippel-Lindau Disease, Klippel-Trenaunay-Weber Syndrome, Sturge-Weber Syndrome, angioneurotic edema, aortic diseases, Takayasu's Arteritis, aortitis, Leriche's Syndrome, arterial occlusive diseases, arteritis, enarteritis, polyarteritis nodosa, cerebrovascular disorders, diabetic angiopathies, diabetic retinopathy, embolisms, thrombosis, erythromelalgia, hemorrhoids, hepatic veno-occlusive disease, hypertension, hypotension (shock), ischemia, peripheral vascular diseases, phlebitis, superficial phlebitis, pulmonary veno-occlusive disease, chronic obstructive pulmonary disease, Buerger's disease, Raynaud's disease, CREST syndrome, retinal vein occlusion, Scimitar syndrome, superior vena cava syndrome, telangiectasia, atacia telangiectasia, hereditary hemorrhagic telangiectasia, deep vein thrombosis, varicocele, varicose veins, varicose ulcer, vasculitis, and venous insufficiency.

[0520] Aneurysms include dissecting aneurysms, false aneurysms, infected aneurysms, ruptured aneurysms, aortic aneurysms, cerebral aneurysms, coronary aneurysms, heart aneurysms, and iliac aneurysms.

[0521] Arterial occlusive diseases include arteriosclerosis, arteriolosclerosis, atherosclerosis, intermittent claudication, carotid stenosis, fibromuscular dysplasias, mesenteric vascular occlusion, Moyamoya disease, renal artery obstruction, retinal artery occlusion, and thromboanguitis obliterans.

[0522] Cerebrovascular disorders include carotid artery diseases, cerebral amyloid angiopathy, cerebral aneurysm, cerebral anoxia, cerebral arteriosclerosis, cerebral arteriovenous malformation, cerebral artery diseases, cerebral embolism and thrombosis, carotid artery thrombosis, sinus thrombosis, Wallenberg's syndrome, cerebral hemorrhage, epidural hematoma, subdural hematoma, subaraxhnoid hemorrhage, cerebral infarction, cerebral ischemia (including transient), subclavian steal syndrome, periventricular leukomalacia, vascular headache, cluster headache, migraine, and vertebrobasilar insufficiency.

[0523] Embolisms include air embolisms, amniotic fluid embolisms, cholesterol embolisms, blue toe syndrome, fat embolisms, pulmonary embolisms, and thromoboembolisms. Thrombosis include coronary thrombosis, hepatic vein thrombosis, deep vein thrombosis, retinal vein occlusion, carotid artery thrombosis, sinus thrombosis, Wallenberg's syndrome, and thrombophlebitis.

[0524] Ischemia includes cerebral ischemia, ischemic colitis, silent ischemia, compartment syndromes, anterior compartment syndrome, myocardial ischemia, reperfusion injuries, and peripheral limb ischemia. Vasculitis includes aortitis, arteritis, Behcet's Syndrome, Churg-Strauss Syndrome, mucocutaneous lymph node syndrome, thromboangiitis obliterans, hypersensitivity vasculitis, Schoenlein-Henoch purpura, allergic cutaneous vasculitis, and Wegener's granulomatosis.

[0525] Cardiovascular diseases can also occur due to electrolyte imbalances that include, but are not limited to hyponatremia, hypernatremia, hypokalemia, hyperkalemia, hypocalcemia, hypercalcemia, hypophosphatemia, and hyperphophatemia. Neoplasm and/or cancers of the cardiovascular system include, but are not limited to, myxomas, fibromas, and rhabdomyomas.

[0526] Polypeptides may be administered using any method known in the art, including, but not limited to, direct needle injection at the delivery site, intravenous injection, topical administration, catheter infusion, biolistic injectors, particle accelerators, gelfoam sponge depots, other commercially available depot materials, osmotic pumps, oral or suppositorial solid pharmaceutical formulations, decanting or topical applications during surgery, aerosol delivery. Such methods are known in the art. Polypeptides may be administered as part of a Therapeutic, described in more detail below. Methods of delivering polynucleotides are described in more detail herein.

[0527] Blood-Related Disorders

[0528] The polynucleotides, polypeptides, antibodies, and/or agonists or antagonists of the present invention may be used to modulate hemostatic (the stopping of bleeding) or thrombolytic (clot dissolving) activity. For example, by increasing hemostatic or thrombolytic activity, polynucleotides or polypeptides, and/or agonists or antagonists of the present invention could be used to treat or prevent blood coagulation diseases, disorders, and/or conditions (e.g., afibrinogenemia, factor deficiencies, hemophilia), blood platelet diseases, disorders, and/or conditions (e.g., thrombocytopenia), or wounds resulting from trauma, surgery, or other causes. Alternatively, polynucleotides, polypeptides, antibodies, and/or agonists or antagonists of the present invention that can decrease hemostatic or thrombolytic activity could be used to inhibit or dissolve clotting. These molecules could be important in the treatment or prevention of heart attacks (infarction), strokes, or scarring.

[0529] In specific embodiments, the polynucleotides, polypeptides, antibodies, and/or agonists or antagonists of the present invention may be used to prevent, diagnose, prognose, and/or treat thrombosis, arterial thrombosis, venous thrombosis, thromboembolism, pulmonary embolism, atherosclerosis, myocardial infarction, transient ischemic attack, unstable angina. In specific embodiments, the polynucleotides, polypeptides, antibodies, and/or agonists or antagonists of the present invention may be used for the prevention of occulsion of saphenous grafts, for reducing the risk of periprocedural thrombosis as might accompany angioplasty procedures, for reducing the risk of stroke in patients with atrial fibrillation including nonrheumatic atrial fibrillation, for reducing the risk of embolism associated with mechanical heart valves and or mitral valves disease. Other uses for the polynucleotides, polypeptides, antibodies, and/or agonists or antagonists of the present invention, include, but are not limited to, the prevention of occlusions in extrcorporeal devices (e.g., intravascular canulas, vascular access shunts in hemodialysis patients, hemodialysis machines, and cardiopulmonary bypass machines).

[0530] In another embodiment, a polypeptide of the invention, or polynucleotides, antibodies, agonists, or antagonists corresponding to that polypeptide, may be used to prevent, diagnose, prognose, and/or treat diseases and disorders of the blood and/or blood forming organs associated with the tissue(s) in which the polypeptide of the invention is expressed, including one, two, three, four, five, or more tissues disclosed in Table 1A, column 7 (Tissue Distribution Library Code).

[0531] The polynucleotides, polypeptides, antibodies, and/or agonists or antagonists of the present invention may be used to modulate hematopoietic activity (the formation of blood cells). For example, the polynucleotides, polypeptides, antibodies, and/or agonists or antagonists of the present invention may be used to increase the quantity of all or subsets of blood cells, such as, for example, erythrocytes, lymphocytes (B or T cells), myeloid cells (e.g., basophils, eosinophils, neutrophils, mast cells, macrophages) and platelets. The ability to decrease the quantity of blood cells or subsets of blood cells may be useful in the prevention, detection, diagnosis and/or treatment of anemias and leukopenias described below. Alternatively, the polynucleotides, polypeptides, antibodies, and/or agonists or antagonists of the present invention may be used to decrease the quantity of all or subsets of blood cells, such as, for example, erythrocytes, lymphocytes (B or T cells), myeloid cells (e.g., basophils, eosinophils, neutrophils, mast cells, macrophages) and platelets. The ability to decrease the quantity of blood cells or subsets of blood cells may be useful in the prevention, detection, diagnosis and/or treatment of leukocytoses, such as, for example eosinophilia.

[0532] The polynucleotides, polypeptides, antibodies, and/or agonists or antagonists of the present invention may be used to prevent, treat, or diagnose blood dyscrasia.

[0533] Anemias are conditions in which the number of red blood cells or amount of hemoglobin (the protein that carries oxygen) in them is below normal. Anemia may be caused by excessive bleeding, decreased red blood cell production, or increased red blood cell destruction (hemolysis). The polynucleotides, polypeptides, antibodies, and/or agonists or antagonists of the present invention may be useful in treating, preventing, and/or diagnosing anemias. Anemias that may be treated prevented or diagnosed by the polynucleotides, polypeptides, antibodies, and/or agonists or antagonists of the present invention include iron deficiency anemia, hypochromic anemia, microcytic anemia, chlorosis, hereditary sideroblastic anemia, idiopathic acquired sideroblastic anemia, red cell aplasia, megaloblastic anemia (e.g., pernicious anemia, (vitamin B12 deficiency) and folic acid deficiency anemia), aplastic anemia, hemolytic anemias (e.g., autoimmune helolytic anemia, microangiopathic hemolytic anemia, and paroxysmal nocturnal hemoglobinuria). The polynucleotides, polypeptides, antibodies, and/or agonists or antagonists of the present invention may be useful in treating, preventing, and/or diagnosing anemias associated with diseases including but not limited to, anemias associated with systemic lupus erythematosus, cancers, lymphomas, chronic renal disease, and enlarged spleens. The polynucleotides, polypeptides, antibodies, and/or agonists or antagonists of the present invention may be useful in treating, preventing, and/or diagnosing anemias arising from drug treatments such as anemias associated with methyldopa, dapsone, and/or sulfadrugs. Additionally, the polynucleotides, polypeptides, antibodies, and/or agonists or antagonists of the present invention may be useful in treating, preventing, and/or diagnosing anemias associated with abnormal red blood cell architecture including but not limited to, hereditary spherocytosis, hereditary elliptocytosis, glucose-6-phosphate dehydrogenase deficiency, and sickle cell anemia.

[0534] The polynucleotides, polypeptides, antibodies, and/or agonists or antagonists of the present invention may be useful in treating, preventing, and/or diagnosing hemoglobin abnormalities, (e.g., those associated with sickle cell anemia, hemoglobin C disease, hemoglobin S-C disease, and hemoglobin E disease). Additionally, the polynucleotides, polypeptides, antibodies, and/or agonists or antagonists of the present invention may be useful in diagnosing, prognosing, preventing, and/or treating thalassemias, including, but not limited to major and minor forms of alpha-thalassemia and beta-thalassemia.

[0535] In another embodiment, the polynucleotides, polypeptides, antibodies, and/or agonists or antagonists of the present invention may be useful in diagnosing, prognosing, preventing, and/or treating bleeding disorders including, but not limited to, thrombocytopenia (e.g., idiopathic thrombocytopenic purpura, and thrombotic thrombocytopenic purpura), Von Willebrand's disease, hereditary platelet disorders (e.g., storage pool disease such as Chediak-Higashi and Hermansky-Pudlak syndromes, thromboxane A2 dysfunction, thromboasthenia, and Bernard-Soulier syndrome), hemolytic-uremic syndrome, hemophelias such as hemophelia A or Factor VII deficiency and Christmas disease or Factor IX deficiency, Hereditary Hemorrhagic Telangiectasia, also known as Rendu-Osler-Weber syndrome, allergic purpura (Henoch Schonlein purpura) and disseminated intravascular coagulation.

[0536] The effect of the polynucleotides, polypeptides, antibodies, and/or agonists or antagonists of the present invention on the clotting time of blood may be monitored using any of the clotting tests known in the art including, but not limited to, whole blood partial thromboplastin time (PTT), the activated partial thromboplastin time (aPTT), the activated clotting time (ACT), the recalcified activated clotting time, or the Lee-White Clotting time.

[0537] Several diseases and a variety of drugs can cause platelet dysfunction. Thus, in a specific embodiment, the polynucleotides, polypeptides, antibodies, and/or agonists or antagonists of the present invention may be useful in diagnosing, prognosing, preventing, and/or treating acquired platelet dysfunction such as platelet dysfunction accompanying kidney failure, leukemia, multiple myeloma, cirrhosis of the liver, and systemic lupus erythematosus as well as platelet dysfunction associated with drug treatments, including treatment with aspirin, ticlopidine, nonsteroidal anti-inflammatory drugs (used for arthritis, pain, and sprains), and penicillin in high doses.

[0538] In another embodiment, the polynucleotides, polypeptides, antibodies, and/or agonists or antagonists of the present invention may be useful in diagnosing, prognosing, preventing, and/or treating diseases and disorders characterized by or associated with increased or decreased numbers of white blood cells. Leukopenia occurs when the number of white blood cells decreases below normal. Leukopenias include, but are not limited to, neutropenia and lymphocytopenia. An increase in the number of white blood cells compared to normal is known as leukocytosis. The body generates increased numbers of white blood cells during infection. Thus, leukocytosis may simply be a normal physiological parameter that reflects infection. Alternatively, leukocytosis may be an indicator of injury or other disease such as cancer. Leokocytoses, include but are not limited to, eosinophilia, and accumulations of macrophages. In specific embodiments, the polynucleotides, polypeptides, antibodies, and/or agonists or antagonists of the present invention may be useful in diagnosing, prognosing, preventing, and/or treating leukopenia. In other specific embodiments, the polynucleotides, polypeptides, antibodies, and/or agonists or antagonists of the present invention may be useful in diagnosing, prognosing, preventing, and/or treating leukocytosis

[0539] Leukopenia may be a generalized decreased in all types of white blood cells, or may be a specific depletion of particular types of white blood cells. Thus, in specific embodiments, the polynucleotides, polypeptides, antibodies, and/or agonists or antagonists of the present invention may be useful in diagnosing, prognosing, preventing, and/or treating decreases in neutrophil numbers, known as neutropenia. Neutropenias that may be diagnosed, prognosed, prevented, and/or treated by the polynucleotides, polypeptides, antibodies, and/or agonists or antagonists of the present invention include, but are not limited to, infantile genetic agranulocytosis, familial neutropenia, cyclic neutropenia, neutropenias resulting from or associated with dietary deficiencies (e.g., vitamin B 12 deficiency or folic acid deficiency), neutropenias resulting from or associated with drug treatments (e.g., antibiotic regimens such as penicillin treatment, sulfonamide treatment, anticoagulant treatment, anticonvulsant drugs, anti-thyroid drugs, and cancer chemotherapy), and neutropenias resulting from increased neutrophil destruction that may occur in association with some bacterial or viral infections, allergic disorders, autoimmune diseases, conditions in which an individual has an enlarged spleen (e.g., Felty syndrome, malaria and sarcoidosis), and some drug treatment regimens.

[0540] The polynucleotides, polypeptides, antibodies, and/or agonists or antagonists of the present invention may be useful in diagnosing, prognosing, preventing, and/or treating lymphocytopenias (decreased numbers of B and/or T lymphocytes), including, but not limited lymphocytopenias resulting from or associated with stress, drug treatments (e.g., drug treatment with corticosteroids, cancer chemotherapies, and/or radiation therapies), AIDS infection and/or other diseases such as, for example, cancer, rheumatoid arthritis, systemic lupus erythematosus, chronic infections, some viral infections and/or hereditary disorders (e.g., DiGeorge syndrome, Wiskott-Aldrich Syndrome, severe combined immunodeficiency, ataxia telangiectasia).

[0541] The polynucleotides, polypeptides, antibodies, and/or agonists or antagonists of the present invention may be useful in diagnosing, prognosing, preventing, and/or treating diseases and disorders associated with macrophage numbers and/or macrophage function including, but not limited to, Gaucher's disease, Niemann-Pick disease, Letterer-Siwe disease and Hand-Schuller-Christian disease.

[0542] In another embodiment, the polynucleotides, polypeptides, antibodies, and/or agonists or antagonists of the present invention may be useful in diagnosing, prognosing, preventing, and/or treating diseases and disorders associated with eosinophil numbers and/or eosinophil function including, but not limited to, idiopathic hypereosinophilic syndrome, eosinophilia-myalgia syndrome, and Hand-Schuller-Christian disease.

[0543] In yet another embodiment, the polynucleotides, polypeptides, antibodies, and/or agonists or antagonists of the present invention may be useful in diagnosing, prognosing, preventing, and/or treating leukemias and lymphomas including, but not limited to, acute lymphocytic (lymphpblastic) leukemia (ALL), acute myeloid (myelocytic, myelogenous, myeloblastic, or myelomonocytic) leukemia, chronic lymphocytic leukemia (e.g., B cell leukemias, T cell leukemias, Sezary syndrome, and Hairy cell leukenia), chronic myelocytic (myeloid, myelogenous, or granulocytic) leukemia, Hodgkin's lymphoma, non-hodgkin's lymphoma, Burkitt's lymphoma, and mycosis fungoides.

[0544] In other embodiments, the polynucleotides, polypeptides, antibodies, and/or agonists or antagonists of the present invention may be useful in diagnosing, prognosing, preventing, and/or treating diseases and disorders of plasma cells including, but not limited to, plasma cell dyscrasias, monoclonal gammaopathies, monoclonal gammopathies of undetermined significance, multiple myeloma, macroglobulinemia, Waldenstrom's macroglobulinemia, cryoglobulinemia, and Raynaud's phenomenon.

[0545] In other embodiments, the polynucleotides, polypeptides, antibodies, and/or agonists or antagonists of the present invention may be useful in treating, preventing, and/or diagnosing myeloproliferative disorders, including but not limited to, polycythemia vera, relative polycythemia, secondary polycythemia, myelofibrosis, acute myelofibrosis, agnogenic myelod metaplasia, thrombocythemia, (including both primary and secondary thrombocythemia) and chronic myelocytic leukemia.

[0546] In other embodiments, the polynucleotides, polypeptides, antibodies, and/or agonists or antagonists of the present invention may be useful as a treatment prior to surgery, to increase blood cell production.

[0547] In other embodiments, the polynucleotides, polypeptides, antibodies, and/or agonists or antagonists of the present invention may be useful as an agent to enhance the migration, phagocytosis, superoxide production, antibody dependent cellular cytotoxicity of neutrophils, eosionophils and macrophages.

[0548] In other embodiments, the polynucleotides, polypeptides, antibodies, and/or agonists or antagonists of the present invention may be useful as an agent to increase the number of stem cells in circulation prior to stem cells pheresis. In another specific embodiment, the polynucleotides, polypeptides, antibodies, and/or agonists or antagonists of the present invention may be useful as an agent to increase the number of stem cells in circulation prior to platelet pheresis.

[0549] In other embodiments, the polynucleotides, polypeptides, antibodies, and/or agonists or antagonists of the present invention may be useful as an agent to increase cytokine production.

[0550] In other embodiments, the polynucleotides, polypeptides, antibodies, and/or agonists or antagonists of the present invention may be useful in preventing, diagnosing, and/or treating primary hematopoietic disorders.

[0551] Immune Activity

[0552] Polynucleotides, polypeptides, antibodies, and/or agonists or antagonists of the present invention may be useful in treating, preventing, diagnosing and/or prognosing diseases, disorders, and/or conditions of the immune system, by, for example, activating or inhibiting the proliferation, differentiation, or mobilization (chemotaxis) of immune cells. Immune cells develop through a process called hematopoiesis, producing myeloid (platelets, red blood cells, neutrophils, and macrophages) and lymphoid (B and T lymphocytes) cells from pluripotent stem cells. The etiology of these immune diseases, disorders, and/or conditions may be genetic, somatic, such as cancer and some autoimmune diseases, acquired (e.g., by chemotherapy or toxins), or infectious. Moreover, polynucleotides, polypeptides, antibodies, and/or agonists or antagonists of the present invention can be used as a marker or detector of a particular immune system disease or disorder.

[0553] In another embodiment, a polypeptide of the invention, or polynucleotides, antibodies, agonists, or antagonists corresponding to that polypeptide, may be used to treat diseases and disorders of the immune system and/or to inhibit or enhance an immune response generated by cells associated with the tissue(s) in which the polypeptide of the invention is expressed, including one, two, three, four, five, or more tissues disclosed in Table 1A, column 7 (Tissue Distribution Library Code).

[0554] Polynucleotides, polypeptides, antibodies, and/or agonists or antagonists of the present invention may be useful in treating, preventing, diagnosing, and/or prognosing immunodeficiencies, including both congenital and acquired immunodeficiencies. Examples of B cell immunodeficiencies in which immunoglobulin levels B cell function and/or B cell numbers are decreased include: X-linked agammaglobulinemia (Bruton's disease), X-linked infantile agammaglobulinemia, X-linked immunodeficiency with hyper IgM, non X-linked immunodeficiency with hyper IgM, X-linked lymphoproliferative syndrome (XLP), agammaglobulinemia including congenital and acquired agammaglobulinemia, adult onset agammaglobulinemia, late-onset agammaglobulinemia, dysgammaglobulinemia, hypogammaglobulinemia, unspecified hypogammaglobulinemia, recessive agammaglobulinemia (Swiss type), Selective IgM deficiency, selective IgA deficiency, selective IgG subclass deficiencies, IgG subclass deficiency (with or without IgA deficiency), Ig deficiency with increased IgM, IgG and IgA deficiency with increased IgM, antibody deficiency with normal or elevated Igs, Ig heavy chain deletions, kappa chain deficiency, B cell lymphoproliferative disorder (BLPD), common variable immunodeficiency (CVID), common variable immunodeficiency (CVI) (acquired), and transient hypogammaglobulinemia of infancy.

[0555] In specific embodiments, ataxia-telangiectasia or conditions associated with ataxia-telangiectasia are treated, prevented, diagnosed, and/or prognosing using the polypeptides or polynucleotides of the invention, and/or agonists or antagonists thereof.

[0556] Examples of congenital immunodeficiencies in which T cell and/or B cell function and/or number is decreased include, but are not limited to: DiGeorge anomaly, severe combined immunodeficiencies (SCID) (including, but not limited to, X-linked SCID, autosomal recessive SCID, adenosine deaminase deficiency, purine nucleoside phosphorylase (PNP) deficiency, Class II MHC deficiency (Bare lymphocyte syndrome), Wiskott-Aldrich syndrome, and ataxia telangiectasia), thymic hypoplasia, third and fourth pharyngeal pouch syndrome, 22q11.2 deletion, chronic mucocutaneous candidiasis, natural killer cell deficiency (NK), idiopathic CD4+ T-lymphocytopenia, immunodeficiency with predominant T cell defect (unspecified), and unspecified immunodeficiency of cell mediated immunity.

[0557] In specific embodiments, DiGeorge anomaly or conditions associated with DiGeorge anomaly are treated, prevented, diagnosed, and/or prognosed using polypeptides or polynucleotides of the invention, or antagonists or agonists thereof.

[0558] Other immunodeficiencies that may be treated, prevented, diagnosed, and/or prognosed using polypeptides or polynucleotides of the invention, and/or agonists or antagonists thereof, include, but are not limited to, chronic granulomatous disease, Chédiak-Higashi syndrome, myeloperoxidase deficiency, leukocyte glucose-6-phosphate dehydrogenase deficiency, X-linked lymphoproliferative syndrome (XLP), leukocyte adhesion deficiency, complement component deficiencies (including C1, C2, C3, C4, C5, C6, C7, C8 and/or C9 deficiencies), reticular dysgenesis, thymic alymphoplasia-aplasia, immunodeficiency with thymoma, severe congenital leukopenia, dysplasia with immunodeficiency, neonatal neutropenia, short limbed dwarfism, and Nezelof syndrome-combined immunodeficiency with Igs.

[0559] In a preferred embodiment, the immunodeficiencies and/or conditions associated with the immunodeficiencies recited above are treated, prevented, diagnosed and/or prognosed using polynucleotides, polypeptides, antibodies, and/or agonists or antagonists of the present invention.

[0560] In a preferred embodiment polynucleotides, polypeptides, antibodies, and/or agonists or antagonists of the present invention could be used as an agent to boost immunoresponsiveness among immunodeficient individuals. In specific embodiments, polynucleotides, polypeptides, antibodies, and/or agonists or antagonists of the present invention could be used as an agent to boost immunoresponsiveness among B cell and/or T cell immunodeficient individuals.

[0561] The polynucleotides, polypeptides, antibodies, and/or agonists or antagonists of the present invention may be useful in treating, preventing, diagnosing and/or prognosing autoimmune disorders. Many autoimmune disorders result from inappropriate recognition of self as foreign material by immune cells. This inappropriate recognition results in an immune response leading to the destruction of the host tissue. Therefore, the administration of polynucleotides and polypeptides of the invention that can inhibit an immune response, particularly the proliferation, differentiation, or chemotaxis of T-cells, may be an effective therapy in preventing autoimmune disorders.

[0562] Autoimmune diseases or disorders that may be treated, prevented, diagnosed and/or prognosed by polynucleotides, polypeptides, antibodies, and/or agonists or antagonists of the present invention include, but are not limited to, one or more of the following: systemic lupus erythematosus, rheumatoid arthritis, ankylosing spondylitis, multiple sclerosis, autoimmune thyroiditis, Hashimoto's thyroiditis, autoimmune hemolytic anemia, hemolytic anemia, thrombocytopenia, autoimmune thrombocytopenia purpura, autoimmune neonatal thrombocytopenia, idiopathic thrombocytopenia purpura, purpura (e.g., Henloch-Scoenlein purpura), autoimmunocytopenia, Goodpasture's syndrome, Pemphigus vulgaris, myasthenia gravis, Grave's disease (hyperthyroidism), and insulin-resistant diabetes mellitus.

[0563] Additional disorders that are likely to have an autoimmune component that may be treated, prevented, and/or diagnosed with the compositions of the invention include, but are not limited to, type II collagen-induced arthritis, antiphospholipid syndrome, dermatitis, allergic encephalomyelitis, myocarditis, relapsing polychondritis, rheumatic heart disease, neuritis, uveitis ophthalmia, polyendocrinopathies, Reiter's Disease, Stiff-Man Syndrome, autoimmune pulmonary inflammation, autism, Guillain-Barre Syndrome, insulin dependent diabetes mellitus, and autoimmune inflammatory eye disorders.

[0564] Additional disorders that are likely to have an autoimmune component that may be treated, prevented, diagnosed and/or prognosed with the compositions of the invention include, but are not limited to, scleroderma with anti-collagen antibodies (often characterized, e.g., by nucleolar and other nuclear antibodies), mixed connective tissue disease (often characterized, e.g., by antibodies to extractable nuclear antigens (e.g., ribonucleoprotein)), polymyositis (often characterized, e.g., by nonhistone ANA), pernicious anemia (often characterized, e.g., by antiparietal cell, microsomes, and intrinsic factor antibodies), idiopathic Addison's disease (often characterized, e.g., by humoral and cell-mediated adrenal cytotoxicity, infertility (often characterized, e.g., by antispermatozoal antibodies), glomerulonephritis (often characterized, e.g., by glomerular basement membrane antibodies or immune complexes), bullous pemphigoid (often characterized, e.g., by IgG and complement in basement membrane), Sjogren's syndrome (often characterized, e.g., by multiple tissue antibodies, and/or a specific nonhistone ANA (SS-B)), diabetes mellitus (often characterized, e.g., by cell-mediated and humoral islet cell antibodies), and adrenergic drug resistance (including adrenergic drug resistance with asthma or cystic fibrosis) (often characterized, e.g., by beta-adrenergic receptor antibodies).

[0565] Additional disorders that may have an autoimmune component that may be treated, prevented, diagnosed and/or prognosed with the compositions of the invention include, but are not limited to, chronic active hepatitis (often characterized, e.g., by smooth muscle antibodies), primary biliary cirrhosis (often characterized, e.g., by mitochondria antibodies), other endocrine gland failure (often characterized, e.g., by specific tissue antibodies in some cases), vitiligo (often characterized, e.g., by melanocyte antibodies), vasculitis (often characterized, e.g., by Ig and complement in vessel walls and/or low serum complement), post-MI (often characterized, e.g., by myocardial antibodies), cardiotomy syndrome (often characterized, e.g., by myocardial antibodies), urticaria (often characterized, e.g., by IgG and IgM antibodies to IgE), atopic dermatitis (often characterized, e.g., by IgG and IgM antibodies to IgE), asthma (often characterized, e.g., by IgG and IgM antibodies to IgE), and many other inflammatory, granulomatous, degenerative, and atrophic disorders.

[0566] In a preferred embodiment, the autoimmune diseases and disorders and/or conditions associated with the diseases and disorders recited above are treated, prevented, diagnosed and/or prognosed using for example, antagonists or agonists, polypeptides or polynucleotides, or antibodies of the present invention. In a specific preferred embodiment, rheumatoid arthritis is treated, prevented, and/or diagnosed using polynucleotides, polypeptides, antibodies, and/or agonists or antagonists of the present invention.

[0567] In another specific preferred embodiment, systemic lupus erythematosus is treated, prevented, and/or diagnosed using polynucleotides, polypeptides, antibodies, and/or agonists or antagonists of the present invention. In another specific preferred embodiment, idiopathic thrombocytopenia purpura is treated, prevented, and/or diagnosed using polynucleotides, polypeptides, antibodies, and/or agonists or antagonists of the present invention.

[0568] In another specific preferred embodiment IgA nephropathy is treated, prevented, and/or diagnosed using polynucleotides, polypeptides, antibodies, and/or agonists or antagonists of the present invention.

[0569] In a preferred embodiment, the autoimmune diseases and disorders and/or conditions associated with the diseases and disorders recited above are treated, prevented, diagnosed and/or prognosed using polynucleotides, polypeptides, antibodies, and/or agonists or antagonists of the present invention.

[0570] In preferred embodiments, polypeptides, antibodies, polynucleotides and/or agonists or antagonists of the present invention are used as a immunosuppressive agent(s).

[0571] Polynucleotides, polypeptides, antibodies, and/or agonists or antagonists of the present invention may be useful in treating, preventing, prognosing, and/or diagnosing diseases, disorders, and/or conditions of hematopoietic cells. Polynucleotides, polypeptides, antibodies, and/or agonists or antagonists of the present invention could be used to increase differentiation and proliferation of hematopoietic cells, including the pluripotent stem cells, in an effort to treat or prevent those diseases, disorders, and/or conditions associated with a decrease in certain (or many) types hematopoietic cells, including but not limited to, leukopenia, neutropenia, anemia, and thrombocytopenia. Alternatively, Polynucleotides, polypeptides, antibodies, and/or agonists or antagonists of the present invention could be used to increase differentiation and proliferation of hematopoietic cells, including the pluripotent stem cells, in an effort to treat or prevent those diseases, disorders, and/or conditions associated with an increase in certain (or many) types of hematopoietic cells, including but not limited to, histiocytosis.

[0572] Allergic reactions and conditions, such as asthma (particularly allergic asthma) or other respiratory problems, may also be treated, prevented, diagnosed and/or prognosed using polypeptides, antibodies, or polynucleotides of the invention, and/or agonists or antagonists thereof. Moreover, these molecules can be used to treat, prevent, prognose, and/or diagnose anaphylaxis, hypersensitivity to an antigenic molecule, or blood group incompatibility.

[0573] Additionally, polypeptides or polynucleotides of the invention, and/or agonists or antagonists thereof, may be used to treat, prevent, diagnose and/or prognose IgE-mediated allergic reactions. Such allergic reactions include, but are not limited to, asthma, rhinitis, and eczema. In specific embodiments, polynucleotides, polypeptides, antibodies, and/or agonists or antagonists of the present invention may be used to modulate IgE concentrations in vitro or in vivo.

[0574] Moreover, polynucleotides, polypeptides, antibodies, and/or agonists or antagonists of the present invention have uses in the diagnosis, prognosis, prevention, and/or treatment of inflammatory conditions. For example, since polypeptides, antibodies, or polynucleotides of the invention, and/or agonists or antagonists of the invention may inhibit the activation, proliferation and/or differentiation of cells involved in an inflammatory response, these molecules can be used to prevent and/or treat chronic and acute inflammatory conditions. Such inflammatory conditions include, but are not limited to, for example, inflammation associated with infection (e.g., septic shock, sepsis, or systemic inflammatory response syndrome), ischemia-reperfusion injury, endotoxin lethality, complement-mediated hyperacute rejection, nephritis, cytokine or chemokine induced lung injury, inflammatory bowel disease, Crohn's disease, over production of cytokines (e.g., TNF or IL-1.), respiratory disorders (e.g., asthma and allergy); gastrointestinal disorders (e.g., inflammatory bowel disease); cancers (e.g., gastric, ovarian, lung, bladder, liver, and breast); CNS disorders (e.g., multiple sclerosis; ischemic brain injury and/or stroke, traumatic brain injury, neurodegenerative disorders (e.g., Parkinson's disease and Alzheimer's disease); AIDS-related dementia; and prion disease); cardiovascular disorders (e.g., atherosclerosis, myocarditis, cardiovascular disease, and cardiopulmonary bypass complications); as well as many additional diseases, conditions, and disorders that are characterized by inflammation (e.g., hepatitis, rheumatoid arthritis, gout, trauma, pancreatitis, sarcoidosis, dermatitis, renal ischemia-reperfusion injury, Grave's disease, systemic lupus erythematosus, diabetes mellitus, and allogenic transplant rejection).

[0575] Because inflammation is a fundamental defense mechanism, inflammatory disorders can effect virtually any tissue of the body. Accordingly, polynucleotides, polypeptides, and antibodies of the invention, as well as agonists or antagonists thereof, have uses in the treatment of tissue-specific inflammatory disorders, including, but not limited to, adrenalitis, alveolitis, angiocholecystitis, appendicitis, balanitis, blepharitis, bronchitis, bursitis, carditis, cellulitis, cervicitis, cholecystitis, chorditis, cochlitis, colitis, conjunctivitis, cystitis, dermatitis, diverticulitis, encephalitis, endocarditis, esophagitis, eustachitis, fibrositis, folliculitis, gastritis, gastroenteritis, gingivitis, glossitis, hepatosplenitis, keratitis, labyrinthitis, laryngitis, lymphangitis, mastitis, media otitis, meningitis, metritis, mucitis, myocarditis, myosititis, myringitis, nephritis, neuritis, orchitis, osteochondritis, otitis, pericarditis, peritendonitis, peritonitis, pharyngitis, phlebitis, poliomyelitis, prostatitis, pulpitis, retinitis, rhinitis, salpingitis, scleritis, sclerochoroiditis, scrotitis, sinusitis, spondylitis, steatitis, stomatitis, synovitis, syringitis, tendonitis, tonsillitis, urethritis, and vaginitis.

[0576] In specific embodiments, polypeptides, antibodies, or polynucleotides of the invention, and/or agonists or antagonists thereof, are useful to diagnose, prognose, prevent, and/or treat organ transplant rejections and graft-versus-host disease.

[0577] Organ rejection occurs by host immune cell destruction of the transplanted tissue through an immune response. Similarly, an immune response is also involved in GVHD, but, in this case, the foreign transplanted immune cells destroy the host tissues. Polypeptides, antibodies, or polynucleotides of the invention, and/or agonists or antagonists thereof, that inhibit an immune response, particularly the activation, proliferation, differentiation, or chemotaxis of T-cells, may be an effective therapy in preventing organ rejection or GVHD. In specific embodiments, polypeptides, antibodies, or polynucleotides of the invention, and/or agonists or antagonists thereof, that inhibit an immune response, particularly the activation, proliferation, differentiation, or chemotaxis of T-cells, may be an effective therapy in preventing experimental allergic and hyperacute xenograft rejection.

[0578] In other embodiments, polypeptides, antibodies, or polynucleotides of the invention, and/or agonists or antagonists thereof, are useful to diagnose, prognose, prevent, and/or treat immune complex diseases, including, but not limited to, serum sickness, post streptococcal glomerulonephritis, polyarteritis nodosa, and immune complex-induced vasculitis.

[0579] Polypeptides, antibodies, polynucleotides and/or agonists or antagonists of the invention can be used to treat, detect, and/or prevent infectious agents. For example, by increasing the immune response, particularly increasing the proliferation activation and/or differentiation of B and/or T cells, infectious diseases may be treated, detected, and/or prevented. The immune response may be increased by either enhancing an existing immune response, or by initiating a new immune response. Alternatively, polynucleotides, polypeptides, antibodies, and/or agonists or antagonists of the present invention may also directly inhibit the infectious agent (refer to section of application listing infectious agents, etc), without necessarily eliciting an immune response.

[0580] In another embodiment, polypeptides, antibodies, polynucleotides and/or agonists or antagonists of the present invention are used as a vaccine adjuvant that enhances immune responsiveness to an antigen. In a specific embodiment, polypeptides, antibodies, polynucleotides and/or agonists or antagonists of the present invention are used as an adjuvant to enhance tumor-specific immune responses.

[0581] In another specific embodiment, polypeptides, antibodies, polynucleotides and/or agonists or antagonists of the present invention are used as an adjuvant to enhance anti-viral immune responses. Anti-viral immune responses that may be enhanced using the compositions of the invention as an adjuvant, include virus and virus associated diseases or symptoms described herein or otherwise known in the art. In specific embodiments, the compositions of the invention are used as an adjuvant to enhance an immune response to a virus, disease, or symptom selected from the group consisting of: AIDS, meningitis, Dengue, EBV, and hepatitis (e.g., hepatitis B). In another specific embodiment, the compositions of the invention are used as an adjuvant to enhance an immune response to a virus, disease, or symptom selected from the group consisting of: HIV/AIDS, respiratory syncytial virus, Dengue, rotavirus, Japanese B encephalitis, influenza A and B, parainfluenza, measles, cytomegalovirus, rabies, Junin, Chikungunya, Rift Valley Fever, herpes simplex, and yellow fever.

[0582] In another specific embodiment, polypeptides, antibodies, polynucleotides and/or agonists or antagonists of the present invention are used as an adjuvant to enhance anti-bacterial or anti-fungal immune responses. Anti-bacterial or anti-fungal immune responses that may be enhanced using the compositions of the invention as an adjuvant, include bacteria or fungus and bacteria or fungus associated diseases or symptoms described herein or otherwise known in the art. In specific embodiments, the compositions of the invention are used as an adjuvant to enhance an immune response to a bacteria or fungus, disease, or symptom selected from the group consisting of: tetanus, Diphtheria, botulism, and meningitis type B.

[0583] In another specific embodiment, the compositions of the invention are used as an adjuvant to enhance an immune response to a bacteria or fungus, disease, or symptom selected from the group consisting of: Vibrio cholerae, Mycobacterilim leprae, Salmonella typhi, Salmonella paratyphi, Meisseria meninigitidis, Streptococcus pneumoniae, Group B streptococcus, Shigella spp., Enterotoxigenic Escherichia coli Enterohemorrhagic E. coli, and Borrelia burgdorferi.

[0584] In another specific embodiment, polypeptides, antibodies, polynucleotides and/or agonists or antagonists of the present invention are used as an adjuvant to enhance anti-parasitic immune responses. Anti-parasitic immune responses that may be enhanced using the compositions of the invention as an adjuvant, include parasite and parasite associated diseases or symptoms described herein or otherwise known in the art. In specific embodiments, the compositions of the invention are used as an adjuvant to enhance an immune response to a parasite. In another specific embodiment, the compositions of the invention are used as an adjuvant to enhance an immune response to Plasmodium (malaria) or Leishmania.

[0585] In another specific embodiment, polypeptides, antibodies, polynucleotides and/or agonists or antagonists of the present invention may also be employed to treat infectious diseases including silicosis, sarcoidosis, and idiopathic pulmonary fibrosis; for example, by preventing the recruitment and activation of mononuclear phagocytes.

[0586] In another specific embodiment, polypeptides, antibodies, polynucleotides and/or agonists or antagonists of the present invention are used as an antigen for the generation of antibodies to inhibit or enhance immune mediated responses against polypeptides of the invention.

[0587] In one embodiment, polypeptides, antibodies, polynucleotides and/or agonists or antagonists of the present invention are administered to an animal (e.g., mouse, rat, rabbit, hamster, guinea pig, pigs, micro-pig, chicken, camel, goat, horse, cow, sheep, dog, cat, non-human primate, and human, most preferably human) to boost the immune system to produce increased quantities of one or more antibodies (e.g., IgG, IgA, IgM, and IgE), to induce higher affinity antibody production and immunoglobulin class switching (e.g., IgG, IgA, IgM, and IgE), and/or to increase an immune response.

[0588] In another specific embodiment, polypeptides, antibodies, polynucleotides and/or agonists or antagonists of the present invention are used as a stimulator of B cell responsiveness to pathogens.

[0589] In another specific embodiment, polypeptides, antibodies, polynucleotides and/or agonists or antagonists of the present invention are used as an activator of T cells.

[0590] In another specific embodiment, polypeptides, antibodies, polynucleotides and/or agonists or antagonists of the present invention are used as an agent that elevates the immune status of an individual prior to their receipt of immunosuppressive therapies.

[0591] In another specific embodiment, polypeptides, antibodies, polynucleotides and/or agonists or antagonists of the present invention are used as an agent to induce higher affinity antibodies.

[0592] In another specific embodiment, polypeptides, antibodies, polynucleotides and/or agonists or antagonists of the present invention are used as an agent to increase serum immunoglobulin concentrations.

[0593] In another specific embodiment, polypeptides, antibodies, polynucleotides and/or agonists or antagonists of the present invention are used as an agent to accelerate recovery of immunocompromised individuals.

[0594] In another specific embodiment, polypeptides, antibodies, polynucleotides and/or agonists or antagonists of the present invention are used as an agent to boost immunoresponsiveness among aged populations and/or neonates.

[0595] In another specific embodiment, polypeptides, antibodies, polynucleotides and/or agonists or antagonists of the present invention are used as an immune system enhancer prior to, during, or after bone marrow transplant and/or other transplants (e.g., allogeneic or xenogeneic organ transplantation). With respect to transplantation, compositions of the invention may be administered prior to, concomitant with, and/or after transplantation. In a specific embodiment, compositions of the invention are administered after transplantation, prior to the beginning of recovery of T-cell populations. In another specific embodiment, compositions of the invention are first administered after transplantation after the beginning of recovery of T cell populations, but prior to full recovery of B cell populations.

[0596] In another specific embodiment, polypeptides, antibodies, polynucleotides and/or agonists or antagonists of the present invention are used as an agent to boost immunoresponsiveness among individuals having an acquired loss of B cell function. Conditions resulting in an acquired loss of B cell function that may be ameliorated or treated by administering the polypeptides, antibodies, polynucleotides and/or agonists or antagonists thereof, include, but are not limited to, HIV Infection, AIDS, bone marrow transplant, and B cell chronic lymphocytic leukemia (CLL).

[0597] In another specific embodiment, polypeptides, antibodies, polynucleotides and/or agonists or antagonists of the present invention are used as an agent to boost immunoresponsiveness among individuals having a temporary immune deficiency. Conditions resulting in a temporary immune deficiency that may be ameliorated or treated by administering the polypeptides, antibodies, polynucleotides and/or agonists or antagonists thereof, include, but are not limited to, recovery from viral infections (e.g., influenza), conditions associated with malnutrition, recovery from infectious mononucleosis, or conditions associated with stress, recovery from measles, recovery from blood transfusion, and recovery from surgery.

[0598] In another specific embodiment, polypeptides, antibodies, polynucleotides and/or agonists or antagonists of the present invention are used as a regulator of antigen presentation by monocytes, dendritic cells, and/or B-cells. In one embodiment, polynucleotides, polypeptides, antibodies, and/or agonists or antagonists of the present invention enhance antigen presentation or antagonizes antigen presentation in vitro or in vivo. Moreover, in related embodiments, said enhancement or antagonism of antigen presentation may be useful as an anti-tumor treatment or to modulate the immune system.

[0599] In another specific embodiment, polypeptides, antibodies, polynucleotides and/or agonists or antagonists of the present invention are used as an agent to direct an individual's immune system towards development of a humoral response (i.e. TH2) as opposed to a TH1 cellular response.

[0600] In another specific embodiment, polypeptides, antibodies, polynucleotides and/or agonists or antagonists of the present invention are used as a means to induce tumor proliferation and thus make it more susceptible to anti-neoplastic agents. For example, multiple myeloma is a slowly dividing disease and is thus refractory to virtually all anti-neoplastic regimens. If these cells were forced to proliferate more rapidly their susceptibility profile would likely change.

[0601] In another specific embodiment, polypeptides, antibodies, polynucleotides and/or agonists or antagonists of the present invention are used as a stimulator of B cell production in pathologies such as AIDS, chronic lymphocyte disorder and/or Common Variable Immunodeficiency.

[0602] In another specific embodiment, polypeptides, antibodies, polynucleotides and/or agonists or antagonists of the present invention are used as a therapy for generation and/or regeneration of lymphoid tissues following surgery, trauma or genetic defect. In another specific embodiment, polypeptides, antibodies, polynucleotides and/or agonists or antagonists of the present invention are used in the pretreatment of bone marrow samples prior to transplant.

[0603] In another specific embodiment, polypeptides, antibodies, polynucleotides and/or agonists or antagonists of the present invention are used as a gene-based therapy for genetically inherited disorders resulting in immuno-incompetence/immunodeficiency such as observed among SCID patients.

[0604] In another specific embodiment, polypeptides, antibodies, polynucleotides and/or agonists or antagonists of the present invention are used as a means of activating monocytes/macrophages to defend against parasitic diseases that effect monocytes such as Leishmania.

[0605] In another specific embodiment, polypeptides, antibodies, polynucleotides and/or agonists or antagonists of the present invention are used as a means of regulating secreted cytokines that are elicited by polypeptides of the invention.

[0606] In another embodiment, polypeptides, antibodies, polynucleotides and/or agonists or antagonists of the present invention are used in one or more of the applications described herein, as they may apply to veterinary medicine.

[0607] In another specific embodiment, polypeptides, antibodies, polynucleotides and/or agonists or antagonists of the present invention are used as a means of blocking various aspects of immune responses to foreign agents or self. Examples of diseases or conditions in which blocking of certain aspects of immune responses may be desired include autoimmune disorders such as lupus, and arthritis, as well as immunoresponsiveness to skin allergies, inflammation, bowel disease, injury and diseases/disorders associated with pathogens.

[0608] In another specific embodiment, polypeptides, antibodies, polynucleotides and/or agonists or antagonists of the present invention are used as a therapy for preventing the B cell proliferation and Ig secretion associated with autoimmune diseases such as idiopathic thrombocytopenic purpura, systemic lupus erythematosus and multiple sclerosis.

[0609] In another specific embodiment, polypeptides, antibodies, polynucleotides and/or agonists or antagonists of the present invention are used as a inhibitor of B and/or T cell migration in endothelial cells. This activity disrupts tissue architecture or cognate responses and is useful, for example in disrupting immune responses, and blocking sepsis.

[0610] In another specific embodiment, polypeptides, antibodies, polynucleotides and/or agonists or antagonists of the present invention are used as a therapy for chronic hypergammaglobulinemia evident in such diseases as monoclonal gammopathy of undetermined significance (MGUS), Waldenstrom's disease, related idiopathic monoclonal gammopathies, and plasmacytomas.

[0611] In another specific embodiment, polypeptides, antibodies, polynucleotides and/or agonists or antagonists of the present invention may be employed for instance to inhibit polypeptide chemotaxis and activation of macrophages and their precursors, and of neutrophils, basophils, B lymphocytes and some T-cell subsets, e.g., activated and CD8 cytotoxic T cells and natural killer cells, in certain autoimmune and chronic inflammatory and infective diseases. Examples of autoimmune diseases are described herein and include multiple sclerosis, and insulin-dependent diabetes.

[0612] The polypeptides, antibodies, polynucleotides and/or agonists or antagonists of the present invention may also be employed to treat idiopathic hyper-eosinophilic syndrome by, for example, preventing eosinophil production and migration.

[0613] In another specific embodiment, polypeptides, antibodies, polynucleotides and/or agonists or antagonists of the present invention are used to enhance or inhibit complement mediated cell lysis.

[0614] In another specific embodiment, polypeptides, antibodies, polynucleotides and/or agonists or antagonists of the present invention are used to enhance or inhibit antibody dependent cellular cytotoxicity.

[0615] In another specific embodiment, polypeptides, antibodies, polynucleotides and/or agonists or antagonists of the present invention may also be employed for treating atherosclerosis, for example, by preventing monocyte infiltration in the artery wall.

[0616] In another specific embodiment, polypeptides, antibodies, polynucleotides and/or agonists or antagonists of the present invention may be employed to treat adult respiratory distress syndrome (ARDS).

[0617] In another specific embodiment, polypeptides, antibodies, polynucleotides and/or agonists or antagonists of the present invention may be useful for stimulating wound and tissue repair, stimulating angiogenesis, and/or stimulating the repair of vascular or lymphatic diseases or disorders. Additionally, agonists and antagonists of the invention may be used to stimulate the regeneration of mucosal surfaces.

[0618] In a specific embodiment, polynucleotides or polypeptides, and/or agonists thereof are used to diagnose, prognoses treat, and/or prevent a disorder characterized by primary or acquired immunodeficiency, deficient serum immunoglobulin production, recurrent infections, and/or immune system dysfunction. Moreover, polynucleotides or polypeptides, and/or agonists thereof may be used to treat or prevent infections of the joints, bones, skin, and/or parotid glands, blood-borne infections (e.g., sepsis, meningitis, septic arthritis, and/or osteomyelitis), autoimmune diseases (e.g., those disclosed herein), inflammatory disorders, and malignancies, and/or any disease or disorder or condition associated with these infections, diseases, disorders and/or malignancies) including, but not limited to, CVID, other primary immune deficiencies, HIV disease, CLL, recurrent bronchitis, sinusitis, otitis media, conjunctivitis, pneumonia, hepatitis, meningitis, herpes zoster (e.g., severe herpes zoster), and/or pneumocystis carnii. Other diseases and disorders that may be prevented, diagnosed, prognosed, and/or treated with polynucleotides or polypeptides, and/or agonists of the present invention include, but are not limited to, HIV infection, HTLV-BLV infection, lymphopenia, phagocyte bactericidal dysfunction anemia, thrombocytopenia, and hemoglobinuria.

[0619] In another embodiment, polynucleotides, polypeptides, antibodies, and/or agonists or antagonists of the present invention are used to treat, and/or diagnose an individual having common variable immunodeficiency disease (“CVID”: also known as “acquired agammaglobulinemia” and “acquired hypogammaglobulinemia”) or a subset of this disease.

[0620] In a specific embodiment, polynucleotides, polypeptides, antibodies, and/or agonists or antagonists of the present invention may be used to diagnose, prognose, prevent, and/or treat cancers or neoplasms including immune cell or immune tissue-related cancers or neoplasms. Examples of cancers or neoplasms that may be prevented, diagnosed, or treated by polynucleotides, polypeptides, antibodies, and/or agonists or antagonists of the present invention include, but are not limited to, acute myelogenous leukemia, chronic myelogenous leukemia, Hodgkin's disease, non-Hodgkin's lymphoma, acute lymphocytic anemia (ALL) Chronic lymphocyte leukemia, plasmacytomas, multiple myeloma, Burkitt's lymphoma, EBV-transformed diseases, and/or diseases and disorders described in the section entitled “Hyperproliferative Disorders” elsewhere herein.

[0621] In another specific embodiment, polypeptides, antibodies, polynucleotides and/or agonists or antagonists of the present invention are used as a therapy for decreasing cellular proliferation of Large B-cell Lymphomas.

[0622] In another specific embodiment, polypeptides, antibodies, polynucleotides and/or agonists or antagonists of the present invention are used as a means of decreasing the involvement of B cells and Ig associated with Chronic Myelogenous Leukemia.

[0623] In specific embodiments, the compositions of the invention are used as an agent to boost immunoresponsiveness among B cell immunodeficient individuals, such as, for example, an individual who has undergone a partial or complete splenectomy.

[0624] Antagonists of the invention include, for example, binding and/or inhibitory antibodies, antisense nucleic acids, ribozymes or soluble forms of the polypeptides of the present invention (e.g., Fc fusion protein; see, e.g., Example 9). Agonists of the invention include, for example, binding or stimulatory antibodies, and soluble forms of the polypeptides (e.g., Fc fusion proteins; see, e.g., Example 9). Polypeptides, antibodies, polynucleotides and/or agonists or antagonists of the present invention may be employed in a composition with a pharmaceutically acceptable carrier, e.g., as described herein.

[0625] In another embodiment, polypeptides, antibodies, polynucleotides and/or agonists or antagonists of the present invention are administered to an animal (including, but not limited to, those listed above, and also including transgenic animals) incapable of producing functional endogenous antibody molecules or having an otherwise compromised endogenous immune system, but which is capable of producing human immunoglobulin molecules by means of a reconstituted or partially reconstituted immune system from another animal (see, e.g., published PCT Application Nos. WO98/24893, WO/9634096, WO/9633735, and WO/9110741). Administration of polypeptides, antibodies, polynucleotides and/or agonists or antagonists of the present invention to such animals is useful for the generation of monoclonal antibodies against the polypeptides, antibodies, polynucleotides and/or agonists or antagonists of the present invention.

[0626] Hyperproliferative Disorders

[0627] Cardiovascular system associated polynucleotides or polypeptides, or agonists or antagonists thereof, can be used to treat, prevent, diagnose and/or prognose hyperproliferative diseases, disorders, and/or conditions, including neoplasms.

[0628] In a specific embodiment, cardiovascular system associated polynucleotides or polypeptides, or agonists or antagonists thereof, can be used to treat, prevent, and/or diagnose hyperproliferative diseases, disorders, and/or conditions of the cardiovascular system.

[0629] In a preferred embodiment, cardiovascular system associated polynucleotides or polypeptides, or agonists or antagonists thereof, can be used to treat, prevent, and/or diagnose cardiovascular system neoplasms.

[0630] Cardiovascular system associated polynucleotides or polypeptides, or agonists or antagonists of the invention, may inhibit the proliferation of the disorder through direct or indirect interactions. Alternatively, cardiovascular system associated polynucleotides or polypeptides, or agonists or antagonists thereof, may proliferate other cells, which can inhibit the hyperproliferative disorder.

[0631] For example, by increasing an immune response, particularly increasing antigenic qualities of the hyperproliferative disorder or by proliferating, differentiating, or mobilizing T-cells, hyperproliferative diseases, disorders, and/or conditions can be treated, prevented, and/or diagnosed. This immune response may be increased by either enhancing an existing immune response, or by initiating a new immune response. Alternatively, decreasing an immune response may also be a method of treating, preventing, and/or diagnosing hyperproliferative diseases, disorders, and/or conditions, such as a chemotherapeutic agent.

[0632] Examples of hyperproliferative diseases, disorders, and/or conditions that can be treated, prevented, and/or diagnosed by cardiovascular system associated polynucleotides or polypeptides, or agonists or antagonists thereof, include, but are not limited to neoplasms located in the: prostate, colon, abdomen, bone, breast, digestive system, liver, pancreas, peritoneum, endocrine glands (adrenal, parathyroid, pituitary, testicles, ovary, thymus, thyroid), eye, head and neck, nervous (central and peripheral), lymphatic system, pelvic, skin, soft tissue, spleen, thoracic, and urogenital.

[0633] Similarly, other hyperproliferative disorders can also be treated or detected by polynucleotides or polypeptides, or agonists or antagonists of the present invention. Examples of such hyperproliferative disorders include, but are not limited to: Acute Childhood Lymphoblastic Leukemia, Acute Lymphoblastic Leukemia, Acute Lymphocytic Leukemia, Acute Myeloid Leukemia, Adrenocortical Carcinoma, Adult (Primary) Hepatocellular Cancer, Adult (Primary) Liver Cancer, Adult Acute Lymphocytic Leukemia, Adult Acute Myeloid Leukemia, Adult Hodgkin's Disease, Adult Hodgkin's Lymphoma, Adult Lymphocytic Leukemia, Adult Non-Hodgkin's Lymphoma, Adult Primary Liver Cancer, Adult Soft Tissue Sarcoma, AIDS-Related Lymphoma, AIDS-Related Malignancies, Anal Cancer, Astrocytoma, Bile Duct Cancer, Bladder Cancer, Bone Cancer, Brain Stem Glioma, Brain Tumors, Breast Cancer, Cancer of the Renal Pelvis and Ureter, Central Nervous System (Primary) Lymphoma, Central Nervous System Lymphoma, Cerebellar Astrocytoma, Cerebral Astrocytoma, Cervical Cancer, Childhood (Primary) Hepatocellular Cancer, Childhood (Primary) Liver Cancer, Childhood Acute Lymphoblastic Leukemia, Childhood Acute Myeloid Leukemia, Childhood Brain Stem Glioma, Childhood Cerebellar Astrocytoma, Childhood Cerebral Astrocytoma, Childhood Extracranial Germ Cell Tumors, Childhood Hodgkin's Disease, Childhood Hodgkin's Lymphoma, Childhood Hypothalamic and Visual Pathway Glioma, Childhood Lymphoblastic Leukemia, Childhood Medulloblastoma, Childhood Non-Hodgkin's Lymphoma, Childhood Pineal and Supratentorial Primitive Neuroectodermal Tumors, Childhood Primary Liver Cancer, Childhood Rhabdomyosarcoma, Childhood Soft Tissue Sarcoma, Childhood Visual Pathway and Hypothalamic Glioma, Chronic Lymphocytic Leukemia, Chronic Myelogenous Leukemia, Colon Cancer, Cutaneous T-Cell Lymphoma, Endocrine Pancreas Islet Cell Carcinoma, Endometrial Cancer, Ependymoma, Epithelial Cancer, Esophageal Cancer, Ewing's Sarcoma and Related Tumors, Exocrine Pancreatic Cancer, Extracranial Germ Cell Tumor, Extragonadal Germ Cell Tumor, Extrahepatic Bile Duct Cancer, Eye Cancer, Female Breast Cancer, Gaucher's Disease, Gallbladder Cancer, Gastric Cancer, Gastrointestinal Carcinoid Tumor, Gastrointestinal Tumors, Germ Cell Tumors, Gestational Trophoblastic Tumor, Hairy Cell Leukemia, Head and Neck Cancer, Hepatocellular Cancer, Hodgkin's Disease, Hodgkin's Lymphoma, Hypergammaglobulinemia, Hypopharyngeal Cancer, Intestinal Cancers, Intraocular Melanoma, Islet Cell Carcinoma, Islet Cell Pancreatic Cancer, Kaposi's Sarcoma, Kidney Cancer, Laryngeal Cancer, Lip and Oral Cavity Cancer, Liver Cancer, Lung Cancer, Lymphoproliferative Disorders, Macroglobulinemia, Male Breast Cancer, Malignant Mesothelioma, Malignant Thymoma, Medulloblastoma, Melanoma, Mesothelioma, Metastatic Occult Primary Squamous Neck Cancer, Metastatic Primary Squamous Neck Cancer, Metastatic Squamous Neck Cancer, Multiple Myeloma, Multiple Myeloma/Plasma Cell Neoplasm, Myelodysplastic Syndrome, Myelogenous Leukemia, Myeloid Leukemia, Myeloproliferative Disorders, Nasal Cavity and Paranasal Sinus Cancer, Nasopharyngeal Cancer, Neuroblastoma, Non-Hodgkin's Lymphoma During Pregnancy, Nonmelanoma Skin Cancer, Non-Small Cell Lung Cancer, Occult Primary Metastatic Squamous Neck Cancer, Oropharyngeal Cancer, Osteo-/Malignant Fibrous Sarcoma, Osteosarcoma/Malignant Fibrous Histiocytoma, Osteosarcoma/Malignant Fibrous Histiocytoma of Bone, Ovarian Epithelial Cancer, Ovarian Germ Cell Tumor, Ovarian Low Malignant Potential Tumor, Pancreatic Cancer, Paraproteinemias, Purpura, Parathyroid Cancer, Penile Cancer, Pheochromocytoma, Pituitary Tumor, Plasma Cell Neoplasm/Multiple Myeloma, Primary Central Nervous System Lymphoma, Primary Liver Cancer, Prostate Cancer, Rectal Cancer, Renal Cell Cancer, Renal Pelvis and Ureter Cancer, Retinoblastoma, Rhabdomyosarcoma, Salivary Gland Cancer, Sarcoidosis Sarcomas, Sezary Syndrome, Skin Cancer, Small Cell Lung Cancer, Small Intestine Cancer, Soft Tissue Sarcoma, Squamous Neck Cancer, Stomach Cancer, Supratentorial Primitive Neuroectodermal and Pineal Tumors, T-Cell Lymphoma, Testicular Cancer, Thymoma, Thyroid Cancer, Transitional Cell Cancer of the Renal Pelvis and Ureter, Transitional Renal Pelvis and Ureter Cancer, Trophoblastic Tumors, Ureter and Renal Pelvis Cell Cancer, Urethral Cancer, Uterine Cancer, Uterine Sarcoma, Vaginal Cancer, Visual Pathway and Hypothalamic Glioma, Vulvar Cancer, Waldenstrom's Macroglobulinemia, Wilms' Tumor, and any other hyperproliferative disease, besides neoplasia, located in an organ system listed above.

[0634] In another preferred embodiment, polynucleotides or polypeptides, or agonists or antagonists of the present invention are used to diagnose, prognose, prevent, and/or treat premalignant conditions and to prevent progression to a neoplastic or malignant state, including but not limited to those disorders described above. Such uses are indicated in conditions known or suspected of preceding progression to neoplasia or cancer, in particular, where non-neoplastic cell growth consisting of hyperplasia, metaplasia, or most particularly, dysplasia has occurred (for review of such abnormal growth conditions, see Robbins and Angell, 1976, Basic Pathology, 2d Ed., W. B. Saunders Co., Philadelphia, pp. 68-79.)

[0635] Hyperplasia is a form of controlled cell proliferation, involving an increase in cell number in a tissue or organ, without significant alteration in structure or function. Hyperplastic disorders which can be diagnosed, prognosed, prevented, and/or treated with compositions of the invention (including polynucleotides, polypeptides, agonists or antagonists) include, but are not limited to, angiofollicular mediastinal lymph node hyperplasia, angiolymphoid hyperplasia with eosinophilia, atypical melanocytic hyperplasia, basal cell hyperplasia, benign giant lymph node hyperplasia, cementum hyperplasia, congenital adrenal hyperplasia, congenital sebaceous hyperplasia, cystic hyperplasia, cystic hyperplasia of the breast, denture hyperplasia, ductal hyperplasia, endometrial hyperplasia, fibromuscular hyperplasia, focal epithelial hyperplasia, gingival hyperplasia, inflammatory fibrous hyperplasia, inflammatory papillary hyperplasia, intravascular papillary endothelial hyperplasia, nodular hyperplasia of prostate, nodular regenerative hyperplasia, pseudoepitheliomatous hyperplasia, senile sebaceous hyperplasia, and venucous hyperplasia.

[0636] Metaplasia is a form of controlled cell growth in which one type of adult or fully differentiated cell substitutes for another type of adult cell. Metaplastic disorders which can be diagnosed, prognosed, prevented, and/or treated with compositions of the invention (including polynucleotides, polypeptides, agonists or antagonists) include, but are not limited to, agnogenic myeloid metaplasia, apocrine metaplasia, atypical metaplasia, autoparenchymatous metaplasia, connective tissue metaplasia, epithelial metaplasia, intestinal metaplasia, metaplastic anemia, metaplastic ossification, metaplastic polyps, myeloid metaplasia, primary myeloid metaplasia, secondary myeloid metaplasia, squamous metaplasia, squamous metaplasia of amnion, and symptomatic myeloid metaplasia.

[0637] Dysplasia is frequently a forerunner of cancer, and is found mainly in the epithelia; it is the most disorderly form of non-neoplastic cell growth, involving a loss in individual cell uniformity and in the architectural orientation of cells. Dysplastic cells often have abnormally large, deeply stained nuclei, and exhibit pleomorphism. Dysplasia characteristically occurs where there exists chronic irritation or inflammation. Dysplastic disorders which can be diagnosed, prognosed, prevented, and/or treated with compositions of the invention (including polynucleotides, polypeptides, agonists or antagonists) include, but are not limited to, anhidrotic ectodermal dysplasia, anterofacial dysplasia, asphyxiating thoracic dysplasia, atriodigital dysplasia, bronchopulmonary dysplasia, cerebral dysplasia, cervical dysplasia, chondroectodermal dysplasia, cleidocranial dysplasia, congenital ectodermal dysplasia, craniodiaphysial dysplasia, craniocarpotarsal dysplasia, craniometaphysial dysplasia, dentin dysplasia, diaphysial dysplasia, ectodermal dysplasia, enamel dysplasia, encephalo-ophthalmic dysplasia, dysplasia epiphysialis hemimelia, dysplasia epiphysialis multiplex, dysplasia epiphysialis punctata, epithelial dysplasia, faciodigitogenital dysplasia, familial fibrous dysplasia of jaws, familial white folded dysplasia, fibromuscular dysplasia, fibrous dysplasia of bone, florid osseous dysplasia, hereditary renal-retinal dysplasia, hidrotic ectodermal dysplasia, hypohidrotic ectodermal dysplasia, lymphopenic thymic dysplasia, mammary dysplasia, mandibulofacial dysplasia, metaphysial dysplasia, Mondini dysplasia, monostotic fibrous dysplasia, mucoepithelial dysplasia, multiple epiphysial dysplasia, oculoauriculovertebral dysplasia, oculodentodigital dysplasia, oculovertebral dysplasia, odontogenic dysplasia, ophthalmomandibulomelic dysplasia, periapical cemental dysplasia, polyostotic fibrous dysplasia, pseudoachondroplastic spondyloepiphysial dysplasia, retinal dysplasia, septo-optic dysplasia, spondyloepiphysial dysplasia, and ventriculoradial dysplasia.

[0638] Additional pre-neoplastic disorders which can be diagnosed, prognosed, prevented, and/or treated with compositions of the invention (including polynucleotides, polypeptides, agonists or antagonists) include, but are not limited to, benign dysproliferative disorders (e.g., benign tumors, fibrocystic conditions, tissue hypertrophy, intestinal polyps, colon polyps, and esophageal dysplasia), leukoplakia, keratoses, Bowen's disease, Farmer's Skin, solar cheilitis, and solar keratosis.

[0639] In another embodiment, a polypeptide of the invention, or polynucleotides, antibodies, agonists, or antagonists corresponding to that polypeptide, may be used to diagnose and/or prognose disorders associated with the tissue(s) in which the polypeptide of the invention is expressed, including one, two, three, four, five, or more tissues disclosed in Table 1A, 7 (Tissue Distribution Library Code).

[0640] In another embodiment, polynucleotides, polypeptides, antibodies, and/or agonists or antagonists of the present invention conjugated to a toxin or a radioactive isotope, as described herein, may be used to treat cancers and neoplasms, including, but not limited to those described herein. In a further preferred embodiment, polynucleotides, polypeptides, antibodies, and/or agonists or antagonists of the present invention conjugated to a toxin or a radioactive isotope, as described herein, may be used to treat acute myelogenous leukemia.

[0641] Additionally, polynucleotides, polypeptides, and/or agonists or antagonists of the invention may affect apoptosis, and therefore, would be useful in treating a number of diseases associated with increased cell survival or the inhibition of apoptosis. For example, diseases associated with increased cell survival or the inhibition of apoptosis that could be diagnosed, prognosed, prevented, and/or treated by polynucleotides, polypeptides, and/or agonists or antagonists of the invention, include cancers (such as follicular lymphomas, carcinomas with p53 mutations, and hormone-dependent tumors, including, but not limited to colon cancer, cardiac tumors, pancreatic cancer, melanoma, retinoblastoma, glioblastoma, lung cancer, intestinal cancer, testicular cancer, stomach cancer, neuroblastoma, myxoma, myoma, lymphoma, endothelioma, osteoblastoma, osteoclastoma, osteosarcoma, chondrosarcoma, adenoma, breast cancer, prostate cancer, Kaposi's sarcoma and ovarian cancer); autoimmune disorders such as, multiple sclerosis, Sjogren's syndrome, Hashimoto's thyroiditis, biliary cirrhosis, Behcet's disease, Crohn's disease, polymyositis, systemic lupus erythematosus and immune-related glomerulonephritis and rheumatoid arthritis) and viral infections (such as herpes viruses, pox viruses and adenoviruses), inflammation, graft v. host disease, acute graft rejection, and chronic graft rejection.

[0642] In preferred embodiments, polynucleotides, polypeptides, and/or agonists or antagonists of the invention are used to inhibit growth, progression, and/or metastasis of cancers, in particular those listed above.

[0643] Additional diseases or conditions associated with increased cell survival that could be diagnosed, prognosed, prevented, and/or treated by polynucleotides, polypeptides, and/or agonists or antagonists of the invention, include, but are not limited to, progression, and/or metastases of malignancies and related disorders such as leukemia (including acute leukemias (e.g., acute lymphocytic leukemia, acute myelocytic leukemia (including myeloblastic, promyelocytic, myelomonocytic, monocytic, and erythroleukemia)) and chronic leukemias (e.g., chronic myelocytic (granulocytic) leukemia and chronic lymphocytic leukemia)), polycythemia vera, lymphomas (e.g., Hodgkin's disease and non-Hodgkin's disease), multiple myeloma, Waldenstrom's macroglobulinemia, heavy chain disease, and solid tumors including, but not limited to, sarcomas and carcinomas such as fibrosarcoma, myxosarcoma, liposarcoma, chondrosarcoma, osteogenic sarcoma, chordoma, angiosarcoma, endotheliosarcoma, lymphangiosarcoma, lymphangioendotheliosarcoma, synovioma, mesothelioma, Ewing's tumor, leiomyosarcoma, rhabdomyosarcoma, colon carcinoma, pancreatic cancer, breast cancer, ovarian cancer, prostate cancer, squamous cell carcinoma, basal cell carcinoma, adenocarcinoma, sweat gland carcinoma, sebaceous gland carcinoma, papillary carcinoma, papillary adenocarcinomas, cystadenocarcinoma, medullary carcinoma, bronchogenic carcinoma, renal cell carcinoma, hepatoma, bile duct carcinoma, choriocarcinoma, seminoma, embryonal carcinoma, Wilm's tumor, cervical cancer, testicular tumor, lung carcinoma, small cell lung carcinoma, bladder carcinoma, epithelial carcinoma, glioma, astrocytoma, medulloblastoma, craniopharyngioma, ependymoma, pinealoma, emangioblastoma, acoustic neuroma, oligodendroglioma, menangioma, melanoma, neuroblastoma, and retinoblastoma.

[0644] Diseases associated with increased apoptosis that could be diagnosed, prognosed, prevented, and/or treated by polynucleotides, polypeptides, and/or agonists or antagonists of the invention, include AIDS; neurodegenerative disorders (such as Alzheimer's disease, Parkinson's disease, amyotrophic lateral sclerosis, retinitis pigmentosa, cerebellar degeneration and brain tumor or prior associated disease); autoimmune disorders (such as, multiple sclerosis, Sjogren's syndrome, Hashimoto's thyroiditis, biliary cirrhosis, Behcet's disease, Crohn's disease, polymyositis, systemic lupus erythematosus and immune-related glomerulonephritis and rheumatoid arthritis) myelodysplastic syndromes (such as aplastic anemia), graft v. host disease, ischemic injury (such as that caused by myocardial infarction, stroke and reperfusion injury), liver injury (e.g., hepatitis related liver injury, ischemia/reperfusion injury, cholestosis (bile duct injury) and liver cancer); toxin-induced liver disease (such as that caused by alcohol), septic shock, cachexia and anorexia.

[0645] Hyperproliferative diseases and/or disorders that could be diagnosed, prognosed, prevented, and/or treated by polynucleotides, polypeptides, and/or agonists or antagonists of the invention, include, but are not limited to, neoplasms located in the liver, abdomen, bone, breast, digestive system, pancreas, peritoneum, endocrine glands (adrenal, parathyroid, pituitary, testicles, ovary, thymus, thyroid), eye, head and neck, nervous system (central and peripheral), lymphatic system, pelvis, skin, soft tissue, spleen, thorax, and urogenital tract.

[0646] Similarly, other hyperproliferative disorders can also be diagnosed, prognosed, prevented, and/or treated by polynucleotides, polypeptides, and/or agonists or antagonists of the invention. Examples of such hyperproliferative disorders include, but are not limited to: hypergammaglobulinemia, lymphoproliferative disorders, paraproteinemias, purpura, sarcoidosis, Sezary Syndrome, Waldenstron's macroglobulinemia, Gaucher's Disease, histiocytosis, and any other hyperproliferative disease, besides neoplasia, located in an organ system listed above.

[0647] One preferred embodiment utilizes polynucleotides of the present invention to inhibit aberrant cellular division, by gene therapy using the present invention, and/or protein fusions or fragments thereof.

[0648] Thus, the present invention provides a method for treating cell proliferative diseases, disorders, and/or conditions by inserting into an abnormally proliferating cell a polynucleotide of the present invention, wherein said polynucleotide represses said cell proliferation, disease, disorder, and/or condition.

[0649] In a preferred embodiment, the present invention provides a method for treating cell proliferative diseases, disorders and/or conditions of the cardiovascular system by inserting into a cell, a polynucleotide of the present invention, wherein said polynucleotide represses said cell proliferation, disease and/or disorder.

[0650] Another embodiment of the present invention provides a method of treating cell-proliferative diseases, disorders, and/or conditions in individuals comprising administration of one or more active gene copies of the present invention to an abnormally proliferating cell or cells. In a preferred embodiment, polynucleotides of the present invention is a DNA construct comprising a recombinant expression vector effective in expressing a DNA sequence encoding said polynucleotides. In another preferred embodiment of the present invention, the DNA construct encoding the polynucleotides of the present invention is inserted into cells to be treated utilizing a retrovirus, or more preferably an adenoviral vector (see, e.g., G J. Nabel, et. al., PNAS 96: 324-326 (1999), which is hereby incorporated by reference). In a most preferred embodiment, the viral vector is defective and will not transform non-proliferating cells, only proliferating cells. Moreover, in a preferred embodiment, the polynucleotides of the present invention inserted into proliferating cells either alone, or in combination with or fused to other polynucleotides, can then be modulated via an external stimulus (i.e., magnetic, specific small molecule, chemical, or drug administration, etc.), which acts upon the promoter upstream of said polynucleotides to induce expression of the encoded protein product. As such the beneficial therapeutic affect of the present invention may be expressly modulated (i.e., to increase, decrease, or inhibit expression of the present invention) based upon said external stimulus.

[0651] Polynucleotides of the present invention may be useful in repressing expression of oncogenic genes or antigens. By “repressing expression of the oncogenic genes” is intended the suppression of the transcription of the gene, the degradation of the gene transcript (pre-message RNA), the inhibition of splicing, the destruction of the messenger RNA, the prevention of the post-translational modifications of the protein, the destruction of the protein, or the inhibition of the normal function of the protein.

[0652] For local administration to abnormally proliferating cells, polynucleotides of the present invention may be administered by any method known to those of skill in the art including, but not limited to transfection, electroporation, microinjection of cells, or in vehicles such as liposomes, lipofectin, or as naked polynucleotides, or any other method described throughout the specification. The polynucleotide of the present invention may be delivered by known gene delivery systems such as, but not limited to, retroviral vectors (Gilboa, J. Virology 44:845 (1982); Hocke, Nature 320:275 (1986); Wilson, et al., Proc. Natl. Acad. Sci. U.S.A. 85:3014), vaccinia virus system (Chakrabarty et al., Mol. Cell Biol. 5:3403 (1985) or other efficient DNA delivery systems (Yates et al., Nature 313:812 (1985)) known to those skilled in the art. These references are exemplary only and are hereby incorporated by reference. In order to specifically deliver or transfect cells which are abnormally proliferating and spare non-dividing cells, it is preferable to utilize a retrovirus, or adenoviral (as described in the art and elsewhere herein) delivery system known to those of skill in the art. Since host DNA replication is required for retroviral DNA to integrate and the retrovirus will be unable to self replicate due to the lack of the retrovirus genes needed for its life cycle. Utilizing such a retroviral delivery system for polynucleotides of the present invention will target said gene and constructs to abnormally proliferating cells and will spare the non-dividing normal cells.

[0653] The polynucleotides of the present invention may be delivered directly to cell proliferative disorder/disease sites in internal organs, body cavities and the like by use of imaging devices used to guide an injecting needle directly to the disease site. The polynucleotides of the present invention may also be administered to disease sites at the time of surgical intervention.

[0654] By “cell proliferative disease” is meant any human or animal disease or disorder, affecting any one or any combination of organs, cavities, or body parts, which is characterized by single or multiple local abnormal proliferations of cells, groups of cells, or tissues, whether benign or malignant.

[0655] Any amount of the polynucleotides of the present invention may be administered as long as it has a biologically inhibiting effect on the proliferation of the treated cells. Moreover, it is possible to administer more than one of the polynucleotide of the present invention simultaneously to the same site. By “biologically inhibiting” is meant partial or total growth inhibition as well as decreases in the rate of proliferation or growth of the cells. The biologically inhibitory dose may be determined by assessing the effects of the polynucleotides of the present invention on target malignant or abnormally proliferating cell growth in tissue culture, tumor growth in animals and cell cultures, or any other method known to one of ordinary skill in the art.

[0656] The present invention is further directed to antibody-based therapies which involve administering of anti-polypeptides and anti-polynucleotide antibodies to a mammalian, preferably human, patient for treating one or more of the described diseases, disorders, and/or conditions. Methods for producing anti-polypeptides and anti-polynucleotide antibodies polyclonal and monoclonal antibodies are described in detail elsewhere herein. Such antibodies may be provided in pharmaceutically acceptable compositions as known in the art or as described herein.

[0657] A summary of the ways in which the antibodies of the present invention may be used therapeutically includes binding polynucleotides or polypeptides of the present invention locally or systemically in the body or by direct cytotoxicity of the antibody, e.g., as mediated by complement (CDC) or by effector cells (ADCC). Some of these approaches are described in more detail below. Armed with the teachings provided herein, one of ordinary skill in the art will know how to use the antibodies of the present invention for diagnostic, monitoring or therapeutic purposes without undue experimentation.

[0658] In particular, the antibodies, fragments and derivatives of the present invention are useful for treating a subject having or developing cell proliferative and/or differentiation diseases, disorders, and/or conditions as described herein. Such treatment comprises administering a single or multiple doses of the antibody, or a fragment, derivative, or a conjugate thereof.

[0659] The antibodies of this invention may be advantageously utilized in combination with other monoclonal or chimeric antibodies, or with lymphokines or hematopoietic growth factors, for example, which serve to increase the number or activity of effector cells which interact with the antibodies.

[0660] It is preferred to use high affinity and/or potent in vivo inhibiting and/or neutralizing antibodies against polypeptides or polynucleotides of the present invention, fragments or regions thereof, for both immunoassays directed to and therapy of diseases, disorders, and/or conditions related to polynucleotides or polypeptides, including fragments thereof, of the present invention. Such antibodies, fragments, or regions, will preferably have an affinity for polynucleotides or polypeptides, including fragments thereof. Preferred binding affinities include those with a dissociation constant or Kd less than 5×10⁻⁶M, 10⁻⁶M, 5×10⁻⁷M, 10⁻⁷M, 5×10⁻⁸M, 10⁻⁸M, 5×10⁻⁹M, 10⁻⁹M, 5×10⁻¹⁰M, 10⁻¹⁰M, 5×10⁻¹¹M, 10⁻¹¹M, 5×10⁻¹²M, 10⁻¹²M, 5×10⁻¹³M, 10⁻¹³M, 5×10⁻¹⁴M, 10⁻¹⁴M, 5×10⁻¹⁵M, and 10⁻¹⁵M.

[0661] Moreover, cardiovascular system antigen polypeptides of the present invention or fragments thereof, are useful in inhibiting the angiogenesis of proliferative cells or tissues, either alone, as a protein fusion, or in combination with other polypeptides directly or indirectly, as described elsewhere herein. In a most preferred embodiment, said anti-angiogenesis effect may be achieved indirectly, for example, through the inhibition of hematopoietic, tumor-specific cells, such as tumor-associated macrophages (see, e.g., Joseph I B, et al. J Natl Cancer Inst, 90(21):1648-53 (1998), which is hereby incorporated by reference). Antibodies directed to polypeptides or polynucleotides of the present invention may also result in inhibition of angiogenesis directly, or indirectly (see, e.g., Witte L, et al., Cancer Metastasis Rev. 17(2):155-61 (1998), which is hereby incorporated by reference)).

[0662] Polypeptides, including protein fusions, of the present invention, or fragments thereof may be useful in inhibiting proliferative cells or tissues through the induction of apoptosis. Said polypeptides may act either directly, or indirectly to induce apoptosis of proliferative cells and tissues, for example in the activation of a death-domain receptor, such as tumor necrosis factor (TNF) receptor-1, CD95 (Fas/APO-1), TNF-receptor-related apoptosis-mediated protein (TRAMP) and TNF-related apoptosis-inducing ligand (TRAIL) receptor-1 and -2 (see, e.g., Schulze-Osthoff K, et.al., Eur J Biochem 254(3):439-59 (1998), which is hereby incorporated by reference). Moreover, in another preferred embodiment of the present invention, said polypeptides may induce apoptosis through other mechanisms, such as in the activation of other proteins which will activate apoptosis, or through stimulating the expression of said proteins, either alone or in combination with small molecule drugs or adjuvants, such as apoptonin, galectins, thioredoxins, antiinflammatory proteins (See for example, Mutat. Res. 400(1-2):447-55 (1998), Med Hypotheses.50(5):423-33 (1998), Chem. Biol. Interact. Apr 24; 111-112:23-34 (1998), J. Mo. Med. 76(6):402-12 (1998), Int. J. Tissue React. 20(1):3-15 (1998), which are all hereby incorporated by reference).

[0663] Polypeptides, including protein fusions to, or fragments thereof, of the present invention are useful in inhibiting the metastasis of proliferative cells or tissues. Inhibition may occur as a direct result of administering polypeptides, or antibodies directed to said polypeptides as described elsewhere herein, or indirectly, such as activating the expression of proteins known to inhibit metastasis, for example alpha 4 integrins, (See, e.g., Curr Top Microbiol Immunol 1998;231:125-41, which is hereby incorporated by reference). Such therapeutic affects of the present invention may be achieved either alone, or in combination with small molecule drugs or adjuvants.

[0664] In another embodiment, the invention provides a method of delivering compositions containing the polypeptides of the invention (e.g., compositions containing polypeptides or anti-cardiovascular system antigen polypeptide antibodies associated with heterologous polypeptides, heterologous nucleic acids, toxins, or prodrugs) to targeted cells expressing the polypeptide of the present invention. Cardiovascular system antigen polypeptides or anti-cardiovascular system antigen polypeptide antibodies of the invention may be associated with heterologous polypeptides, heterologous nucleic acids, toxins, or prodrugs via hydrophobic, hydrophilic, ionic and/or covalent interactions.

[0665] Polypeptides, protein fusions to, or fragments thereof, of the present invention are useful in enhancing the immunogenicity and/or antigenicity of proliferating cells or tissues, either directly, such as would occur if the polypeptides of the present invention ‘vaccinated’ the immune response to respond to proliferative antigens and immunogens, or indirectly, such as in activating the expression of proteins known to enhance the immune response (e.g. chemokines), to said antigens and immunogens.

[0666] Urinary System Disorders

[0667] Polynucleotides, polypeptides, antibodies, and/or agonists or antagonists of the present invention, may be used to treat, prevent, diagnose, and/or prognose disorders of the urinary system, including but not limited to disorders of the renal system, bladder, ureters, and urethra. Renal disorders include, but are not limited to, kidney failure, nephritis, blood vessel disorders of kidney, metabolic and congenital kidney disorders, urinary disorders of the kidney, autoimmune disorders, sclerosis and necrosis, electrolyte imbalance, and kidney cancers.

[0668] Kidney failure diseases include, but are not limited to, acute kidney failure, chronic kidney failure, atheroembolic renal failure, and end-stage renal disease. Inflammatory diseases of the kidney include acute glomerulonephritis, postinfectious glomerulonephritis, rapidly progressive glomerulonephritis, nephrotic syndrome, membranous glomerulonephritis, familial nephrotic syndrome, membranoproliferative glomerulonephritis I and II, mesangial proliferative glomerulonephritis, chronic glomerulonephritis, acute tubulointerstitial nephritis, chronic tubulointerstitial nephritis, acute post-streptococcal glomerulonephritis (PSGN), pyelonephritis, lupus nephritis, chronic nephritis, interstitial nephritis, and post-streptococcal glomerulonephritis.

[0669] Blood vessel disorders of the kidneys include, but are not limited to, kidney infarction, atheroembolic kidney disease, cortical necrosis, malignant nephrosclerosis, renal vein thrombosis, renal underperfusion, renal ischemia-reperfusion, renal artery embolism, and renal artery stenosis. Kidney disorders resulting form urinary tract problems include, but are not limited to, pyelonephritis, hydronephrosis, urolithiasis (renal lithiasis, nephrolithiasis), reflux nephropathy, urinary tract infections, urinary retention, and acute or chronic unilateral obstructive uropathy.

[0670] Metabolic and congenital disorders of the kidneys include, but are not limited to, renal tubular acidosis, renal glycosuria, nephrogenic diabetes insipidus, cystinuria, Fanconi's syndrome, vitamin D-resistant rickets, Hartnup disease, Bartter's syndrome, Liddle's syndrome, polycystic kidney disease, medullary cystic disease, medullary sponge kidney, Alport's syndrome, nail-patella syndrome, congenital nephrotic syndrome, CRUSH syndrome, horseshoe kidney, diabetic nephropathy, nephrogenic diabetes insipidus, analgesic nephropathy, kidney stones, and membranous nephropathy, Kidney disorders resulting from an autoimmune response include, but are not limited to, systemic lupus erythematosus (SLE), Goodpasture syndrome, IgA nephropathy, and IgM mesangial proliferative glomerulonephritis.

[0671] Sclerotic or necrotic disorders of the kidney include, but are not limited to, glomerulosclerosis, diabetic nephropathy, focal segmental glomerulosclerosis (FSGS), necrotizing glomerulonephritis, and renal papillary necrosis. Kidneys may also develop carcinomas, including, but not limited to, hypernephroma, nephroblastoma, renal cell cancer, transitional cell cancer, squamous cell cancer, and Wilm's tumor.

[0672] Kidney disorders may also result in electrolyte imbalances, including, but not limited to, nephrocalcinosis, pyuria, edema, hydronephritis, proteinuria, hyponatremia, hypernatremia, hypokalemia, hyperkalemia, hypocalcemia, hypercalcemia, hypophosphatemia, and hyperphosphatemia.

[0673] Bladder disorders include, but are not limited to, benign prostatic hyperplasia (BPH), interstitial cystitis (IC), prostatitis, proteinuria, urinary tract infections, urinary incontinence, urinary retention. Disorders of the ureters and urethra include, but are not limited to, acute or chronic unilateral obstructive uropathy. The bladder, ureters, and urethra may also develop carcinomas, including, but not limited to, superficial bladder canccer, invasive bladder cancer, carcinoma of the ureter, and urethra cancers.

[0674] Polypeptides may be administered using any method known in the art, including, but not limited to, direct needle injection at the delivery site, intravenous injection, topical administration, catheter infusion, biolistic injectors, particle accelerators, gelfoam sponge depots, other commercially available depot materials, osmotic pumps, oral or suppositorial solid pharmaceutical formulations, decanting or topical applications during surgery, aerosol delivery. Such methods are known in the art. Polypeptides may be administered as part of a Therapeutic, described in more detail below. Methods of delivering polynucleotides are described in more detail herein.

[0675] Respiratory Disorders

[0676] Polynucleotides or polypeptides, or agonists or antagonists of the present invention may be used to treat, prevent, diagnose, and/or prognose diseases and/or disorders of the respiratory system.

[0677] Diseases and disorders of the respiratory system include, but are not limited to, nasal vestibulitis, nonallergic rhinitis (e.g., acute rhinitis, chronic rhinitis, atrophic rhinitis, vasomotor rhinitis), nasal polyps, and sinusitis, juvenile angiofibromas, cancer of the nose and juvenile papillomas, vocal cord polyps, nodules (singer's nodules), contact ulcers, vocal cord paralysis, laryngoceles, pharyngitis (e.g., viral and bacterial), tonsillitis, tonsillar cellulitis, parapharyngeal abscess, laryngitis, laryngoceles, and throat cancers (e.g., cancer of the nasopharynx, tonsil cancer, larynx cancer), lung cancer (e.g., squamous cell carcinoma, small cell (oat cell) carcinoma, large cell carcinoma, and adenocarcinoma), allergic disorders (eosinophilic pneumonia, hypersensitivity pneumonitis (e.g., extrinsic allergic alveolitis, allergic interstitial pneumonitis, organic dust pneumoconiosis, allergic bronchopulmonary aspergillosis, asthma, Wegener's granulomatosis (granulomatous vasculitis), Goodpasture's syndrome)), pneumonia (e.g., bacterial pneumonia (e.g., Streptococcus pneumoniae (pneumoncoccal pneumonia), Staphylococcus aureus (staphylococcal pneumonia), Gram-negative bacterial pneumonia (caused by, e.g., Klebsiella and Pseudomas spp.), Mycoplasma pneumoniae pneumonia, Hemophilus influenzae pneumonia, Legionella pneumophila (Legionnaires' disease), and Chlamydia psittaci (Psittacosis)), and viral pneumonia (e.g., influenza, chickenpox (varicella).

[0678] Additional diseases and disorders of the respiratory system include, but are not limited to bronchiolitis, polio (poliomyelitis), croup, respiratory syncytial viral infection, mumps, erythema infectiosum (fifth disease), roseola infantum, progressive rubella panencephalitis, german measles, and subacute sclerosing panencephalitis), fungal pneumonia (e.g., Histoplasmosis, Coccidioidomycosis, Blastomycosis, fungal infections in people with severely suppressed immune systems (e.g., cryptococcosis, caused by Cryptococcus neoformans; aspergillosis, caused by Aspergillus spp.; candidiasis, caused by Candida; and mucormycosis)), Pneumocystis carinii (pneumocystis pneumonia), atypical pneumonias (e.g., Mycoplasma and Chlamydia spp.), opportunistic infection pneumonia, nosocomial pneumonia, chemical pneumonitis, and aspiration pneumonia, pleural disorders (e.g., pleurisy, pleural effusion, and pneumothorax (e.g., simple spontaneous pneumothorax, complicated spontaneous pneumothorax, tension pneumothorax)), obstructive airway diseases (e.g., asthma, chronic obstructive pulmonary disease (COPD), emphysema, chronic or acute bronchitis), occupational lung diseases (e.g., silicosis, black lung (coal workers' pneumoconiosis), asbestosis, berylliosis, occupational asthsma, byssinosis, and benign pneumoconioses), Infiltrative Lung Disease (e.g., pulmonary fibrosis (e.g., fibrosing alveolitis, usual interstitial pneumonia), idiopathic pulmonary fibrosis, desquamative interstitial pneumonia, lymphoid interstitial pneumonia, histiocytosis X (e.g., Letterer-Siwe disease, Hand-Schüller-Christian disease, eosinophilic granuloma), idiopathic pulmonary hemosiderosis, sarcoidosis and pulmonary alveolar proteinosis), Acute respiratory distress syndrome (also called, e.g., adult respiratory distress syndrome), edema, pulmonary embolism, bronchitis (e.g., viral, bacterial), bronchiectasis, atelectasis, lung abscess (caused by, e.g., Staphylococcus aureus or Legionella pneumophila), and cystic fibrosis.

[0679] Anti-Aniiogenesis Activity

[0680] The naturally occurring balance between endogenous stimulators and inhibitors of angiogenesis is one in which inhibitory influences predominate. Rastinejad et al., Cell 56:345-355 (1989). In those rare instances in which neovascularization occurs under normal physiological conditions, such as wound healing, organ regeneration, embryonic development, and female reproductive processes, angiogenesis is stringently regulated and spatially and temporally delimited. Under conditions of pathological angiogenesis such as that characterizing solid tumor growth, these regulatory controls fail. Unregulated angiogenesis becomes pathologic and sustains progression of many neoplastic and non-neoplastic diseases. A number of serious diseases are dominated by abnormal neovascularization including solid tumor growth and metastases, arthritis, some types of eye disorders, and psoriasis. See, e.g., reviews by Moses et al., Biotech. 9:630-634 (1991); Folkman et al., N. Engl. J. Med., 333:1757-1763 (1995); Auerbach et al., J. Microvasc. Res. 29:401-411 (1985); Folkman, Advances in Cancer Research, eds. Klein and Weinhouse, Academic Press, New York, pp. 175-203 (1985); Patz, Am. J. Opthalmol. 94:715-743 (1982); and Folkman et al., Science 221:719-725 (1983). In a number of pathological conditions, the process of angiogenesis contributes to the disease state. For example, significant data have accumulated which suggest that the growth of solid tumors is dependent on angiogenesis. Folkman and Klagsbrun, Science 235:442-447 (1987).

[0681] The present invention provides for treatment of diseases or disorders associated with neovascularization by administration of the polynucleotides and/or polypeptides of the invention, as well as agonists or antagonists of the present invention. Malignant and metastatic conditions which can be treated with the polynucleotides and polypeptides, or agonists or antagonists of the invention include, but are not limited to, malignancies, solid tumors, and cancers described herein and otherwise known in the art (for a review of such disorders, see Fishman et al., Medicine, 2d Ed., J. B. Lippincott Co., Philadelphia (1985)). Thus, the present invention provides a method of treating an angiogenesis-related disease and/or disorder, comprising administration to an individual in need thereof a therapeutically effective amount of a polynucleotide, polypeptide, antagonist and/or agonist of the invention. For example, polynucleotides, polypeptides, antagonists and/or agonists may be utilized in a variety of additional methods in order to therapeutically treat a cancer or tumor. Cancers which may be treated with polynucleotides, polypeptides, antagonists and/or agonists include, but are not limited to solid tumors, including prostate, lung, breast, ovarian, stomach, pancreas, larynx, esophagus, testes, liver, parotid, biliary tract, colon, rectum, cervix, uterus, endometrium, kidney, bladder, thyroid cancer; primary tumors and metastases; melanomas; glioblastoma; Kaposi's sarcoma; leiomyosarcoma; non-small cell lung cancer; colorectal cancer; advanced malignancies; and blood born tumors such as leukemias. For example, polynucleotides, polypeptides, antagonists and/or agonists may be delivered topically, in order to treat cancers such as skin cancer, head and neck tumors, breast tumors, and Kaposi's sarcoma.

[0682] Within yet other aspects, polynucleotides, polypeptides, antagonists and/or agonists may be utilized to treat superficial forms of bladder cancer by, for example, intravesical administration. Polynucleotides, polypeptides, antagonists and/or agonists may be delivered directly into the tumor, or near the tumor site, via injection or a catheter. Of course, as the artisan of ordinary skill will appreciate, the appropriate mode of administration will vary according to the cancer to be treated. Other modes of delivery are discussed herein.

[0683] Polynucleotides, polypeptides, antagonists and/or agonists may be useful in treating other disorders, besides cancers, which involve angiogenesis. These disorders include, but are not limited to: benign tumors, for example hemangiomas, acoustic neuromas, neurofibromas, trachomas, and pyogenic granulomas; artheroscleric plaques; ocular angiogenic diseases, for example, diabetic retinopathy, retinopathy of prematurity, macular degeneration, corneal graft rejection, neovascular glaucoma, retrolental fibroplasia, rubeosis, retinoblastoma, uvietis and Pterygia (abnormal blood vessel growth) of the eye; rheumatoid arthritis; psoriasis; delayed wound healing; endometriosis; vasculogenesis; granulations; hypertrophic scars (keloids); nonunion fractures; scleroderma; trachoma; vascular adhesions; myocardial angiogenesis; coronary collaterals; cerebral collaterals; arteriovenous malformations; ischemic limb angiogenesis; Osler-Webber Syndrome; plaque neovascularization; telangiectasia; hemophiliac joints; angiofibroma; fibromuscular dysplasia; wound granulation; Crohn's disease; and atherosclerosis.

[0684] For example, within one aspect of the present invention methods are provided for treating hypertrophic scars and keloids, comprising the step of administering a polynucleotide, polypeptide, antagonist and/or agonist of the invention to a hypertrophic scar or keloid.

[0685] Within one embodiment of the present invention polynucleotides, polypeptides, antagonists and/or agonists of the invention are directly injected into a hypertrophic scar or keloid, in order to prevent the progression of these lesions. This therapy is of particular value in the prophylactic treatment of conditions which are known to result in the development of hypertrophic scars and keloids (e.g., burns), and is preferably initiated after the proliferative phase has had time to progress (approximately 14 days after the initial injury), but before hypertrophic scar or keloid development. As noted above, the present invention also provides methods for treating neovascular diseases of the eye, including for example, corneal neovascularization, neovascular glaucoma, proliferative diabetic retinopathy, retrolental fibroplasia and macular degeneration.

[0686] Moreover, ocular disorders associated with neovascularization which can be treated with the polynucleotides and polypeptides of the present invention (including agonists and/or antagonists) include, but are not limited to: neovascular glaucoma, diabetic retinopathy, retinoblastoma, retrolental fibroplasia, uveitis, retinopathy of prematurity macular degeneration, corneal graft neovascularization, as well as other eye inflammatory diseases, ocular tumors and diseases associated with choroidal or iris neovascularization. See, e.g., reviews by Waltman et al., Am. J. Ophthal. 85:704-710 (1978) and Gartner et al., Surv. Ophthal 22:291-312 (1978).

[0687] Thus, within one aspect of the present invention methods are provided for treating neovascular diseases of the eye such as corneal neovascularization (including corneal graft neovascularization), comprising the step of administering to a patient a therapeutically effective amount of a compound (as described above) to the cornea, such that the formation of blood vessels is inhibited. Briefly, the cornea is a tissue, which normally lacks blood vessels. In certain pathological conditions however, capillaries may extend into the cornea from the pericorneal vascular plexus of the limbus. When the cornea becomes vascularized, it also becomes clouded, resulting in a decline in the patient's visual acuity. Visual loss may become complete if the cornea completely opacitates. A wide variety of disorders can result in corneal neovascularization, including for example, corneal infections (e.g., trachoma, herpes simplex keratitis, leishmaniasis and onchocerciasis), immunological processes (e.g., graft rejection and Stevens-Johnson's syndrome), alkali burns, trauma, inflammation (of any cause), toxic and nutritional deficiency states, and as a complication of wearing contact lenses.

[0688] Within particularly preferred embodiments of the invention, may be prepared for topical administration in saline (combined with any of the preservatives and antimicrobial agents commonly used in ocular preparations), and administered in eyedrop form. The solution or suspension may be prepared in its pure form and administered several times daily. Alternatively, anti-angiogenic compositions, prepared as described above, may also be administered directly to the cornea. Within preferred embodiments, the anti-angiogenic composition is prepared with a muco-adhesive polymer, which binds to cornea. Within further embodiments, the anti-angiogenic factors or anti-angiogenic compositions may be utilized as an adjunct to conventional steroid therapy. Topical therapy may also be useful prophylactically in corneal lesions which are known to have a high probability of inducing an angiogenic response (such as chemical burns). In these instances the treatment, likely in combination with steroids, may be instituted immediately to help prevent subsequent complications.

[0689] Within other embodiments, the compounds described above may be injected directly into the corneal stroma by an ophthalmologist under microscopic guidance. The preferred site of injection may vary with the morphology of the individual lesion, but the goal of the administration would be to place the composition at the advancing front of the vasculature (i.e., interspersed between the blood vessels and the normal cornea). In most cases this would involve perilimbic corneal injection to “protect” the cornea from the advancing blood vessels. This method may also be utilized shortly after a corneal insult in order to prophylactically prevent corneal neovascularization. In this situation, the material could be injected in the perilimbic cornea interspersed between the corneal lesion and its undesired potential limbic blood supply. Such methods may also be utilized in a similar fashion to prevent capillary invasion of transplanted corneas. In a sustained-release form, injections might only be required 2-3 times per year. A steroid could also be added to the injection solution to reduce inflammation resulting from the injection itself.

[0690] Within another aspect of the present invention, methods are provided for treating neovascular glaucoma, comprising the step of administering to a patient a therapeutically effective amount of a polynucleotide, polypeptide, antagonist and/or agonist to the eye, such that the formation of blood vessels is inhibited. In one embodiment, the compound may be administered topically to the eye in order to treat early forms of neovascular glaucoma. Within other embodiments, the compound may be implanted by injection into the region of the anterior chamber angle. Within other embodiments, the compound may also be placed in any location such that the compound is continuously released into the aqueous humor. Within another aspect of the present invention, methods are provided for treating proliferative diabetic retinopathy, comprising the step of administering to a patient a therapeutically effective amount of a polynucleotide, polypeptide, antagonist and/or agonist to the eyes, such that the formation of blood vessels is inhibited.

[0691] Within particularly preferred embodiments of the invention, proliferative diabetic retinopathy may be treated by injection into the aqueous humor or the vitreous, in order to increase the local concentration of the polynucleotide, polypeptide, antagonist and/or agonist in the retina. Preferably, this treatment should be initiated prior to the acquisition of severe disease requiring photocoagulation.

[0692] Within another aspect of the present invention, methods are provided for treating retrolental fibroplasia, comprising the step of administering to a patient a therapeutically effective amount of a polynucleotide, polypeptide, antagonist and/or agonist to the eye, such that the formation of blood vessels is inhibited. The compound may be administered topically, via intravitreous injection and/or via intraocular implants.

[0693] Additionally, disorders which can be treated with the polynucleotides, polypeptides, agonists and/or agonists include, but are not limited to, hemangioma, arthritis, psoriasis, angiofibroma, atherosclerotic plaques, delayed wound healing,, granulations, hemophilic joints, hypertrophic scars, nonunion fractures, Osler-Weber syndrome, pyogenic granuloma, scleroderma, trachoma, and vascular adhesions.

[0694] Moreover, disorders and/or states, which can be treated, prevented, diagnosed and/or prognosed with the polynucleotides, polypeptides, agonists and/or agonists of the invention include, but are not limited to, solid tumors, blood born tumors such as leukemias, tumor metastasis, Kaposi's sarcoma, benign tumors, for example hemangiomas, acoustic neuromas, neurofibromas, trachomas, and pyogenic granulomas, rheumatoid arthritis, psoriasis, ocular angiogenic diseases, for example, diabetic retinopathy, retinopathy of prematurity, macular degeneration, corneal graft rejection, neovascular glaucoma, retrolental fibroplasia, rubeosis, retinoblastoma, and uvietis, delayed wound healing, endometriosis, vasculogenesis, granulations, hypertrophic scars (keloids), nonunion fractures, scleroderma, trachoma, vascular adhesions, myocardial angiogenesis, coronary collaterals, cerebral collaterals, arteriovenous malformations, ischemic limb angiogenesis, Osler-Webber Syndrome, plaque neovascularization, telangiectasia, hemophiliac joints, angiofibroma fibromuscular dysplasia, wound granulation, Crohn's disease, atherosclerosis, birth control agent by preventing vascularization required for embryo implantation controlling menstruation, diseases that have angiogenesis as a pathologic consequence such as cat scratch disease (Rochele minalia quintosa), ulcers (Helicobacter pylori), Bartonellosis and bacillary angiomatosis.

[0695] In one aspect of the birth control method, an amount of the compound sufficient to block embryo implantation is administered before or after intercourse and fertilization have occurred, thus providing an effective method of birth control, possibly a “morning after” method. Polynucleotides, polypeptides, agonists and/or agonists may also be used in controlling menstruation or administered as either a peritoneal lavage fluid or for peritoneal implantation in the treatment of endometriosis.

[0696] Polynucleotides, polypeptides, agonists and/or agonists of the present invention may be incorporated into surgical sutures in order to prevent stitch granulomas.

[0697] Polynucleotides, polypeptides, agonists and/or agonists may be utilized in a wide variety of surgical procedures. For example, within one aspect of the present invention a compositions (in the form of, for example, a spray or film) may be utilized to coat or spray an area prior to removal of a tumor, in order to isolate normal surrounding tissues from malignant tissue, and/or to prevent the spread of disease to surrounding tissues. Within other aspects of the present invention, compositions (e.g., in the form of a spray) may be delivered via endoscopic procedures in order to coat tumors, or inhibit angiogenesis in a desired locale. Within yet other aspects of the present invention, surgical meshes, which have been coated with anti-angiogenic compositions of the present invention may be utilized in any procedure wherein a surgical mesh might be utilized. For example, within one embodiment of the invention a surgical mesh laden with an anti-angiogenic composition may be utilized during abdominal cancer resection surgery (e.g., subsequent to colon resection) in order to provide support to the structure, and to release an amount of the anti-angiogenic factor.

[0698] Within further aspects of the present invention, methods are provided for treating tumor excision sites, comprising administering a polynucleotide, polypeptide, agonist and/or agonist to the resection margins of a tumor subsequent to excision, such that the local recurrence of cancer and the formation of new blood vessels at the site is inhibited. Within one embodiment of the invention, the anti-angiogenic compound is administered directly to the tumor excision site (e.g., applied by swabbing, brushing or otherwise coating the resection margins of the tumor with the anti-angiogenic compound). Alternatively, the anti-angiogenic compounds may be incorporated into known surgical pastes prior to administration. Within particularly preferred embodiments of the invention, the anti-angiogenic compounds are applied after hepatic resections for malignancy, and after neurosurgical operations.

[0699] Within one aspect of the present invention, polynucleotides, polypeptides, agonists and/or agonists may be administered to the resection margin of a wide variety of tumors, including for example, breast, colon, brain and hepatic tumors. For example, within one embodiment of the invention, anti-angiogenic compounds may be administered to the site of a neurological tumor subsequent to excision, such that the formation of new blood vessels at the site are inhibited.

[0700] The polynucleotides, polypeptides, agonists and/or agonists of the present invention may also be administered along with other anti-angiogenic factors. Representative examples of other anti-angiogenic factors include: Anti-Invasive Factor, retinoic acid and derivatives thereof, paclitaxel, Suramin, Tissue Inhibitor of Metalloproteinase-1, Tissue Inhibitor of Metalloproteinase-2, Plasminogen Activator Inhibitor-1, Plasminogen Activator Inhibitor-2, and various forms of the lighter “d group” transition metals.

[0701] Lighter “d group” transition metals include, for example, vanadium, molybdenum, tungsten, titanium, niobium, and tantalum species. Such transition metal species may form transition metal complexes. Suitable complexes of the above-mentioned transition metal species include oxo transition metal complexes.

[0702] Representative examples of vanadium complexes include oxo vanadium complexes such as vanadate and vanadyl complexes. Suitable vanadate complexes include metavanadate and orthovanadate complexes such as, for example, ammonium metavanadate, sodium metavanadate, and sodium orthovanadate. Suitable vanadyl complexes include, for example, vanadyl acetylacetonate and vanadyl sulfate including vanadyl sulfate hydrates such as vanadyl sulfate mono- and trihydrates.

[0703] Representative examples of tungsten and molybdenum complexes also include oxo complexes. Suitable oxo tungsten complexes include tungstate and tungsten oxide complexes. Suitable tungstate complexes include ammonium tungstate, calcium tungstate, sodium tungstate dihydrate, and tungstic acid. Suitable tungsten oxides include tungsten (IV) oxide and tungsten (VI) oxide. Suitable oxo molybdenum complexes include molybdate, molybdenum oxide, and molybdenyl complexes. Suitable molybdate complexes include ammonium molybdate and its hydrates, sodium molybdate and its hydrates, and potassium molybdate and its hydrates. Suitable molybdenum oxides include molybdenum (VI) oxide, molybdenum (VI) oxide, and molybdic acid. Suitable molybdenyl complexes include, for example, molybdenyl acetylacetonate. Other suitable tungsten and molybdenum complexes include hydroxo derivatives derived from, for example, glycerol, tartaric acid, and sugars.

[0704] A wide variety of other anti-angiogenic factors may also be utilized within the context of the present invention. Representative examples include platelet factor 4; protamine sulphate; sulphated chitin derivatives (prepared from queen crab shells), (Murata et al., Cancer Res. 51:22-26 (1991)); Sulphated Polysaccharide Peptidoglycan Complex (SP-PG) (the function of this compound may be enhanced by the presence of steroids such as estrogen, and tamoxifen citrate); Staurosporine; modulators of matrix metabolism, including for example, proline analogs, cishydroxyproline, d,L-3,4-dehydroproline, Thiaproline, alpha,alpha-dipyridyl, aminopropionitrile fumarate; 4-propyl-5-(4-pyridinyl)-2(3H)-oxazolone; Methotrexate; Mitoxantrone; Heparin; Interferons; 2 Macroglobulin-serum; ChIMP-3 (Pavloff et al., J. Bio. Chem. 267:17321-17326 (1992)); Chymostatin (Tomkinson et al., Biochem J. 286:475-480 (1992)); Cyclodextrin Tetradecasulfate; Eponemycin; Camptothecin; Fumagillin (Ingber et al., Nature 348:555-557 (1990)); Gold Sodium Thiomalate (“GST”; Matsubara and Ziff, J. Clin. Invest. 79:1440-1446 (1987)); anticollagenase-serum; alpha2-antiplasmin (Holmes et al., J. Biol. Chem. 262(4):1659-1664 (1987)); Bisantrene (National Cancer Institute); Lobenzarit disodium (N-(2)-carboxyphenyl-4-chloroanthronilic acid disodium or “CCA”; Takeuchi et al., Agents Actions 36:312-316, 1992); Thalidomide; Angostatic steroid; AGM-1470; carboxynaminolmidazole; and metalloproteinase inhibitors such as BB94.

[0705] Musculoskeletal System Disorders

[0706] Polynucleotides, polypeptides, antibodies, and/or agonists or antagonists of the present invention, may be used to treat, prevent, diagnose, and/or prognose disorders of the musculoskeletal system, including but not limited to, disorders of the bone, joints, ligaments, tendons, bursa, muscle, and/or neoplasms and cancers associated with musculoskeletal tissue.

[0707] Diseases or disorders of the bone include, but are not limited to, Albers-Schönberg disease, bowlegs, heel spurs, Kohler's bone disease, knock-knees, Legg-Calvé-Perthes disease, Marfan's syndrome, mucopolysaccharidoses, Osgood-Schlatter disease, osteochondroses, osteochondrodysplasia, osteomyelitis, osteopetroses, osteoporosis (postmenopausal, senile, and juvenile), Paget's disease, Scheuermann's disease, scoliosis, Sever's disease, and patellofemoral stress syndrome.

[0708] Joint diseases or disorders include, but are not limited to, ankylosing spondylitis, Behçet's syndrome, CREST syndrome, Ehlers-Danlos syndrome, infectious arthritis, discoid lupus erythematosus, systemic lupus erythematosus, Lyme disease, osteoarthritis, psoriatic arthritis, relapsing polychondrites, Reiter's syndrome, rheumatoid arthritis (adult and juvenile), scleroderma, and Still's disease.

[0709] Diseases or disorders affecting ligaments, tendons, or bursa include, but are not limited to, ankle sprain, bursitis, posterior Achilles tendon bursitis (Haglund's deformity), anterior Achilles tendon bursitis (Albert's disease), tendinitis, tenosynovitis, poplieus tendinitis, Achilles tendinitis, medial or lateral epicondylitis, rotator cuff tendinitis, spasmodic torticollis, and fibromyalgia syndrome.

[0710] Muscle diseases or disorders include, but are not limited to, Becker's muscular dystrophy, Duchenne's muscular dystrophy, Landouzy-Dejerine muscular dystrophy, Leyden-Möbius muscular dystrophy, Erb's muscular dystrophy, Charcot's joints, dermatomyositis, gout, pseudogout, glycogen storage diseases, Pompe's disease, mitochondrial myopathy, periodic paralysis, polymyalgia rheumatica, polymyositis, Steinert's disease, Thomsen's disease, anterolateral and posteromedial shin splints, posterior femoral muscle strain, and fibromyositis.

[0711] Musculoskeletal tissue may also develop cancers and/or neoplasms that include, but are not limited to, osteochondroma, benign chondroma, chondroblastoma, chondromyxoid fibroma, osteoid osteoma, giant cell tumor, multiple myeloma, osteosarcoma, fibrosarcoma, malignant fibrous histiocytoma, chondrosarcoma, Ewing's tumor, and malignant lymphoma of bone.

[0712] Neural Activity and Neurological Diseases

[0713] The polynucleotides, polypeptides and agonists or antagonists of the invention may be used for the diagnosis and/or treatment of diseases, disorders, damage or injury of the brain and/or nervous system. Nervous system disorders that can be treated with the compositions of the invention (e.g., polypeptides, polynucleotides, and/or agonists or antagonists), include, but are not limited to, nervous system injuries, and diseases or disorders which result in either a disconnection of axons, a diminution or degeneration of neurons, or demyelination. Nervous system lesions which may be treated in a patient (including human and non-human mammalian patients) according to the methods of the invention, include but are not limited to, the following lesions of either the central (including spinal cord, brain) or peripheral nervous systems: (1) ischemic lesions, in which a lack of oxygen in a portion of the nervous system results in neuronal injury or death, including cerebral infarction or ischemia, or spinal cord infarction or ischemia; (2) traumatic lesions, including lesions caused by physical injury or associated with surgery, for example, lesions which sever a portion of the nervous system, or compression injuries; (3) malignant lesions, in which a portion of the nervous system is destroyed or injured by malignant tissue which is either a nervous system associated malignancy or a malignancy derived from non-nervous system tissue; (4) infectious lesions, in which a portion of the nervous system is destroyed or injured as a result of infection, for example, by an abscess or associated with infection by human immunodeficiency virus, herpes zoster, or herpes simplex virus or with Lyme disease, tuberculosis, or syphilis; (5) degenerative lesions, in which a portion of the nervous system is destroyed or injured as a result of a degenerative process including but not limited to, degeneration associated with Parkinson's disease, Alzheimer's disease, Huntington's chorea, or amyotrophic lateral sclerosis (ALS); (6) lesions associated with nutritional diseases or disorders, in which a portion of the nervous system is destroyed or injured by a nutritional disorder or disorder of metabolism including, but not limited to, vitamin B12 deficiency, folic acid deficiency, Wernicke disease, tobacco-alcohol amblyopia, Marchiafava-Bignami disease (primary degeneration of the corpus callosum), and alcoholic cerebellar degeneration; (7) neurological lesions associated with systemic diseases including, but not limited to, diabetes (diabetic neuropathy, Bell's palsy), systemic lupus erythematosus, carcinoma, or sarcoidosis; (8) lesions caused by toxic substances including alcohol, lead, or particular neurotoxins; and (9) demyelinated lesions in which a portion of the nervous system is destroyed or injured by a demyelinating disease including, but not limited to, multiple sclerosis, human immunodeficiency virus-associated myelopathy, transverse myelopathy or various etiologies, progressive multifocal leukoencephalopathy, and central pontine myelinolysis.

[0714] In one embodiment, the polypeptides, polynucleotides, or agonists or antagonists of the invention are used to protect neural cells from the damaging effects of hypoxia. In a further preferred embodiment, the polypeptides, polynucleotides, or agonists or antagonists of the invention are used to protect neural cells from the damaging effects of cerebral hypoxia. According to this embodiment, the compositions of the invention are used to treat or prevent neural cell injury associated with cerebral hypoxia. In one non-exclusive aspect of this embodiment, the polypeptides, polynucleotides, or agonists or antagonists of the invention, are used to treat or prevent neural cell injury associated with cerebral ischemia. In another non-exclusive aspect of this embodiment, the polypeptides, polynucleotides, or agonists or antagonists of the invention are used to treat or prevent neural cell injury associated with cerebral infarction.

[0715] In another preferred embodiment, the polypeptides, polynucleotides, or agonists or antagonists of the invention are used to treat or prevent neural cell injury associated with a stroke. In a specific embodiment, the polypeptides, polynucleotides, or agonists or antagonists of the invention are used to treat or prevent cerebral neural cell injury associated with a stroke.

[0716] In another preferred embodiment, the polypeptides, polynucleotides, or agonists or antagonists of the invention are used to treat or prevent neural cell injury associated with a heart attack. In a specific embodiment, the polypeptides, polynucleotides, or agonists or antagonists of the invention are used to treat or prevent cerebral neural cell injury associated with a heart attack.

[0717] The compositions of the invention which are useful for treating or preventing a nervous system disorder may be selected by testing for biological activity in promoting the survival or differentiation of neurons. For example, and not by way of limitation, compositions of the invention which elicit any of the following effects may be useful according to the invention: (1) increased survival time of neurons in culture either in the presence or absence of hypoxia or hypoxic conditions; (2) increased sprouting of neurons in culture or in vivo; (3) increased production of a neuron-associated molecule in culture or in vivo, e.g., choline acetyltransferase or acetylcholinesterase with respect to motor neurons; or (4) decreased symptoms of neuron dysfunction in vivo. Such effects may be measured by any method known in the art. In preferred, non-limiting embodiments, increased survival of neurons may routinely be measured using a method set forth herein or otherwise known in the art, such as, for example, in Zhang et al., Proc Natl Acad Sci USA 97:3637-42 (2000) or in Arakawa et al., J. Neurosci., 10:3507-15 (1990); increased sprouting of neurons may be detected by methods known in the art, such as, for example, the methods set forth in Pestronk et al., Exp. Neurol., 70:65-82 (1980), or Brown et al., Ann. Rev. Neurosci., 4:17-42 (1981); increased production of neuron-associated molecules may be measured by bioassay, enzymatic assay, antibody binding, Northern blot assay, etc., using techniques known in the art and depending on the molecule to be measured; and motor neuron dysfunction may be measured by assessing the physical manifestation of motor neuron disorder, e.g., weakness, motor neuron conduction velocity, or functional disability.

[0718] In specific embodiments, motor neuron disorders that may be treated according to the invention include, but are not limited to, disorders such as infarction, infection, exposure to toxin, trauma, surgical damage, degenerative disease or malignancy that may affect motor neurons as well as other components of the nervous system, as well as disorders that selectively affect neurons such as amyotrophic lateral sclerosis, and including, but not limited to, progressive spinal muscular atrophy, progressive bulbar palsy, primary lateral sclerosis, infantile and juvenile muscular atrophy, progressive bulbar paralysis of childhood (Fazio-Londe syndrome), poliomyelitis and the post polio syndrome, and Hereditary Motorsensory Neuropathy (Charcot-Marie-Tooth Disease).

[0719] Further, polypeptides or polynucleotides of the invention may play a role in neuronal survival; synapse formation; conductance; neural differentiation, etc. Thus, compositions of the invention (including polynucleotides, polypeptides, and agonists or antagonists) may be used to diagnose and/or treat or prevent diseases or disorders associated with these roles, including, but not limited to, learning and/or cognition disorders. The compositions of the invention may also be useful in the treatment or prevention of neurodegenerative disease states and/or behavioural disorders. Such neurodegenerative disease states and/or behavioral disorders include, but are not limited to, Alzheimer's Disease, Parkinson's Disease, Huntington's Disease, Tourette Syndrome, schizophrenia, mania, dementia, paranoia, obsessive compulsive disorder, panic disorder, learning disabilities, ALS, psychoses, autism, and altered behaviors, including disorders in feeding, sleep patterns, balance, and perception. In addition, compositions of the invention may also play a role in the treatment, prevention and/or detection of developmental disorders associated with the developing embryo, or sexually-linked disorders.

[0720] Additionally, polypeptides, polynucleotides and/or agonists or antagonists of the invention, may be useful in protecting neural cells from diseases, damage, disorders, or injury, associated with cerebrovascular disorders including, but not limited to, carotid artery diseases (e.g., carotid artery thrombosis, carotid stenosis, or Moyamoya Disease), cerebral amyloid angiopathy, cerebral aneurysm, cerebral anoxia, cerebral arteriosclerosis, cerebral arteriovenous malformations, cerebral artery diseases, cerebral embolism and thrombosis (e.g., carotid artery thrombosis, sinus thrombosis, or Wallenberg's Syndrome), cerebral hemorrhage (e.g., epidural or subdural hematoma, or subarachnoid hemorrhage), cerebral infarction, cerebral ischemia (e.g., transient cerebral ischemia, Subclavian Steal Syndrome, or vertebrobasilar insufficiency), vascular dementia (e.g., multi-infarct), leukomalacia, periventricular, and vascular headache (e.g., cluster headache or migraines).

[0721] In accordance with yet a further aspect of the present invention, there is provided a process for utilizing polynucleotides or polypeptides, as well as agonists or antagonists of the present invention, for therapeutic purposes, for example, to stimulate neurological cell proliferation and/or differentiation. Therefore, polynucleotides, polypeptides, agonists and/or antagonists of the invention may be used to treat and/or detect neurologic diseases. Moreover, polynucleotides or polypeptides, or agonists or antagonists of the invention, can be used as a marker or detector of a particular nervous system disease or disorder.

[0722] Examples of neurologic diseases which can be treated or detected with polynucleotides, polypeptides, agonists, and/or antagonists of the present invention include brain diseases, such as metabolic brain diseases which includes phenylketonuria such as maternal phenylketonuria, pyruvate carboxylase deficiency, pyruvate dehydrogenase complex deficiency, Wernicke's Encephalopathy, brain edema, brain neoplasms such as cerebellar neoplasms which include infratentorial neoplasms, cerebral ventricle neoplasms such as choroid plexus neoplasms, hypothalamic neoplasms, supratentorial neoplasms, canavan disease, cerebellar diseases such as cerebellar ataxia which include spinocerebellar degeneration such as ataxia telangiectasia, cerebellar dyssynergia, Friederich's Ataxia, Machado-Joseph Disease, olivopontocerebellar atrophy, cerebellar neoplasms such as infratentorial neoplasms, diffuse cerebral sclerosis such as encephalitis periaxialis, globoid cell leukodystrophy, metachromatic leukodystrophy and subacute sclerosing panencephalitis.

[0723] Additional neurologic diseases which can be treated or detected with polynucleotides, polypeptides, agonists, and/or antagonists of the present invention include cerebrovascular disorders (such as carotid artery diseases which include carotid artery thrombosis, carotid stenosis and Moyamoya Disease), cerebral amyloid angiopathy, cerebral aneurysm, cerebral anoxia, cerebral arteriosclerosis, cerebral arteriovenous malformations, cerebral artery diseases, cerebral embolism and thrombosis such as carotid artery thrombosis, sinus thrombosis and Wallenberg's Syndrome, cerebral hemorrhage such as epidural hematoma, subdural hematoma and subarachnoid hemorrhage, cerebral infarction, cerebral ischemia such as transient cerebral ischemia, Subclavian Steal Syndrome and vertebrobasilar insufficiency, vascular dementia such as multi-infarct dementia, periventricular leukomalacia, vascular headache such as cluster headache and migraine.

[0724] Additional neurologic diseases which can be treated or detected with polynucleotides, polypeptides, agonists, and/or antagonists of the present invention include dementia such as AIDS Dementia Complex, presenile dementia such as Alzheimer's Disease and Creutzfeldt-Jakob Syndrome, senile dementia such as Alzheimer's Disease and progressive supranuclear palsy, vascular dementia such as multi-infarct dementia, encephalitis which include encephalitis periaxialis, viral encephalitis such as epidemic encephalitis, Japanese Encephalitis, St. Louis Encephalitis, tick-borne encephalitis and West Nile Fever, acute disseminated encephalomyelitis, meningoencephalitis such as uveomeningoencephalitic syndrome, Postencephalitic Parkinson Disease and subacute sclerosing panencephalitis, encephalomalacia such as periventricular leukomalacia, epilepsy such as generalized epilepsy which includes infantile spasms, absence epilepsy, myoclonic epilepsy which includes MERRF Syndrome, tonic-clonic epilepsy, partial epilepsy such as complex partial epilepsy, frontal lobe epilepsy and temporal lobe epilepsy, post-traumatic epilepsy, status epilepticus such as Epilepsia Partialis Continua, and Hallervorden-Spatz Syndrome.

[0725] Additional neurologic diseases which can be treated or detected with polynucleotides, polypeptides, agonists, and/or antagonists of the present invention include hydrocephalus such as Dandy-Walker Syndrome and normal pressure hydrocephalus, hypothalamic diseases such as hypothalamic neoplasms, cerebral malaria, narcolepsy which includes cataplexy, bulbar poliomyelitis, cerebri pseudotumor, Rett Syndrome, Reye's Syndrome, thalamic diseases, cerebral toxoplasmosis, intracranial tuberculoma and Zellweger Syndrome, central nervous system infections such as AIDS Dementia Complex, Brain Abscess, subdural empyema, encephalomyelitis such as Equine Encephalomyelitis, Venezuelan Equine Encephalomyelitis, Necrotizing Hemorrhagic Encephalomyelitis, Visna, and cerebral malaria.

[0726] Additional neurologic diseases which can be treated or detected with polynucleotides, polypeptides, agonists, and/or antagonists of the present invention include meningitis such as arachnoiditis, aseptic meningtitis such as viral meningtitis which includes lymphocytic choriomeningitis, Bacterial meningtitis which includes Haemophilus Meningtitis, Listeria Meningtitis, Meningococcal Meningtitis such as Waterhouse-Friderichsen Syndrome, Pneumococcal Meningtitis and meningeal tuberculosis, fungal meningitis such as Cryptococcal Meningtitis, subdural effusion, meningoencephalitis such as uvemeningoencephalitic syndrome, myelitis such as transverse myelitis, neurosyphilis such as tabes dorsalis, poliomyelitis which includes bulbar poliomyelitis and postpoliomyelitis syndrome, prion diseases (such as Creutzfeldt-Jakob Syndrome, Bovine Spongiform Encephalopathy, Gerstmann-Straussler Syndrome, Kuru, Scrapie), and cerebral toxoplasmosis.

[0727] Additional neurologic diseases which can be treated or detected with polynucleotides, polypeptides, agonists, and/or antagonists of the present invention include central nervous system neoplasms such as brain neoplasms that include cerebellar neoplasms such as infratentorial neoplasms, cerebral ventricle neoplasms such as choroid plexus neoplasms, hypothalamic neoplasms and supratentorial neoplasms, meningeal neoplasms, spinal cord neoplasms which include epidural neoplasms, demyelinating diseases such as Canavan Diseases, diffuse cerebral sceloris which includes adrenoleukodystrophy, encephalitis periaxialis, globoid cell leukodystrophy, diffuse cerebral sclerosis such as metachromatic leukodystrophy, allergic encephalomyelitis, necrotizing hemorrhagic encephalomyelitis, progressive multifocal leukoencephalopathy, multiple sclerosis, central pontine myelinolysis, transverse myelitis, neuromyelitis optica, Scrapie, Swayback, Chronic Fatigue Syndrome, Visna, High Pressure Nervous Syndrome, Meningism, spinal cord diseases such as amyotonia congenita, amyotrophic lateral sclerosis, spinal muscular atrophy such as Werdnig-Hoffmann Disease, spinal cord compression, spinal cord neoplasms such as epidural neoplasms, syringomyelia, Tabes Dorsalis, Stiff-Man Syndrome, mental retardation such as Angelman Syndrome, Cri-du-Chat Syndrome, De Lange's Syndrome, Down Syndrome, Gangliosidoses such as gangliosidoses G(M1), Sandhoff Disease, Tay-Sachs Disease, Hartnup Disease, homocystinuria, Laurence-Moon-Biedl Syndrome, Lesch-Nyhan Syndrome, Maple Syrup Urine Disease, mucolipidosis such as fucosidosis, neuronal ceroid-lipofuscinosis, oculocerebrorenal syndrome, phenylketonuria such as maternal phenylketonuria, Prader-Willi Syndrome, Rett Syndrome, Rubinstein-Taybi Syndrome, Tuberous Sclerosis, WAGR Syndrome, nervous system abnormalities such as holoprosencephaly, neural tube defects such as anencephaly which includes hydrangencephaly, Arnold-Chairi Deformity, encephalocele, meningocele, meningomyelocele, spinal dysraphism such as spina bifida cystica and spina bifida occulta.

[0728] Additional neurologic diseases which can be treated or detected with polynucleotides, polypeptides, agonists, and/or antagonists of the present invention include hereditary motor and sensory neuropathies which include Charcot-Marie Disease, Hereditary optic atrophy, Refsum's Disease, hereditary spastic paraplegia, Werdnig-Hoffmann Disease, Hereditary Sensory and Autonomic Neuropathies such as Congenital Analgesia and Familial Dysautonomia, Neurologic manifestations (such as agnosia that include Gerstmann's Syndrome, Amnesia such as retrograde amnesia, apraxia, neurogenic bladder, cataplexy, communicative disorders such as hearing disorders that includes deafness, partial hearing loss, loudness recruitment and tinnitus, language disorders such as aphasia which include agraphia, anomia, broca aphasia, and Wernicke Aphasia, Dyslexia such as Acquired Dyslexia, language development disorders, speech disorders such as aphasia which includes anomia, broca aphasia and Wernicke Aphasia, articulation disorders, communicative disorders such as speech disorders which include dysarthria, echolalia, mutism and stuttering, voice disorders such as aphonia and hoarseness, decerebrate state, delirium, fasciculation, hallucinations, meningism, movement disorders such as angelman syndrome, ataxia, athetosis, chorea, dystonia, hypokinesia, muscle hypotonia, myoclonus, tic, torticollis and tremor, muscle hypertonia such as muscle rigidity such as stiff-man syndrome, muscle spasticity, paralysis such as facial paralysis which includes Herpes Zoster Oticus, Gastroparesis, Hemiplegia, ophthalmoplegia such as diplopia, Duane's Syndrome, Horner's Syndrome, Chronic progressive external ophthalmoplegia such as Kearns Syndrome, Bulbar Paralysis, Tropical Spastic Paraparesis, Paraplegia such as Brown-Sequard Syndrome, quadriplegia, respiratory paralysis and vocal cord paralysis, paresis, phantom limb, taste disorders such as ageusia and dysgeusia, vision disorders such as amblyopia, blindness, color vision defects, diplopia, hemianopsia, scotoma and subnormal vision, sleep disorders such as hypersomnia which includes Kleine-Levin Syndrome, insomnia, and somnambulism, spasm such as trismus, unconsciousness such as coma, persistent vegetative state and syncope and vertigo, neuromuscular diseases such as amyotonia congenita, amyotrophic lateral sclerosis, Lambert-Eaton Myasthenic Syndrome, motor neuron disease, muscular atrophy such as spinal muscular atrophy, Charcot-Marie Disease and Werdnig-Hoffmann Disease, Postpoliomyelitis Syndrome, Muscular Dystrophy, Myasthenia Gravis, Myotonia Atrophica, Myotonia Confenita, Nemaline Myopathy, Familial Periodic Paralysis, Multiplex Paramyloclonus, Tropical Spastic Paraparesis and Stiff-Man Syndrome, peripheral nervous system diseases such as acrodynia, amyloid neuropathies, autonomic nervous system diseases such as Adie's Syndrome, Barre-Lieou Syndrome, Familial Dysautonomia, Horner's Syndrome, Reflex Sympathetic Dystrophy and Shy-Drager Syndrome, Cranial Nerve Diseases such as Acoustic Nerve Diseases such as Acoustic Neuroma which includes Neurofibromatosis 2, Facial Nerve Diseases such as Facial Neuralgia,Melkersson-Rosenthal Syndrome, ocular motility disorders which includes amblyopia, nystagmus, oculomotor nerve paralysis, ophthalmoplegia such as Duane's Syndrome, Horner's Syndrome, Chronic Progressive External Ophthalmoplegia which includes Kearns Syndrome, Strabismus such as Esotropia and Exotropia, Oculomotor Nerve Paralysis, Optic Nerve Diseases such as Optic Atrophy which includes Hereditary Optic Atrophy, Optic Disk Drusen, Optic Neuritis such as Neuromyelitis Optica, Papilledema, Trigeminal Neuralgia, Vocal Cord Paralysis, Demyelinating Diseases such as Neuromyelitis Optica and Swayback, and Diabetic neuropathies such as diabetic foot.

[0729] Additional neurologic diseases which can be treated or detected with polynucleotides, polypeptides, agonists, and/or antagonists of the present invention include nerve compression syndromes such as carpal tunnel syndrome, tarsal tunnel syndrome, thoracic outlet syndrome such as cervical rib syndrome, ulnar nerve compression syndrome, neuralgia such as causalgia, cervico-brachial neuralgia, facial neuralgia and trigeminal neuralgia, neuritis such as experimental allergic neuritis, optic neuritis, polyneuritis, polyradiculoneuritis and radiculities such as polyradiculitis, hereditary motor and sensory neuropathies such as Charcot-Marie Disease, Hereditary Optic Atrophy, Refsum's Disease, Hereditary Spastic Paraplegia and Werdnig-Hoffmann Disease, Hereditary Sensory and Autonomic Neuropathies which include Congenital Analgesia and Familial Dysautonomia, POEMS Syndrome, Sciatica, Gustatory Sweating and Tetany).

[0730] Endocrine Disorders

[0731] Polynucleotides or polypeptides, or agonists or antagonists of the present invention, may be used to treat, prevent, diagnose, and/or prognose disorders and/or diseases related to hormone imbalance, and/or disorders or diseases of the endocrine system.

[0732] Hormones secreted by the glands of the endocrine system control physical growth, sexual function, metabolism, and other functions. Disorders may be classified in two ways: disturbances in the production of hormones, and the inability of tissues to respond to hormones. The etiology of these hormone imbalance or endocrine system diseases, disorders or conditions may be genetic, somatic, such as cancer and some autoimmune diseases, acquired (e.g., by chemotherapy, injury or toxins), or infectious. Moreover, polynucleotides, polypeptides, antibodies, and/or agonists or antagonists of the present invention can be used as a marker or detector of a particular disease or disorder related to the endocrine system and/or hormone imbalance.

[0733] Endocrine system and/or hormone imbalance and/or diseases encompass disorders of uterine motility including, but not limited to: complications with pregnancy and labor (e.g., pre-term labor, post-term pregnancy, spontaneous abortion, and slow or stopped labor); and disorders and/or diseases of the menstrual cycle (e.g., dysmenorrhea and endometriosis).

[0734] Endocrine system and/or hormone imbalance disorders and/or diseases include disorders and/or diseases of the pancreas, such as, for example, diabetes mellitus, diabetes insipidus, congenital pancreatic agenesis, pheochromocytoma—islet cell tumor syndrome; disorders and/or diseases of the adrenal glands such as, for example, Addison's Disease, corticosteroid deficiency, virilizing disease, hirsutism, Cushing's Syndrome, hyperaldosteronism, pheochromocytoma; disorders and/or diseases of the pituitary gland, such as, for example, hyperpituitarism, hypopituitarism, pituitary dwarfism, pituitary adenoma, panhypopituitarism, acromegaly, gigantism; disorders and/or diseases of the thyroid, including but not limited to, hyperthyroidism, hypothyroidism, Plummer's disease, Graves' disease (toxic diffuse goiter), toxic nodular goiter, thyroiditis (Hashimoto's thyroiditis, subacute granulomatous thyroiditis, and silent lymphocytic thyroiditis), Pendred's syndrome, myxedema, cretinism, thyrotoxicosis, thyroid hormone coupling defect, thymic aplasia, Hurthle cell tumours of the thyroid, thyroid cancer, thyroid carcinoma, Medullary thyroid carcinoma; disorders and/or diseases of the parathyroid, such as, for example, byperparathyroidism, hypoparathyroidism; disorders and/or diseases of the hypothalamus.

[0735] In addition, endocrine system and/or hormone imbalance disorders and/or diseases may also include disorders and/or diseases of the testes or ovaries, including cancer. Other disorders and/or diseases of the testes or ovaries further include, for example, ovarian cancer, polycystic ovary syndrome, Klinefelter's syndrome, vanishing testes syndrome (bilateral anorchia), congenital absence of Leydig's cells, cryptorchidism, Noonan's syndrome, myotonic dystrophy, capillary haemangioma of the testis (benign), neoplasias of the testis and neo-testis.

[0736] Moreover, endocrine system and/or hormone imbalance disorders and/or diseases may also include disorders and/or diseases such as, for example, polyglandular deficiency syndromes, pheochromocytoma, neuroblastoma, multiple Endocrine neoplasia, and disorders and/or cancers of endocrine tissues.

[0737] In another embodiment, a polypeptide of the invention, or polynucleotides, antibodies, agonists, or antagonists corresponding to that polypeptide, may be used to diagnose, prognose, prevent, and/or treat endocrine diseases and/or disorders associated with the tissue(s) in which the polypeptide of the invention is expressed, including one, two, three, four, five, or more tissues disclosed in Table 1A, column 7 (Tissue Distribution Library Code).

[0738] Gastrointestinal Disorders

[0739] Polynucleotides or polypeptides, or agonists or antagonists of the present invention, may be used to treat, prevent, diagnose, and/or prognose gastrointestinal disorders, including inflammatory diseases and/or conditions, infections, cancers (e.g., intestinal neoplasms (carcinoid tumor of the small intestine, non-Hodgkin's lymphoma of the small intestine, small bowl lymphoma)), and ulcers, such as peptic ulcers.

[0740] Gastrointestinal disorders include dysphagia, odynophagia, inflammation of the esophagus, peptic esophagitis, gastric reflux, submucosal fibrosis and stricturing, Mallory-Weiss lesions, leiomyomas, lipomas, epidermal cancers, adeoncarcinomas, gastric retention disorders, gastroenteritis, gastric atrophy, gastric/stomach cancers, polyps of the stomach, autoimmune disorders such as pernicious anemia, pyloric stenosis, gastritis (bacterial, viral, eosinophilic, stress-induced, chronic erosive, atrophic, plasma cell, and Ménétrier's), and peritoneal diseases (e.g., chyloperioneum, hemoperitoneum, mesenteric cyst, mesenteric lymphadenitis, mesenteric vascular occlusion, panniculitis, neoplasms, peritonitis, pneumoperitoneum, bubphrenic abscess).

[0741] Gastrointestinal disorders also include disorders associated with the small intestine, such as malabsorption syndromes, distension, irritable bowel syndrome, sugar intolerance, celiac disease, duodenal ulcers, duodenitis, tropical sprue, Whipple's disease, intestinal lymphangiectasia, Crohn's disease, appendicitis, obstructions of the ileum, Meckel's diverticulum, multiple diverticula, failure of complete rotation of the small and large intestine, lymphoma, and bacterial and parasitic diseases (such as Traveler's diarrhea, typhoid and paratyphoid, cholera, infection by Roundworms (Ascariasis lumbricoides), Hookworms (Ancylostoma duodenale), Threadworms (Enterobius vermicularis), Tapeworms (Taenia saginata, Echinococcus granulosus, Diphyllobothrilim spp., and T. solium).

[0742] Liver diseases and/or disorders include intrahepatic cholestasis (alagille syndrome, biliary liver cirrhosis), fatty liver (alcoholic fatty liver, reye syndrome), hepatic vein thrombosis, hepatolentricular degeneration, hepatomegaly, hepatopulmonary syndrome, hepatorenal syndrome, portal hypertension (esophageal and gastric varices), liver abscess (amebic liver abscess), liver cirrhosis (alcoholic, biliary and experimental), alcoholic liver diseases (fatty liver, hepatitis, cirrhosis), parasitic (hepatic echinococcosis, fascioliasis, amebic liver abscess), jaundice (hemolytic, hepatocellular, and cholestatic), cholestasis, portal hypertension, liver enlargement, ascites, hepatitis (alcoholic hepatitis, animal hepatitis, chronic hepatitis (autoimmune, hepatitis B, hepatitis C, hepatitis D, drug induced), toxic hepatitis, viral human hepatitis (hepatitis A, hepatitis B, hepatitis C, hepatitis D, hepatitis E), Wilson's disease, granulomatous hepatitis, secondary biliary cirrhosis, hepatic encephalopathy, portal hypertension, varices, hepatic encephalopathy, primary biliary cirrhosis, primary sclerosing cholangitis, hepatocellular adenoma, hemangiomas, bile stones, liver failure (hepatic encephalopathy, acute liver failure), and liver neoplasms (angiomyolipoma, calcified liver metastases, cystic liver metastases, epithelial tumors, fibrolamellar hepatocarcinoma, focal nodular hyperplasia, hepatic adenoma, hepatobiliary cystadenoma, hepatoblastoma, hepatocellular carcinoma, hepatoma, liver cancer, liver hemangioendothelioma, mesenchymal hamartoma, mesenchymal tumors of liver, nodular regenerative hyperplasia, benign liver tumors (Hepatic cysts [Simple cysts, Polycystic liver disease, Hepatobiliary cystadenoma, Choledochal cyst], Mesenchymal tumors [Mesenchymal hamartoma, Infantile hemangioendothelioma, Hemangioma, Peliosis hepatis, Lipomas, Inflammatory pseudotumor, Miscellaneous], Epithelial tumors [Bile duct epithelium (Bile duct hamartoma, Bile duct adenoma), Hepatocyte (Adenoma, Focal nodular hyperplasia, Nodular regenerative hyperplasia)], malignant liver tumors [hepatocellular, hepatoblastoma, hepatocellular carcinoma, cholangiocellular, cholangiocarcinoma, cystadenocarcinoma, tumors of blood vessels, angiosarcoma, Karposi's sarcoma, hemangioendothelioma, other tumors, embryonal sarcoma, fibrosarcoma, leiomyosarcoma, rhabdomyosarcoma, carcinosarcoma, teratoma, carcinoid, squamous carcinoma, primary lymphoma]), peliosis hepatis, erythrohepatic porphyria, hepatic porphyria (acute intermittent porphyria, porphyria cutanea tarda), Zellweger syndrome).

[0743] Pancreatic diseases and/or disorders include acute pancreatitis, chronic pancreatitis (acute necrotizing pancreatitis, alcoholic pancreatitis), neoplasms (adenocarcinoma of the pancreas, cystadenocarcinoma, insulinoma, gastrinoma, and glucagonoma, cystic neoplasms, islet-cell tumors, pancreoblastoma), and other pancreatic diseases (e.g., cystic fibrosis, cyst (pancreatic pseudocyst, pancreatic fistula, insufficiency)).

[0744] Gallbladder diseases include gallstones (cholelithiasis and choledocholithiasis), postcholecystectomy syndrome, diverticulosis of the gallbladder, acute cholecystitis, chronic cholecystitis, bile duct tumors, and mucocele.

[0745] Diseases and/or disorders of the large intestine include antibiotic-associated colitis, diverticulitis, ulcerative colitis, acquired megacolon, abscesses, fungal and bacterial infections, anorectal disorders (e.g., fissures, hemorrhoids), colonic diseases (colitis, colonic neoplasms [colon cancer, adenomatous colon polyps (e.g., villous adenoma), colon carcinoma, colorectal cancer], colonic diverticulitis, colonic diverticulosis, megacolon [Hirschsprung disease, toxic megacolon]; sigmoid diseases [proctocolitis, sigmoin neoplasms]), constipation, Crohn's disease, diarrhea (infantile diarrhea, dysentery), duodenal diseases (duodenal neoplasms, duodenal obstruction, duodenal ulcer, duodenitis), enteritis (enterocolitis), HIV enteropathy, ileal diseases (ileal neoplasms, ileitis), immunoproliferative small intestinal disease, inflammatory bowel disease (ulcerative colitis, Crohn's disease), intestinal atresia, parasitic diseases (anisakiasis, balantidiasis, blastocystis infections, cryptosporidiosis, dientamoebiasis, amebic dysentery, giardiasis), intestinal fistula (rectal fistula), intestinal neoplasms (cecal neoplasms, colonic neoplasms, duodenal neoplasms, ileal neoplasms, intestinal polyps, jejunal neoplasms, rectal neoplasms), intestinal obstruction (afferent loop syndrome, duodenal obstruction, impacted feces, intestinal pseudo-obstruction [cecal volvulus], intussusception), intestinal perforation, intestinal polyps (colonic polyps, gardner syndrome, peutz-jeghers syndrome), jejunal diseases (jejunal neoplasms), malabsorption syndromes (blind loop syndrome, celiac disease, lactose intolerance, short bowl syndrome, tropical sprue, whipple's disease), mesenteric vascular occlusion, pneumatosis cystoides intestinalis, protein-losing enteropathies (intestinal lymphagiectasis), rectal diseases (anus diseases, fecal incontinence, hemorrhoids, proctitis, rectal fistula, rectal prolapse, rectocele), peptic ulcer (duodenal ulcer, peptic esophagitis, hemorrhage, perforation, stomach ulcer, Zollinger-Ellison syndrome), postgastrectomy syndromes (dumping syndrome), stomach diseases (e.g., achlorhydria, duodenogastric reflux (bile reflux), gastric antral vascular ectasia, gastric fistula, gastric outlet obstruction, gastritis (atrophic or hypertrophic), gastroparesis, stomach dilatation, stomach diverticulum, stomach neoplasms (gastric cancer, gastric polyps, gastric adenocarcinoma, hyperplastic gastric polyp), stomach rupture, stomach ulcer, stomach volvulus), tuberculosis, visceroptosis, vomiting (e.g., hematemesis, hyperemesis gravidarum, postoperative nausea and vomiting) and hemorrhagic colitis.

[0746] Further diseases and/or disorders of the gastrointestinal system include biliary tract diseases, such as, gastroschisis, fistula (e.g., biliary fistula, esophageal fistula, gastric fistula, intestinal fistula, pancreatic fistula), neoplasms (e.g., biliary tract neoplasms, esophageal neoplasms, such as adenocarcinoma of the esophagus, esophageal squamous cell carcinoma, gastrointestinal neoplasms, pancreatic neoplasms, such as adenocarcinoma of the pancreas, mucinous cystic neoplasm of the pancreas, pancreatic cystic neoplasms, pancreatoblastoma, and peritoneal neoplasms), esophageal disease (e.g., bullous diseases, candidiasis, glycogenic acanthosis, ulceration, barrett esophagus varices, atresia, cyst, diverticulum (e.g., Zenker's diverticulum), fistula (e.g., tracheoesophageal fistula), motility disorders (e.g., CREST syndrome, deglutition disorders, achalasia, spasm, gastroesophageal reflux), neoplasms, perforation (e.g., Boerhaave syndrome, Mallory-Weiss syndrome), stenosis, esophagitis, diaphragmatic hernia (e.g., hiatal hernia); gastrointestinal diseases, such as, gastroenteritis (e.g., cholera morbus, norwalk virus infection), hemorrhage (e.g., hematemesis, melena, peptic ulcer hemorrhage), stomach neoplasms (gastric cancer, gastric polyps, gastric adenocarcinoma, stomach cancer)), hernia (e.g., congenital diaphragmatic hernia, femoral hernia, inguinal hernia, obturator hernia, umbilical hernia, ventral hernia), and intestinal diseases (e.g., cecal diseases (appendicitis, cecal neoplasms)).

[0747] Reproductive System Disorders

[0748] The polynucleotides or polypeptides, or agonists or antagonists of the invention may be used for the diagnosis, treatment, or prevention of diseases and/or disorders of the reproductive system. Reproductive system disorders that can be treated by the compositions of the invention, include, but are not limited to, reproductive system injuries, infections, neoplastic disorders, congenital defects, and diseases or disorders which result in infertility, complications with pregnancy, labor, or parturition, and postpartum difficulties.

[0749] Reproductive system disorders and/or diseases include diseases and/or disorders of the testes, including, but not limited to, testicular atrophy, testicular feminization, cryptorchism (unilateral and bilateral), anorchia, ectopic testis, epididymitis and orchitis (typically resulting from infections such as, for example, gonorrhea, mumps, tuberculosis, and syphilis), testicular torsion, vasitis nodosa, germ cell tumors (e.g., seminomas, embryonal cell carcinomas, teratocarcinomas, choriocarcinomas, yolk sac tumors, and teratomas), stromal tumors (e.g., Leydig cell tumors), hydrocele, hematocele, varicocele, spermatocele, inguinal hernia, and disorders of sperm production (e.g., immotile cilia syndrome, aspermia, asthenozoospermia, azoospermia, oligospermia, and teratozoospermia).

[0750] Reproductive system disorders also include, but are not limited to, disorders of the prostate gland, such as acute non-bacterial prostatitis, chronic non-bacterial prostatitis, acute bacterial prostatitis, chronic bacterial prostatitis, prostatodystonia, prostatosis, granulomatous prostatitis, malacoplakia, benign prostatic hypertrophy or hyperplasia, and prostate neoplastic disorders, including adenocarcinomas, transitional cell carcinomas, ductal carcinomas, and squamous cell carcinomas.

[0751] Additionally, the compositions of the invention may be useful in the diagnosis, treatment, and/or prevention of disorders or diseases of the penis and urethra, including, but not limited to, inflammatory disorders, such as balanoposthitis, balanitis xerotica obliterans, phimosis, paraphimosis, syphilis, herpes simplex virus, gonorrhea, non-gonococcal urethritis, chlamydia, mycoplasma, trichomonas, HIV, AIDS, Reiter's syndrome, condyloma acuminatum, condyloma latum, and pearly penile papules; urethral abnormalities, such as hypospadias, epispadias, and phimosis; premalignant lesions, including Erythroplasia of Queyrat, Bowen's disease, Bowenoid paplosis, giant condyloma of Buscke-Lowenstein, and varrucous carcinoma; penile cancers, including squamous cell carcinomas, carcinoma in situ, verrucous carcinoma, and disseminated penile carcinoma; urethral neoplastic disorders, including penile urethral carcinoma, bulbomembranous urethral carcinoma, and prostatic urethral carcinoma; and erectile disorders, such as priapism, Peyronie's disease, erectile dysfunction, and impotence.

[0752] Moreover, diseases and/or disorders of the vas deferens include, but are not limited to, vasculititis and CBAVD (congenital bilateral absence of the vas deferens); additionally, the polynucleotides, polypeptides, and agonists or antagonists of the present invention may be used in the diagnosis, treatment, and/or prevention of diseases and/or disorders of the seminal vesicles, including but not limited to, hydatid disease, congenital chloride diarrhea, and polycystic kidney disease.

[0753] Other disorders and/or diseases of the male reproductive system that may be diagnosed, treated, and/or prevented with the compositions of the invention include, but are not limited to, Klinefelter's syndrome, Young's syndrome, premature ejaculation, diabetes mellitus, cystic fibrosis, Kartagener's syndrome, high fever, multiple sclerosis, and gynecomastia.

[0754] Further, the polynucleotides, polypeptides, and agonists or antagonists of the present invention may be used in the diagnosis, treatment, and/or prevention of diseases and/or disorders of the vagina and vulva, including, but not limited to, bacterial vaginosis, candida vaginitis, herpes simplex virus, chancroid, granuloma inguinale, lymphogranuloma venereum, scabies, human papillomavirus, vaginal trauma, vulvar trauma, adenosis, chlamydia vaginitis, gonorrhea, trichomonas vaginitis, condyloma acuminatum, syphilis, molluscum contagiosum, atrophic vaginitis, Paget's disease, lichen sclerosus, lichen planus, vulvodynia, toxic shock syndrome, vaginismus, vulvovaginitis, vulvar vestibulitis, and neoplastic disorders, such as squamous cell hyperplasia, clear cell carcinoma, basal cell carcinoma, melanomas, cancer of Bartholin's gland, and vulvar intraepithelial neoplasia.

[0755] Disorders and/or diseases of the uterus that may be diagnosed, treated, and/or prevented with the compositions of the invention include, but are not limited to, dysmenorrhea, retroverted uterus, endometriosis, fibroids, adenomyosis, anovulatory bleeding, amenorrhea, Cushing's syndrome, hydatidiform moles, Asherman's syndrome, premature menopause, precocious puberty, uterine polyps, dysfunctional uterine bleeding (e.g., due to aberrant hormonal signals), and neoplastic disorders, such as adenocarcinomas, keiomyosarcomas, and sarcomas. Additionally, the polypeptides, polynucleotides, or agonists or antagonists of the invention may be useful as a marker or detector of, as well as in the diagnosis, treatment, and/or prevention of congenital uterine abnormalities, such as bicornuate uterus, septate uterus, simple unicornuate uterus, unicornuate uterus with a noncavitary rudimentary horn, unicornuate uterus with a non-communicating cavitary rudimentary horn, unicornuate uterus with a communicating cavitary horn, arcuate uterus, uterine didelfus, and T-shaped uterus.

[0756] Ovarian diseases and/or disorders that may be diagnosed, treated, and/or prevented with the compositions of the invention include, but are not limited to, anovulation, polycystic ovary syndrome (Stein-Leventhal syndrome), ovarian cysts, ovarian hypofunction, ovarian insensitivity to gonadotropins, ovarian overproduction of androgens, right ovarian vein syndrome, amenorrhea, hirutism, and ovarian cancer (including, but not limited to, primary and secondary cancerous growth, Sertoli-Leydig tumors, endometriod carcinoma of the ovary, ovarian papillary serous adenocarcinoma, ovarian mucinous adenocarcinoma, and Ovarian Krukenberg tumors).

[0757] Cervical diseases and/or disorders that may be diagnosed, treated, and/or prevented with the compositions of the invention include, but are not limited to, cervicitis, chronic cervicitis, mucopurulent cervicitis, cervical dysplasia, cervical polyps, Nabothian cysts, cervical erosion, cervical incompetence, and cervical neoplasms (including, for example, cervical carcinoma, squamous metaplasia, squamous cell carcinoma, adenosquamous cell neoplasia, and columnar cell neoplasia).

[0758] Additionally, diseases and/or disorders of the reproductive system that may be diagnosed, treated, and/or prevented with the compositions of the invention include, but are not limited to, disorders and/or diseases of pregnancy, including miscarriage and stillbirth, such as early abortion, late abortion, spontaneous abortion, induced abortion, therapeutic abortion, threatened abortion, missed abortion, incomplete abortion, complete abortion, habitual abortion, missed abortion, and septic abortion; ectopic pregnancy, anemia, Rh incompatibility, vaginal bleeding during pregnancy, gestational diabetes, intrauterine growth retardation, polyhydramnios, HELLP syndrome, abruptio placentae, placenta previa, hyperemesis, preeclampsia, eclampsia, herpes gestationis, and urticaria of pregnancy. Additionally, the polynucleotides, polypeptides, and agonists or antagonists of the present invention may be used in the diagnosis, treatment, and/or prevention of diseases that can complicate pregnancy, including heart disease, heart failure, rheumatic heart disease, congenital heart disease, mitral valve prolapse, high blood pressure, anemia, kidney disease, infectious disease (e.g., rubella, cytomegalovirus, toxoplasmosis, infectious hepatitis, chlamydia, HIV, AIDS, and genital herpes), diabetes mellitus, Graves' disease, thyroiditis, hypothyroidism, Hashimoto's thyroiditis, chronic active hepatitis, cirrhosis of the liver, primary biliary cirrhosis, asthma, systemic lupus eryematosis, rheumatoid arthritis, myasthenia gravis, idiopathic thrombocytopenic purpura, appendicitis, ovarian cysts, gallbladder disorders,and obstruction of the intestine.

[0759] Complications associated with labor and parturition that may be diagnosed, treated, and/or prevented with the compositions of the invention include, but are not limited to, premature rupture of the membranes, pre-term labor, post-term pregnancy, postmaturity, labor that progresses too slowly, fetal distress (e.g., abnormal heart rate (fetal or maternal), breathing problems, and abnormal fetal position), shoulder dystocia, prolapsed umbilical cord, amniotic fluid embolism, and aberrant uterine bleeding.

[0760] Further, diseases and/or disorders of the postdelivery period, that may be diagnosed, treated, and/or prevented with the compositions of the invention, include, but are not limited to, endometritis, myometritis, parametritis, peritonitis, pelvic thrombophlebitis, pulmonary embolism, endotoxemia, pyelonephritis, saphenous thrombophlebitis, mastitis, cystitis, postpartum hemorrhage, and inverted uterus.

[0761] Other disorders and/or diseases of the female reproductive system that may be diagnosed, treated, and/or prevented by the polynucleotides, polypeptides, and agonists or antagonists of the present invention include, but are not limited to, Turner's syndrome, pseudohermaphroditism, premenstrual syndrome, pelvic inflammatory disease, pelvic congestion (vascular engorgement), frigidity, anorgasmia, dyspareunia, ruptured fallopian tube, and Mittelschmerz.

[0762] Developmental and Inherited Disorders

[0763] Polynuceotides or polypeptides, or agonists or antagonists of the present invention may be used to treat, prevent, diagnose, and/or prognose diseases associated with mixed fetal tissues, including, but not limited to, developmental and inherited disorders or defects of the nervous system, musculoskelelal system, execretory system, cardiovascular system, hematopoietic system, gastrointestinal system, reproductive system, and respiratory system. Compositions of the present invention may also be used to treat, prevent, diagnose, and/or prognose developmental and inherited disorders or defects associated with, but not limited to, skin, hair, visual, and auditory tissues, metabolism. Additionally, the compositions of the invention may be useful in the diagnosis, treatment, and/or prevention of disorders or diseases associated with, but not limited to, chromosomal or genetic abnormalities and hyperproliferation or neoplasia.

[0764] Disorders or defects of the nervous system associated with developmental or inherited abnormalities that may be diagnosed, treated, and/or prevented with the compostions of the invention include, but are not limited to, adrenoleukodystrophy, agenesis of corpus callosum, Alexander disease, anencephaly, Angelman syndrome, Arnold-Chiari deformity, Batten disease, Canavan disease, cephalic disorders, Charcot-Marie-Tooth disease, encephalocele, Friedreich's ataxia, Gaucher's disease, Gorlin syndrome, Hallervorden-Spatz disease, hereditary spastic paraplegia, Huntington disease, hydranencephaly, hydrocephalus, Joubert syndrome, Lesch-Nyhan syndrome, leukodystrophy, Menkes disease, microcephaly, Niemann-Pick Type C1, neurofibromatosis, porencephaly, progeria, proteus syndrome, Refsum disease, spina bifida, Sturge-Weber syndrome, Tay-Sachs disease, tuberous sclerosis, and von Hippel-Lindau disease.

[0765] Developmental and inherited disorders resulting in disorders or defects of the musculoskeletal system that may be diagnosed, treated, and/or prevented with the compositions of the invention include, but are not limited to, achondroplasia, atlanto-occipital fusion, arthrogryposis mulitplex congenita, autosomal recessive muscular dystrophy, Becker's muscular dystrophy, cerebral palsy, choanal atresia, cleft lip, cleft palate, clubfoot, congenital amputation, congenital dislocation of the hip, congenital torticollis, congenital scoliosis, dopa-repsonsive dystonia, Duchenne muscular dystrophy, early-onset generalized dystonia, femoral torsion, Gorlin syndrome, hypophosphatasia, Klippel-Feil syndrome, knee dislocation, myoclonic dystonia, myotonic dystrophy, nail-patella syndrome, osteogenesis imperfecta, paroxysmal dystonia, progeria, prune-belly syndrome, rapid-onset dystonia parkinsonism, scolosis, syndactyly, Treacher Collins' syndrome, velocardiofacial syndrome, and X-linked dystonia-parkinsonism.

[0766] Developmental or hereditary disorders or defects of the excretory system that may be diagnosed, treated, and/or prevented with the compositions of the invention include, but are not limited to, Alport's syndrome, Bartter's syndrome, bladder diverticula, bladder exstrophy, cystinuria, epispadias, Fanconi's syndrome, Hartnup disease, horseshoe kidney, hypospadias, kidney agenesis, kidney ectopia, kidney malrotation, Liddle's syndrome, medullary cystic disease, medullary sponge, multicystic kidney, kidney polycystic kidney disease, nail-patella syndrome, Potter's syndrome, urinary tract flow obstruction, vitamin D-resistant rickets, and Wilm's tumor.

[0767] Cardiovascular disorders or defects of developmental or hereditary origin that may be diagnosed, treated, and/or prevented with the compositions of the inventtion include, but are not limited to, aortic valve stenosis, atrial septal defects, artioventricular (A-V) canal defect, bicuspid aortic valve, coarctation or the aorta, dextrocardia, Ebstein's anomaly, Eisenmenger's complex, hypoplastic left heart syndrome, Marfan syndrome, patent ductus arteriosus, progeria, pulmonary atresia, pulmonary valve stenosis, subaortic stenosis, tetralogy of fallot, total anomalous pulmonary venous (P-V) connection, transposition of the great arteries, tricuspid atresia, truncus arteriosus, ventricular septal defects. Developmental or inherited disorders resulting in disorders involving the hematopoietic system that may be diagnosed, treated, and/or prevented with the compositions of the invention include, but not limited to, Bernard-Soulier syndrome, Chédiak-Higashi syndrome, hemophilia, Hermansky-Pudlak syndrome, sickle cell anemia, storage pool disease, thromboxane A2 dysfunction, thrombasthenia, and von Willebrand's disease.

[0768] The compositions of the invention may also be used to diagnose, treat, and/or prevent developmental and inherited disorders resulting in disorders or defects of the gastrointestinal system, including, but not limited to, anal atresia, biliary atresia, esophageal atresia, diaphragmatic hernia, Hirschsprung's disease, Meckel's diverticulum, oligohydramnios, omphalocele, polyhydramnios, porphyria, situs inversus viscera. Developmental or inherited disorders resulting in metabolic disorders that may be diagnosed, treated, and/or prevented with the compositions of the invention include, but are not limited to, alpha-I antitrypsin deficiency, cystic fibrosis, hemochromatosis, lysosomal storage disease, phenylketonuria, Wilson's disease, and Zellweger syndrome.

[0769] Disorders of the reproductive system that are developmentally or hereditary related that may also be diagnosed, treated, and/or prevented with the compositions of the invention include, but are not limited to, androgen insensitivity syndrome, ambiguous genitalia, autosomal sex reversal, congenital adreneal hyperplasia, gonadoblastoma, ovarian germ cell cancer, pseudohermphroditism, true hermaphroditism, undescended testis, XX male syndrome, and XY female type gonadal dysgenesis. The compositions of the invention may also be used to diagnose, treat, and/or prevent developmental or inherited respiratory defects including, but not limited to, askin tumor, azygos lobe, congenital diaphragmatic hernia, congenital lobar emphysema, cystic adenomatoid malformation, lobar emphysema, hyaline membrane disease, and pectus excavatum.

[0770] Developmental or inherited disorders may also result from chromosomal or genetic aberration that may be diagnosed, treated, and/or prevented with the compositions of the invention including, but not limited to, 4p-syndrome, cri du chat syndrome, Digeorge syndrome, Down's syndrome, Edward's syndrome, fragile X syndrome, Klinefelter's syndrome, Patau's syndrome, Prader-Willi syndrome, progeria, Turner's syndrome, triple X syndrome, and XYY syndrome. Other developmental disorders that can be diagnosed, treated, and/or prevented with the compositions of the invention, include, but are not limited to, fetal alcohol syndrome, and can be caused by environmental factors surrounding the developing fetus.

[0771] The compositions of the invention may further be able to be used to diagnose, treat, and/or prevent errors in development or a genetic disposition that may result in hyperproliferative disorders or neoplasms, including, but not limited to, acute childhood lymphoblastic leukemia, askin tumor, Beckwith-Wiedemann syndrome, childhood acute myeloid leukemia, childhood brain stem glioma, childhood cerebellar astrocytoma, childhood extracranial germ cell tumors childhood (primary), gonadoblastoma, hepatocellular cancer, childhood Hodgkin's disease, childhood Hodgkin's lymphoma, childhood hypothalamic and visual pathway glioma, childhood (primary) liver cancer, childhood lymphoblastic leukemia, childhood medulloblastoma, childhood non-Hodgkin's lymphoma, childhood pineal and supratentorial primitive neuroectodermal tumors, childhood primary liver cancer, childhood rhabdomyosarcoma, childhood soft tissue sarcoma, Gorlin syndrome, familial multiple endrocrine neoplasia type I, neuroblastoma, ovarian germ cell cancer, pheochromocytoma, retinoblastoma, and Wilm's tumor.

[0772] Polypeptides may be administered using any method known in the art, including, but not limited to, direct needle injection at the delivery site, intravenous injection, topical administration, catheter infusion, biolistic injectors, particle accelerators, gelfoam sponge depots, other commercially available depot materials, osmotic pumps, oral or suppositorial solid pharmaceutical formulations, decanting or topical applications during surgery, aerosol delivery. Such methods are known in the art. Polypeptides may be administered as part of a Therapeutic, described in more detail below. Methods of delivering polynucleotides are described in more detail herein.

[0773] Diseases at the Cellular Level

[0774] Diseases associated with increased cell survival or the inhibition of apoptosis that could be treated, prevented, diagnosed and/or prognosed using polynucleotides or polypeptides, as well as antagonists or agonists of the present invention, include cancers (such as follicular lymphomas, carcinomas with p53 mutations, and hormone-dependent tumors, including, but not limited to colon cancer, cardiac tumors, pancreatic cancer, melanoma, retinoblastoma, glioblastoma, lung cancer, intestinal cancer, testicular cancer, stomach cancer, neuroblastoma, myxoma, myoma, lymphoma, endothelioma, osteoblastoma, osteoclastoma, osteosarcoma, chondrosarcoma, adenoma, breast cancer, prostate cancer, Kaposi's sarcoma and ovarian cancer); autoimmune disorders (such as, multiple sclerosis, Sjogren's syndrome, Hashimoto's thyroiditis, biliary cirrhosis, Behcet's disease, Crohn's disease, polymyositis, systemic lupus erythematosus and immune-related glomerulonephritis and rheumatoid arthritis) and viral infections (such as herpes viruses, pox viruses and adenoviruses), inflammation, graft v. host disease, acute graft rejection, and chronic graft rejection.

[0775] In preferred embodiments, polynucleotides, polypeptides, and/or antagonists of the invention are used to inhibit growth, progression, and/or metastasis of cancers, in particular those [listed above] involving cardiovascular system tissues.

[0776] Additional diseases or conditions associated with increased cell survival that could be treated or detected by polynucleotides or polypeptides, or agonists or antagonists of the present invention include, but are not limited to, progression, and/or metastases of malignancies and related disorders such as leukemia (including acute leukemias (e.g., acute lymphocytic leukemia, acute myelocytic leukemia (including myeloblastic, promyelocytic, myelomonocytic, monocytic, and erythroleukemia)) and chronic leukemias (e.g., chronic myelocytic (granulocytic) leukemia and chronic lymphocytic leukemia)), polycythemia vera, lymphomas (e.g., Hodgkin's disease and non-Hodgkin's disease), multiple myeloma, Waldenstrom's macroglobulinemia, heavy chain disease, and solid tumors including, but not limited to, sarcomas and carcinomas such as fibrosarcoma, myxosarcoma, liposarcoma, chondrosarcoma, osteogenic sarcoma, chordoma, angiosarcoma, endotheliosarcoma, lymphangiosarcoma, lymphangioendotheliosarcoma, synovioma, mesothelioma, Ewing's tumor, leiomyosarcoma, rhabdomyosarcoma, colon carcinoma, pancreatic cancer, breast cancer, ovarian cancer, prostate cancer, squamous cell carcinoma, basal cell carcinoma, adenocarcinoma, sweat gland carcinoma, sebaceous gland carcinoma, papillary carcinoma, papillary adenocarcinomas, cystadenocarcinoma, medullary carcinoma, bronchogenic carcinoma, renal cell carcinoma, hepatoma, bile duct carcinoma, choriocarcinoma, seminoma, embryonal carcinoma, Wilm's tumor, cervical cancer, testicular tumor, lung carcinoma, small cell lung carcinoma, bladder carcinoma, epithelial carcinoma, glioma, astrocytoma, medulloblastoma, craniopharyngioma, ependymoma, pinealoma, hemangioblastoma, acoustic neuroma, oligodendroglioma, menangioma, melanoma, neuroblastoma, and retinoblastoma.

[0777] Diseases associated with increased apoptosis that could be treated, prevented, diagnosted, and/or prognosed using polynucleotides or polypeptides, as well as agonists or antagonists of the present invention, include, but are not limited to, AIDS; neurodegenerative disorders (such as Alzheimer's disease, Parkinson's disease, Amyotrophic lateral sclerosis, Retinitis pigmentosa, Cerebellar degeneration and brain tumor or prior associated disease); autoimmune disorders (such as, multiple sclerosis, Sjogren's syndrome, Hashimoto's thyroiditis, biliary cirrhosis, Behcet's disease, Crohn's disease, polymyositis, systemic lupus erythematosus and immune-related glomerulonephritis and rheumatoid arthritis) myelodysplastic syndromes (such as aplastic anemia), graft v. host disease, ischemic injury (such as that caused by myocardial infarction, stroke and reperfusion injury), liver injury (e.g., hepatitis related liver injury, ischemia/reperfusion injury, cholestosis (bile duct injury) and liver cancer); toxin-induced liver disease (such as that caused by alcohol), septic shock, cachexia and anorexia.

[0778] Wound Healing and Epithelial Cell Proliferation

[0779] In accordance with yet a further aspect of the present invention, there is provided a process for utilizing polynucleotides or polypeptides, as well as agonists or antagonists of the present invention, for therapeutic purposes, for example, to stimulate epithelial cell proliferation and basal keratinocytes for the purpose of wound healing, and to stimulate hair follicle production and healing of dermal wounds. Polynucleotides or polypeptides, as well as agonists or antagonists of the present invention, may be clinically useful in stimulating wound healing including surgical wounds, excisional wounds, deep wounds involving damage of the dermis and epidermis, eye tissue wounds, dental tissue wounds, oral cavity wounds, diabetic ulcers, dermal ulcers, cubitus ulcers, arterial ulcers, venous stasis ulcers, burns resulting from heat exposure or chemicals, and other abnormal wound healing conditions such as uremia, malnutrition, vitamin deficiencies and complications associated with systemic treatment with steroids, radiation therapy and antineoplastic drugs and antimetabolites. Polynucleotides or polypeptides, as well as agonists or antagonists of the present invention, could be used to promote dermal reestablishment subsequent to dermal loss.

[0780] Polynucleotides or polypeptides, as well as agonists or antagonists of the present invention, could be used to increase the adherence of skin grafts to a wound bed and to stimulate re-epithelialization from the wound bed. The following are types of grafts that polynucleotides or polypeptides, agonists or antagonists of the present invention, could be used to increase adherence to a wound bed: autografts, artificial skin, allografts, autodermic graft, autoepdermic grafts, avacular grafts, Blair-Brown grafts, bone graft, brephoplastic grafts, cutis graft, delayed graft, dermic graft, epidermic graft, fascia graft, full thickness graft, heterologous graft, xenograft, homologous graft, hyperplastic graft, lamellar graft, mesh graft, mucosal graft, Ollier-Thiersch graft, omenpal graft, patch graft, pedicle graft, penetrating graft, split skin graft, thick split graft. Polynucleotides or polypeptides, as well as agonists or antagonists of the present invention, can be used to promote skin strength and to improve the appearance of aged skin.

[0781] It is believed that polynucleotides or polypeptides, as well as agonists or antagonists of the present invention, will also produce changes in hepatocyte proliferation, and epithelial cell proliferation in the lung, breast, pancreas, stomach, small intestine, and large intestine. Polynucleotides or polypeptides, as well as agonists or antagonists of the present invention, could promote proliferation of epithelial cells such as sebocytes, hair follicles, hepatocytes, type II pneumocytes, mucin-producing goblet cells, and other epithelial cells and their progenitors contained within the skin, lung, liver, and gastrointestinal tract. Polynucleotides or polypeptides, agonists or antagonists of the present invention, may promote proliferation of endothelial cells, keratinocytes, and basal keratinocytes.

[0782] Polynucleotides or polypeptides, as well as agonists or antagonists of the present invention, could also be used to reduce the side effects of gut toxicity that result from radiation, chemotherapy treatments or viral infections. Polynucleotides or polypeptides, as well as agonists or antagonists of the present invention, may have a cytoprotective effect on the small intestine mucosa. Polynucleotides or polypeptides, as well as agonists or antagonists of the present invention, may also stimulate healing of mucositis (mouth ulcers) that result from chemotherapy and viral infections.

[0783] Polynucleotides or polypeptides, as well as agonists or antagonists of the present invention, could further be used in full regeneration of skin in full and partial thickness skin defects, including bums, (i.e., repopulation of hair follicles, sweat glands, and sebaceous glands), treatment of other skin defects such as psoriasis. Polynucleotides or polypeptides, as well as agonists or antagonists of the present invention, could be used to treat epidermolysis bullosa, a defect in adherence of the epidermis to the underlying dermis which results in frequent, open and painful blisters by accelerating reepithelialization of these lesions. Polynucleotides or polypeptides, as well as agonists or antagonists of the present invention, could also be used to treat gastric and doudenal ulcers and help heal by scar formation of the mucosal lining and regeneration of glandular mucosa and duodenal mucosal lining more rapidly. Inflammatory bowel diseases, such as Crohn's disease and ulcerative colitis, are diseases, which result in destruction of the mucosal surface of the small or large intestine, respectively. Thus, polynucleotides or polypeptides, as well as agonists or antagonists of the present invention, could be used to promote the resurfacing of the mucosal surface to aid more rapid healing and to prevent progression of inflammatory bowel disease. Treatment with polynucleotides or polypeptides, agonists or antagonists of the present invention, is expected to have a significant effect on the production of mucus throughout the gastrointestinal tract and could be used to protect the intestinal mucosa from injurious substances that are ingested or following surgery. Polynucleotides or polypeptides, as well as agonists or antagonists of the present invention, could be used to treat diseases associate with the under expression.

[0784] Moreover, polynucleotides or polypeptides, as well as agonists or antagonists of the present invention, could be used to prevent and heal damage to the lungs due to various pathological states. Polynucleotides or polypeptides, as well as agonists or antagonists of the present invention, could stimulate proliferation and differentiation and promote the repair of alveoli and brochiolar epithelium to prevent or treat acute or chronic lung damage. For example, emphysema, which results in the progressive loss of aveoli, and inhalation injuries, i.e., resulting from smoke inhalation and burns, that cause necrosis of the bronchiolar epithelium and alveoli could be effectively treated using polynucleotides or polypeptides, agonists or antagonists of the present invention. Also, polynucleotides or polypeptides, as well as agonists or antagonists of the present invention, could be used to stimulate the proliferation of and differentiation of type II pneumocytes, which may help treat or prevent disease such as hyaline membrane diseases, such as infant respiratory distress syndrome and bronchopulmonary displasia, in premature infants.

[0785] Polynucleotides or polypeptides, as well as agonists or antagonists of the present invention, could stimulate the proliferation and differentiation of hepatocytes and, thus, could be used to alleviate or treat liver diseases and pathologies such as fulminant liver failure caused by cirrhosis, liver damage caused by viral hepatitis and toxic substances (i.e., acetaminophen, carbon tetraholoride and other hepatotoxins known in the art).

[0786] In addition, polynucleotides or polypeptides, as well as agonists or antagonists of the present invention, could be used treat or prevent the onset of diabetes mellitus. In patients with newly diagnosed Types I and III diabetes, where some islet cell function remains, polynucleotides or polypeptides, as well as agonists or antagonists of the present invention, could be used to maintain the islet function so as to alleviate, delay or prevent permanent manifestation of the disease. Also, polynucleotides or polypeptides, as well as agonists or antagonists of the present invention, could be used as an auxiliary in islet cell transplantation to improve or promote islet cell function.

[0787] Infectious Disease

[0788] Polynucleotides or polypeptides, as well as agonists or antagonists of the present invention can be used to treat or detect infectious agents. For example, by increasing the immune response, particularly increasing the proliferation and differentiation of B and/or T cells, infectious diseases may be treated. The immune response may be increased by either enhancing an existing immune response, or by initiating a new immune response. Alternatively, polynucleotides or polypeptides, as well as agonists or antagonists of the present invention may also directly inhibit the infectious agent, without necessarily eliciting an immune response.

[0789] Viruses are one example of an infectious agent that can cause disease or symptoms that can be treated or detected by a polynucleotide or polypeptide and/or agonist or antagonist of the present invention. Examples of viruses, include, but are not limited to Examples of viruses, include, but are not limited to the following DNA and RNA viruses and viral families: Arbovirus, Adenoviridae, Arenaviridae, Arterivirus, Bimaviridae, Bunyaviridae, Caliciviridae, Circoviridae, Coronaviridae, Dengue, EBV, HIV, Flaviviridae, Hepadnaviridae (Hepatitis), Herpesviridae (such as, Cytomegalovirus, Herpes Simplex, Herpes Zoster), Mononegavirus (e.g., Paramyxoviridae, Morbillivirus, Rhabdoviridae), Orthomyxoviridae (e.g., Influenza A, Influenza B, and parainfluenza), Papiloma virus, Papovaviridae, Parvoviridae, Picornaviridae, Poxviridae (such as Smallpox or Vaccinia), Reoviridae (e.g., Rotavirus), Retroviridae (HTLV-I, HTLV-II, Lentivirus), and Togaviridae (e.g., Rubivirus). Viruses falling within these families can cause a variety of diseases or symptoms, including, but not limited to: arthritis, bronchiollitis, respiratory syncytial virus, encephalitis, eye infections (e.g., conjunctivitis, keratitis), chronic fatigue syndrome, hepatitis (A, B, C, E, Chronic Active, Delta), Japanese B encephalitis, Junin, Chikungunya, Rift Valley fever, yellow fever, meningitis, opportunistic infections (e.g., AIDS), pneumonia, Burkitt's Lymphoma, chickenpox, hemorrhagic fever, Measles, Mumps, Parainfluenza, Rabies, the common cold, Polio, leukemia, Rubella, sexually transmitted diseases, skin diseases (e.g., Kaposi's, warts), and viremia. polynucleotides or polypeptides, or agonists or antagonists of the invention, can be used to treat or detect any of these symptoms or diseases. In specific embodiments, polynucleotides, polypeptides, or agonists or antagonists of the invention are used to treat: meningitis, Dengue, EBV, and/or hepatitis (e.g., hepatitis B). In an additional specific embodiment polynucleotides, polypeptides, or agonists or antagonists of the invention are used to treat patients nonresponsive to one or more other commercially available hepatitis vaccines. In a further specific embodiment polynucleotides, polypeptides, or agonists or antagonists of the invention are used to treat AIDS.

[0790] Similarly, bacterial or fungal agents that can cause disease or symptoms and that can be treated or detected by a polynucleotide or polypeptide and/or agonist or antagonist of the present invention include, but not limited to, include, but not limited to, the following Gram-Negative and Gram-positive bacteria and bacterial families and fungi: Actinomycetales (e.g., Corynebacterium, Mycobacterium, Norcardia), Cryptococcus neoformans, Aspergillosis, Bacillaceae (e.g., Anthrax, Clostridium), Bacteroidaceae, Blastomycosis, Bordetella, Borrelia (e.g., Borrelia burgdorferi, Brucellosis, Candidiasis, Campylobacter, Coccidioidomycosis, Cryptococcosis, Dermatocycoses, E. coli (e.g., Enterotoxigenic E. coli and Enterohemorrhagic E. coli), Enterobacteriaceae (Klebsiella, Salmonella (e.g., Salmonella typhi, and Salmonella paratyphi), Serratia, Yersinia), Erysipelothrix, Helicobacter, Legionellosis, Leptospirosis, Listeria, Mycoplasmatales, Mycobacterium leprae, Vibrio cholerae, Neisseriaceae (e.g., Acinetobacter, Gonorrhea, Menigococcal), Meisseria meningitidis, Pasteurellacea Infections (e.g., Actinobacillus, Heamophilus (e.g., Heamophilus influenza type B), Pasteurella), Pseudomonas, Rickettsiaceae, Chlamydiaceae, Treponema spp., Leptospira spp., Shigella spp., Staphylococcal, Meningiococcal, Pneumococcal and Streptococcal (e.g., Streptococcus pneumoniae and Group B Streptococcus). These bacterial or fungal families can cause the following diseases or symptoms, including, but not limited to: bacteremia, endocarditis, eye infections (conjunctivitis, tuberculosis, uveitis), gingivitis, opportunistic infections (e.g., AIDS related infections), paronychia, prosthesis-related infections, Reiter's Disease, respiratory tract infections, such as Whooping Cough or Empyema, sepsis, Lyme Disease, Cat-Scratch Disease, Dysentery, Paratyphoid Fever, food poisoning, Typhoid, pneumonia, Gonorrhea, meningitis (e.g., mengitis types A and B), Chlamydia, Syphilis, Diphtheria, Leprosy, Paratuberculosis, Tuberculosis, Lupus, Botulism, gangrene, tetanus, impetigo, Rheumatic Fever, Scarlet Fever, sexually transmitted diseases, skin diseases (e.g., cellulitis, dermatocycoses), toxemia, urinary tract infections, wound infections. Polynucleotides or polypeptides, agonists or antagonists of the invention, can be used to treat or detect any of these symptoms or diseases. In specific embodiments, Ppolynucleotides, polypeptides, agonists or antagonists of the invention are used to treat: tetanus, Diptheria, botulism, and/or meningitis type B.

[0791] Moreover, parasitic agents causing disease or symptoms that can be treated or detected by a polynucleotide or polypeptide and/or agonist or antagonist of the present invention include, but not limited to, the following families or class: Amebiasis, Babesiosis, Coccidiosis, Cryptosporidiosis, Dientamoebiasis, Dourine, Ectoparasitic, Giardiasis, Helminthiasis, Leishmaniasis, Theileriasis, Toxoplasmosis, Trypanosomiasis, and Trichomonas and Sporozoans (e.g., Plasmodium virax, Plasmodium falciparium, Plasmodium malariae and Plasmodium ovale). These parasites can cause a variety of diseases or symptoms, including, but not limited to: Scabies, Trombiculiasis, eye infections, intestinal disease (e.g., dysentery, giardiasis), liver disease, lung disease, opportunistic infections (e.g., AIDS related), malaria, pregnancy complications, and toxoplasmosis. polynucleotides or polypeptides, or agonists or antagonists of the invention, can be used to treat or detect any of these symptoms or diseases.

[0792] Polynucleotides or polypeptides, as well as agonists or antagonists of the present invention of the present invention could either be by administering an effective amount of a polypeptide to the patient, or by removing cells from the patient, supplying the cells with a polynucleotide of the present invention, and returning the engineered cells to the patient (ex vivo therapy). Moreover, the polypeptide or polynucleotide of the present invention can be used as an antigen in a vaccine to raise an immune response against infectious disease.

[0793] Regeneration

[0794] Polynucleotides or polypeptides, as well as agonists or antagonists of the present invention can be used to differentiate, proliferate, and attract cells, leading to the regeneration of tissues. (See, Science 276:59-87 (1997).) The regeneration of tissues could be used to repair, replace, or protect tissue damaged by congenital defects, trauma (wounds, burns, incisions, or ulcers), age, disease (e.g. osteoporosis, osteocarthritis, periodontal disease, liver failure), surgery, including cosmetic plastic surgery, fibrosis, reperfusion injury, or systemic cytokine damage.

[0795] Tissues that could be regenerated using the present invention include organs (e.g., pancreas, liver, intestine, kidney, skin, endothelium), muscle (smooth, skeletal or cardiac), vasculature (including vascular and lymphatics), nervous, hematopoietic, and skeletal (bone, cartilage, tendon, and ligament) tissue. Preferably, regeneration occurs without or decreased scarring. Regeneration also may include angiogenesis.

[0796] Moreover, polynucleotides or polypeptides, as well as agonists or antagonists of the present invention, may increase regeneration of tissues difficult to heal. For example, increased tendon/ligament regeneration would quicken recovery time after damage. Polynucleotides or polypeptides, as well as agonists or antagonists of the present invention could also be used prophylactically in an effort to avoid damage. Specific diseases that could be treated include of tendinitis, carpal tunnel syndrome, and other tendon or ligament defects. A further example of tissue regeneration of non-healing wounds includes pressure ulcers, ulcers associated with vascular insufficiency, surgical, and traumatic wounds.

[0797] Similarly, nerve and brain tissue could also be regenerated by using polynucleotides or polypeptides, as well as agonists or antagonists of the present invention, to proliferate and differentiate nerve cells. Diseases that could be treated using this method include central and peripheral nervous system diseases, neuropathies, or mechanical and traumatic disorders (e.g., spinal cord disorders, head trauma, cerebrovascular disease, and stoke). Specifically, diseases associated with peripheral nerve injuries, peripheral neuropathy (e.g., resulting from chemotherapy or other medical therapies), localized neuropathies, and central nervous system diseases (e.g., Alzheimer's disease, Parkinson's disease, Huntington's disease, amyotrophic lateral sclerosis, and Shy-Drager syndrome), could all be treated using the polynucleotides or polypeptides, as well as agonists or antagonists of the present invention.

[0798] Chemotaxis

[0799] Polynucleotides or polypeptides, as well as agonists or antagonists of the present invention may have chemotaxis activity. A chemotaxic molecule attracts or mobilizes cells (e.g., monocytes, fibroblasts, neutrophils, T-cells, mast cells, eosinophils, epithelial and/or endothelial cells) to a particular site in the body, such as inflammation, infection, or site of hyperproliferation. The mobilized cells can then fight off and/or heal the particular trauma or abnormality.

[0800] Polynucleotides or polypeptides, as well as agonists or antagonists of the present invention may increase chemotaxic activity of particular cells. These chemotactic molecules can then be used to treat inflammation, infection, hyperproliferative disorders, or any immune system disorder by increasing the number of cells targeted to a particular location in the body. For example, chemotaxic molecules can be used to treat wounds and other trauma to tissues by attracting immune cells to the injured location. Chemotactic molecules of the present invention can also attract fibroblasts, which can be used to treat wounds.

[0801] It is also contemplated that polynucleotides or polypeptides, as well as agonists or antagonists of the present invention may inhibit chemotactic activity. These molecules could also be used to treat disorders. Thus, polynucleotides or polypeptides, as well as agonists or antagonists of the present invention could be used as an inhibitor of chemotaxis.

[0802] Binding Activity

[0803] A polypeptide of the present invention may be used to screen for molecules that bind to the polypeptide or for molecules to which the polypeptide binds. The binding of the polypeptide and the molecule may activate (agonist), increase, inhibit (antagonist), or decrease activity of the polypeptide or the molecule bound. Examples of such molecules include antibodies, oligonucleotides, proteins (e.g., receptors),or small molecules.

[0804] Preferably, the molecule is closely related to the natural ligand of the polypeptide, e.g., a fragment of the ligand, or a natural substrate, a ligand, a structural or functional mimetic. (See, Coligan et al., Current Protocols in Immunology 1(2):Chapter 5 (1991).) Similarly, the molecule can be closely related to the natural receptor to which the polypeptide binds, or at least, a fragment of the receptor capable of being bound by the polypeptide (e.g., active site). In either case, the molecule can be rationally designed using known techniques.

[0805] Preferably, the screening for these molecules involves producing appropriate cells, which express the polypeptide. Preferred cells include cells from mammals, yeast, Drosophila, or E. coli. Cells expressing the polypeptide (or cell membrane containing the expressed polypeptide) are then preferably contacted with a test compound potentially containing the molecule to observe binding, stimulation, or inhibition of activity of either the polypeptide or the molecule.

[0806] The assay may simply test binding of a candidate compound to the polypeptide, wherein binding is detected by a label, or in an assay involving competition with a labeled competitor. Further, the assay may test whether the candidate compound results in a signal generated by binding to the polypeptide.

[0807] Alternatively, the assay can be carried out using cell-free preparations, polypeptide/molecule affixed to a solid support, chemical libraries, or natural product mixtures. The assay may also simply comprise the steps of mixing a candidate compound with a solution containing a polypeptide, measuring polypeptide/molecule activity or binding, and comparing the polypeptide/molecule activity or binding to a standard.

[0808] Preferably, an ELISA assay can measure polypeptide level or activity in a sample (e.g., biological sample) using a monoclonal or polyclonal antibody. The antibody can measure polypeptide level or activity by either binding, directly or indirectly, to the polypeptide or by competing with the polypeptide for a substrate.

[0809] Additionally, the receptor to which the polypeptide of the present invention binds can be identified by numerous methods known to those of skill in the art, for example, ligand panning and FACS sorting (Coligan, et al., Current Protocols in Immun., 1(2), Chapter 5, (1991)). For example, expression cloning is employed wherein polyadenylated RNA is prepared from a cell responsive to the polypeptides, for example, NIH3T3 cells which are known to contain multiple receptors for the FGF family proteins, and SC-3 cells, and a cDNA library created from this RNA is divided into pools and used to transfect COS cells or other cells that are not responsive to the polypeptides. Transfected cells which are grown on glass slides are exposed to the polypeptide of the present invention, after they have been labeled. The polypeptides can be labeled by a variety of means including iodination or inclusion of a recognition site for a site-specific protein kinase.

[0810] Following fixation and incubation, the slides are subjected to auto-radiographic analysis. Positive pools are identified and sub-pools are prepared and re-transfected using an iterative sub-pooling and re-screening process, eventually yielding a single clones that encodes the putative receptor.

[0811] As an alternative approach for receptor identification, the labeled polypeptides can be photoaffinity linked with cell membrane or extract preparations that express the receptor molecule. Cross-linked material is resolved by PAGE analysis and exposed to X-ray film. The labeled complex containing the receptors of the polypeptides can be excised, resolved into peptide fragments, and subjected to protein microsequencing. The amino acid sequence obtained from microsequencing would be used to design a set of degenerate oligonucleotide probes to screen a cDNA library to identify the genes encoding the putative receptors.

[0812] Moreover, the techniques of gene-shuffling, motif-shuffling, exon-shuffling, and/or codon-shuffling (collectively referred to as “DNA shuffling”) may be employed to modulate the activities of the polypeptide of the present invention thereby effectively generating agonists and antagonists of the polypeptide of the present invention. See generally, U.S. Pat. Nos. 5,605,793, 5,811,238, 5,830,721, 5,834,252, and 5,837,458, and Patten, P. A., et al., Curr. Opinion Biotechnol. 8:724-33 (1997); Harayama, S. Trends Biotechnol. 16(2):76-82 (1998); Hansson L. O., et al., J. Mol. Biol. 287:265-76 (1999); and Lorenzo, M. M. and Blasco, R.

[0813] Biotechniques 24(2):308-13 (1998); each of these patents and publications are hereby incorporated by reference). In one embodiment, alteration of polynucleotides and corresponding polypeptides may be achieved by DNA shuffling. DNA shuffling involves the assembly of two or more DNA segments into a desired molecule by homologous, or site-specific, recombination. In another embodiment, polynucleotides and corresponding polypeptides may be altered by being subjected to random mutagenesis by error-prone PCR, random nucleotide insertion or other methods prior to recombination. In another embodiment, one or more components, motifs, sections, parts, domains, fragments, etc., of the polypeptide of the present invention may be recombined with one or more components, motifs, sections, parts, domains, fragments, etc. of one or more heterologous molecules. In preferred embodiments, the heterologous molecules are family members. In further preferred embodiments, the heterologous molecule is a growth factor such as, for example, platelet-derived growth factor (PDGF), insulin-like growth factor (IGF-I), transforming growth factor (TGF)-alpha, epidermal growth factor (EGF), fibroblast growth factor (FGF), TGF-beta, bone morphogenetic protein (BMP)-2, BMP-4, BMP-5, BMP-6, BMP-7, activins A and B, decapentaplegic(dpp), 60A, OP-2, dorsalin, growth differentiation factors (GDFs), nodal, MIS, inhibin-alpha, TGF-beta1, TGF-beta2, TGF-beta3, TGF-beta5, and glial-derived neurotrophic factor (GDNF).

[0814] Other preferred fragments are biologically active fragments of the polypeptide of the present invention. Biologically active fragments are those exhibiting activity similar, but not necessarily identical, to an activity of the polypeptide of the present invention. The biological activity of the fragments may include an improved desired activity, or a decreased undesirable activity.

[0815] Additionally, this invention provides a method of screening compounds to identify those, which modulate the action of the polypeptide of the present invention. An example of such an assay comprises combining a mammalian fibroblast cell, the polypeptide of the present invention, the compound to be screened and ³[H] thymidine under cell culture conditions where the fibroblast cell would normally proliferate. A control assay may be performed in the absence of the compound to be screened and compared to the amount of fibroblast proliferation in the presence of the compound to determine if the compound stimulates proliferation by determining the uptake of ³[H] thymidine in each case. The amount of fibroblast cell proliferation is measured by liquid scintillation chromatography, which measures the incorporation of ³[H] thymidine. Both agonist and antagonist compounds may be identified by this procedure.

[0816] In another method, a mammalian cell or membrane preparation expressing a receptor for a polypeptide of the present invention is incubated with a labeled polypeptide of the present invention in the presence of the compound. The ability of the compound to enhance or block this interaction could then be measured. Alternatively, the response of a known second messenger system following interaction of a compound to be screened and the receptor is measured and the ability of the compound to bind to the receptor and elicit a second messenger response is measured to determine if the compound is a potential agonist or antagonist. Such second messenger systems include but are not limited to, cAMP guanylate cyclase, ion channels or phosphoinositide hydrolysis.

[0817] All of these above assays can be used as diagnostic or prognostic markers. The molecules discovered using these assays can be used to treat disease or to bring about a particular result in a patient (e.g., blood vessel growth) by activating or inhibiting the polypeptide/molecule. Moreover, the assays can discover agents which may inhibit or enhance the production of the polypeptides of the invention from suitably manipulated cells or tissues.

[0818] Therefore, the invention includes a method of identifying compounds, which bind to a polypeptide of the invention comprising the steps of: (a) incubating a candidate binding compound with a polypeptide of the present invention; and (b) determining if binding has occurred. Moreover, the invention includes a method of identifying agonists/antagonists comprising the steps of: (a) incubating a candidate compound with a polypeptide of the present invention, (b) assaying a biological activity, and (b) determining if a biological activity of the polypeptide has been altered.

[0819] Targeted Delivery

[0820] In another embodiment, the invention provides a method of delivering compositions to targeted cells expressing a receptor for a polypeptide of the invention, or cells expressing a cell bound form of a polypeptide of the invention.

[0821] As discussed herein, polypeptides or antibodies of the invention may be associated with heterologous polypeptides, heterologous nucleic acids, toxins, or prodrugs via hydrophobic, hydrophilic, ionic and/or covalent interactions. In one embodiment, the invention provides a method for the specific delivery of compositions of the invention to cells by administering polypeptides of the invention (including antibodies) that are associated with heterologous polypeptides or nucleic acids. In one example, the invention provides a method for delivering a therapeutic protein into the targeted cell. In another example, the invention provides a method for delivering a single stranded nucleic acid (e.g., antisense or ribozymes) or double stranded nucleic acid (e.g., DNA that can integrate into the cell's genome or replicate episomally and that can be transcribed) into the targeted cell.

[0822] In another embodiment, the invention provides a method for the specific destruction of cells (e.g., the destruction of tumor cells) by administering polypeptides of the invention (e.g., polypeptides of the invention or antibodies of the invention) in association with toxins or cytotoxic prodrugs.

[0823] By “toxin” is meant compounds that bind and activate endogenous cytotoxic effector systems, radioisotopes, holotoxins, modified toxins, catalytic subunits of toxins, or any molecules or enzymies not normally present in or on the surface of a cell that under defined conditions cause the cell's death. Toxins that may be used according to the methods of the invention include, but are not limited to, radioisotopes known in the art, compounds such as, for example, antibodies (or complement fixing containing portions thereof) that bind an inherent or induced endogenous cytotoxic effector system, thymidine kinase, endonuclease, RNAse, alpha toxin, ricin, abrin, Pseudomonas exotoxin A, diphtheria toxin, saporin, momordin, gelonin, pokeweed antiviral protein, alpha-sarcin and cholera toxin. By “cytotoxic prodrug” is meant a non-toxic compound that is converted by an enzyme, normally present in the cell, into a cytotoxic compound. Cytotoxic prodrugs that may be used according to the methods of the invention include, but are not limited to, glutamyl derivatives of benzoic acid mustard alkylating agent, phosphate derivatives of etoposide or mitomycin C, cytosine arabinoside, daunorubisin, and phenoxyacetamide derivatives of doxorubicin.

[0824] Drug Screening

[0825] Further contemplated is the use of the polypeptides of the present invention, or the polynucleotides encoding these polypeptides, to screen for molecules, which modify the activities of the polypeptides of the present invention. Such a method would include contacting the polypeptide of the present invention with a selected compound(s) suspected of having antagonist or agonist activity, and assaying the activity of these polypeptides following binding.

[0826] This invention is particularly useful for screening therapeutic compounds by using the polypeptides of the present invention, or binding fragments thereof, in any of a variety of drug screening techniques. The polypeptide or fragment employed in such a test may be affixed to a solid support, expressed on a cell surface, free in solution, or located intracellularly. One method of drug screening utilizes eukaryotic or prokaryotic host cells which are stably transformed with recombinant nucleic acids expressing the polypeptide or fragment. Drugs are screened against such transformed cells in competitive binding assays. One may measure, for example, the formulation of complexes between the agent being tested and a polypeptide of the present invention.

[0827] Thus, the present invention provides methods of screening for drugs or any other agents, which affect activities mediated by the polypeptides of the present invention. These methods comprise contacting such an agent with a polypeptide of the present invention or a fragment thereof and assaying for the presence of a complex between the agent and the polypeptide or a fragment thereof, by methods well known in the art. In such a competitive binding assay, the agents to screen are typically labeled. Following incubation, free agent is separated from that present in bound form, and the amount of free or uncomplexed label is a measure of the ability of a particular agent to bind to the polypeptides of the present invention.

[0828] Another technique for drug screening provides high throughput screening for compounds having suitable binding affinity to the polypeptides of the present invention, and is described in great detail in European Patent Application 84/03564, published on Sep. 13, 1984, which is incorporated herein by reference herein. Briefly stated, large numbers of different small peptide test compounds are synthesized on a solid substrate, such as plastic pins or some other surface. The peptide test compounds are reacted with polypeptides of the present invention and washed. Bound polypeptides are then detected by methods well known in the art. Purified polypeptides are coated directly onto plates for use in the aforementioned drug screening techniques. In addition, non-neutralizing antibodies may be used to capture the peptide and immobilize it on the solid support.

[0829] This invention also contemplates the use of competitive drug screening assays in which neutralizing antibodies capable of binding polypeptides of the present invention specifically compete with a test compound for binding to the polypeptides or fragments thereof. In this manner, the antibodies are used to detect the presence of any peptide, which shares one or more antigenic epitopes with a polypeptide of the invention.

[0830] Antisense And Ribozyme (Antagonists)

[0831] In specific embodiments, antagonists according to the present invention are nucleic acids corresponding to the sequences contained in SEQ ID NO:X, or the complementary strand thereof, and/or to cDNA sequences contained in cDNA Clone ID NO:Z identified for example, in Table 1A. In one embodiment, antisense sequence is generated internally, by the organism, in another embodiment, the antisense sequence is separately administered (see, for example, O'Connor, J., Neurochem. 56:560 (1991). Oligodeoxynucleotides as Antisense Inhibitors of Gene Expression, CRC Press, Boca Raton, Fla. (1988). Antisense technology can be used to control gene expression through antisense DNA or RNA, or through triple-helix formation. Antisense techniques are discussed for example, in Okano, J., Neurochem. 56:560 (1991); Oligodeoxynucleotides as Antisense Inhibitors of Gene Expression, CRC Press, Boca Raton, Fla. (1988). Triple helix formation is discussed in, for instance, Lee et al., Nucleic Acids Research 6:3073 (1979); Cooney et al., Science 241:456 (1988); and Dervan et al., Science 251:1300 (1991). The methods are based on binding of a polynucleotide to a complementary DNA or RNA.

[0832] For example, the use of c-myc and c-myb antisense RNA constructs to inhibit the growth of the non-lymphocytic leukemia cell line HL-60 and other cell lines was previously described. (Wickstrom et al. (1988); Anfossi et al. (1989)). These experiments were performed in vitro by incubating cells with the oligoribonucleotide. A similar procedure for in vivo use is described in WO 91/15580. Briefly, a pair of oligonucleotides for a given antisense RNA is produced as follows: A sequence complimentary to the first 15 bases of the open reading frame is flanked by an EcoRI site on the 5′ end and a HindIII site on the 3′ end. Next, the pair of oligonucleotides is heated at 90° C. for one minute and then annealed in 2× ligation buffer (20 mM TRIS HCl pH 7.5, 10 mM MgCl2, 10 MM dithiothreitol (DTT) and 0.2 mM ATP) and then ligated to the EcoRI/Hind III site of the retroviral vector PMV7 (WO 91/15580).

[0833] For example, the 5′ coding portion of a polynucleotide that encodes the polypeptide of the present invention may be used to design an antisense RNA oligonucleotide of from about 10 to 40 base pairs in length. A DNA oligonucleotide is designed to be complementary to a region of the gene involved in transcription thereby preventing transcription and the production of the receptor. The antisense RNA oligonucleotide hybridizes to the mRNA in vivo and blocks translation of the mRNA molecule into receptor polypeptide.

[0834] In one embodiment, the antisense nucleic acid of the invention is produced intracellularly by transcription from an exogenous sequence. For example, a vector or a portion thereof, is transcribed, producing an antisense nucleic acid (RNA) of the invention. Such a vector would contain a sequence encoding the antisense nucleic acid. Such a vector can remain episomal or become chromosomally integrated, as long as it can be transcribed to produce the desired antisense RNA. Such vectors can be constructed by recombinant DNA technology methods standard in the art. Vectors can be plasmid, viral, or others known in the art, used for replication and expression in vertebrate cells. Expression of the sequence encoding the polypeptide of the present invention or fragments thereof, can be by any promoter known in the art to act in vertebrate, preferably human cells. Such promoters can be inducible or constitutive. Such promoters include, but are not limited to, the SV40 early promoter region (Bemoist and Chambon, Nature 29:304-310 (1981), the promoter contained in the 3′ long terminal repeat of Rous sarcoma virus (Yamamoto et al., Cell 22:787-797 (1980), the herpes thymidine promoter (Wagner et al., Proc. Natl. Acad. Sci. U.S.A. 78:1441-1445 (1981), the regulatory sequences of the metallothionein gene (Brinster, et al., Nature 296:39-42 (1982)), etc.

[0835] The antisense nucleic acids of the invention comprise a sequence complementary to at least a portion of an RNA transcript of a gene of the present invention. However, absolute complementarity, although preferred, is not required. A sequence “complementary to at least a portion of an RNA,” referred to herein, means a sequence having sufficient complementarity to be able to hybridize with the RNA, forming a stable duplex; in the case of double stranded antisense nucleic acids, a single strand of the duplex DNA may thus be tested, or triplex formation may be assayed. The ability to hybridize will depend on both the degree of complementarity and the length of the antisense nucleic acid. Generally, the larger the hybridizing nucleic acid, the more base mismatches with a RNA it may contain and still form a stable duplex (or triplex as the case may be). One skilled in the art can ascertain a tolerable degree of mismatch by use of standard procedures to determine the melting point of the-hybridized complex.

[0836] Oligonucleotides that are complementary to the 5′ end of the message, e.g., the 5′ untranslated sequence up to and including the AUG initiation codon, should work most efficiently at inhibiting translation. However, sequences complementary to the 3′ untranslated sequences of mRNAs have been shown to be effective at inhibiting translation of mRNAs as well. See generally, Wagner, R., 1994, Nature 372:333-335. Thus, oligonucleotides complementary to either the 5′- or 3′-non-translated, non-coding regions of polynucleotide sequences described herein could be used in an antisense approach to inhibit translation of endogenous mRNA. Oligonucleotides complementary to the 5′ untranslated region of the mRNA should include the complement of the AUG start codon. Antisense oligonucleotides complementary to mRNA coding regions are less efficient inhibitors of translation but could be used in accordance with the invention. Whether designed to hybridize to the 5′-, 3′- or coding region of mRNA of the present invention, antisense nucleic acids should be at least six nucleotides in length, and are preferably oligonucleotides ranging from 6 to about 50 nucleotides in length. In specific aspects the oligonucleotide is at least 10 nucleotides, at least 17 nucleotides, at least 25 nucleotides or at least 50 nucleotides.

[0837] The polynucleotides of the invention can be DNA or RNA or chimeric mixtures or derivatives or modified versions thereof, single-stranded or double-stranded. The oligonucleotide can be modified at the base moiety, sugar moiety, or phosphate backbone, for example, to improve stability of the molecule, hybridization, etc. The oligonucleotide may include other appended groups such as peptides (e.g., for targeting host cell receptors in vivo), or agents facilitating transport across the cell membrane (see, e.g., Letsinger et al., 1989, Proc. Natl. Acad. Sci. U.S.A. 86:6553-6556; Lemaitre et al., 1987, Proc. Natl. Acad. Sci. 84:648-652; PCT Publication No. WO 88/09810, published Dec. 15, 1988) or the blood-brain barrier (see, e.g., PCT Publication No. WO 89/10134, published Apr. 25, 1988), hybridization-triggered cleavage agents. (See, e.g., Krol et al., 1988, BioTechniques 6:958-976) or intercalating agents. (See, e.g., Zon, 1988, Pharm. Res. 5:539-549). To this end, the oligonucleotide may be conjugated to another molecule, e.g., a peptide, hybridization triggered cross-linking agent, transport agent, hybridization-triggered cleavage agent, etc.

[0838] The antisense oligonucleotide may comprise at least one modified base moiety which is selected from the group including, but not limited to, 5-fluorouracil, 5-bromouracil, 5-chlorouracil, 5-iodouracil, hypoxanthine, xantine, 4-acetylcytosine, 5-(carboxyhydroxylmethyl) uracil, 5-carboxymethylaminomethyl-2-thiouridine, 5-carboxymethylaminomethyluracil, dihydrouracil, beta-D-galactosylqueosine, inosine, N6-isopentenyladenine, 1-methylguanine, 1-methylinosine, 2,2-dimethylguanine, 2-methyladenine, 2-methylguanine, 3-methylcytosine, 5-methylcytosine, N6-adenine, 7-methylguanine, 5-methylaminomethyluracil, 5-methoxyaminomethyl-2-thiouracil, beta-D-mannosylqueosine, 5′-methoxycarboxymethyluracil, 5-methoxyuracil, 2-methylthio-N6-isopentenyladenine, uracil-5-oxyacetic acid (v), wybutoxosine, pseudouracil, queosine, 2-thiocytosine, 5-methyl-2-thiouracil, 2-thiouracil, 4-thiouracil, 5-methyluracil, uracil-5-oxyacetic acid methylester, uracil-5-oxyacetic acid (v), 5-methyl-2-thiouracil, 3-(3-amino-3-N-2-carboxypropyl) uracil, (acp3)w, and 2,6-diaminopurine.

[0839] The antisense oligonucleotide may also comprise at least one modified sugar moiety selected from the group including, but not limited to, arabinose, 2-fluoroarabinose, xylulose, and hexose.

[0840] In yet another embodiment, the antisense oligonucleotide comprises at least one modified phosphate backbone selected from the group including, but not limited to, a phosphorothioate, a phosphorodithioate, a phosphoramidothioate, a phosphoramidate, a phosphordiamidate, a methylphosphonate, an alkyl phosphotriester, and a formacetal or analog thereof.

[0841] In yet another embodiment, the antisense oligonucleotide is an a-anomeric oligonucleotide. An a-anomeric oligonucleotide forms specific double-stranded hybrids with complementary RNA in which, contrary to the usual b-units, the strands run parallel to each other (Gautier et al., 1987, Nucl. Acids Res. 15:6625-6641). The oligonucleotide is a 2′-O-methylribonucleotide (Inoue et al., 1987, Nucl.

[0842] Acids Res. 15:6131-6148), or a chimeric RNA-DNA analogue (Inoue et al., 1987, FEBS Lett. 215:327-330).

[0843] Polynucleotides of the invention may be synthesized by standard methods known in the art, e.g. by use of an automated DNA synthesizer (such as are commercially available from Biosearch, Applied Biosystems, etc.). As examples, phosphorothioate oligonucleotides may be synthesized by the method of Stein et al. (1988, Nucl. Acids Res. 16:3209), methylphosphonate oligonucleotides can be prepared by use of controlled pore glass polymer supports (Sarin et al., 1988, Proc. Natl. Acad. Sci. U.S.A. 85:7448-7451), etc.

[0844] While antisense nucleotides complementary to the coding region sequence could be used, those complementary to the transcribed untranslated region are most preferred.

[0845] Potential antagonists according to the invention also include catalytic RNA, or a ribozyme (See, e.g., PCT International Publication WO 90/11364, published Oct. 4, 1990; Sarver et al, Science 247:1222-1225 (1990). While ribozymes that cleave mRNA at site specific recognition sequences can be used to destroy mRNAs, the use of hammerhead ribozymes is preferred. Hammerhead ribozymes cleave mRNAs at locations dictated by flanking regions that form complementary base pairs with the target mRNA. The sole requirement is that the target mRNA have the following sequence of two bases: 5′-UG-3′. The construction and production of hammerhead ribozymes is well known in the art and is described more fully in Haseloff and Gerlach, Nature 334:585-591 (1988). There are numerous potential hammerhead ribozyme cleavage sites within the nucleotide sequence of SEQ ID NO:X. Preferably, the ribozyme is engineered so that the cleavage recognition site is located near the 5′ end of the mRNA; i.e., to increase efficiency and minimize the intracellular accumulation of non-functional mRNA transcripts.

[0846] As in the antisense approach, the ribozymes of the invention can be composed of modified oligonucleotides (e.g. for improved stability, targeting, etc.) and should be delivered to cells which express in vivo. DNA constructs encoding the ribozyme may be introduced into the cell in the same manner as described above for the introduction of antisense encoding DNA. A preferred method of delivery involves using a DNA construct “encoding” the ribozyme under the control of a strong constitutive promoter, such as, for example, pol III or pol II promoter, so that transfected cells will produce sufficient quantities of the ribozyme to destroy endogenous messages and inhibit translation. Since ribozymes unlike antisense molecules, are catalytic, a lower intracellular concentration is required for efficiency.

[0847] Antagonist/agonist compounds may be employed to inhibit the cell growth and proliferation effects of the polypeptides of the present invention on neoplastic cells and tissues, i.e. stimulation of angiogenesis of tumors, and, therefore, retard or prevent abnormal cellular growth and proliferation, for example, in tumor formation or growth.

[0848] The antagonist/agonist may also be employed to prevent hyper-vascular diseases, and prevent the proliferation of epithelial lens cells after extracapsular cataract surgery. Prevention of the mitogenic activity of the polypeptides of the present invention may also be desirous in cases such as restenosis after balloon angioplasty.

[0849] The antagonist/agonist may also be employed to prevent the growth of scar tissue during wound healing.

[0850] The antagonist/agonist may also be employed to treat the diseases described herein.

[0851] Thus, the invention provides a method of treating disorders or diseases, including but not limited to the disorders or diseases listed throughout this application, associated with overexpression of a polynucleotide of the present invention by administering to a patient (a) an antisense molecule directed to the polynucleotide of the present invention, and/or (b) a ribozyme directed to the polynucleotide of the present invention.

[0852] Bindin2 Peptides and Other Molecules

[0853] The invention also encompasses screening methods for identifying polypeptides and nonpolypeptides that bind cardiovascular system antigen polypeptides, and the cardiovascular system antigen binding molecules identified thereby. These binding molecules are useful, for example, as agonists and antagonists of the cardiovascular system antigen polypeptides. Such agonists and antagonists can be used, in accordance with the invention, in the therapeutic embodiments described in detail, below.

[0854] This method comprises the steps of:

[0855] contacting cardiovascular system antigen polypeptides or cardiovascular system antigen-like polypeptides with a plurality of molecules; and

[0856] identifying a molecule that binds the cardiovascular system antigen polypeptides or cardiovascular system antigen-like polypeptides.

[0857] The step of contacting the cardiovascular system antigen polypeptides or cardiovascular system antigen-like polypeptides with the plurality of molecules may be effected in a number of ways. For example, one may contemplate immobilizing the cardiovascular system antigen polypeptides or cardiovascular system antigen-like polypeptides on a solid support and bringing a solution of the plurality of molecules in contact with the immobilized cardiovascular system antigen polypeptides or cardiovascular system antigen-like polypeptides. Such a procedure would be akin to an affinity chromatographic process, with the affinity matrix being comprised of the immobilized cardiovascular system antigen polypeptides or cardiovascular system antigen-like polypeptides. The molecules having a selective affinity for the cardiovascular system antigen polypeptides or cardiovascular system antigen-like polypeptides can then be purified by affinity selection. The nature of the solid support, process for attachment of the cardiovascular system antigen polypeptides or cardiovascular system antigen-like polypeptides to the solid support, solvent, and conditions of the affinity isolation or selection are largely conventional and well known to those of ordinary skill in the art.

[0858] Alternatively, one may also separate a plurality of polypeptides into substantially separate fractions comprising a subset of or individual polypeptides. For instance, one can separate the plurality of polypeptides by gel electrophoresis, column chromatography, or like method known to those of ordinary skill for the separation of polypeptides. The individual polypeptides can also be produced by a transformed host cell in such a way as to be expressed on or about its outer surface (e.g., a recombinant phage). Individual isolates can then be “probed” by the cardiovascular system antigen polypeptides or cardiovascular system antigen-like polypeptides, optionally in the presence of an inducer should one be required for expression, to determine if any selective affinity interaction takes place between the cardiovascular system antigen polypeptides or cardiovascular system antigen-like polypeptides and the individual clone. Prior to contacting the cardiovascular system antigen polypeptides or cardiovascular system antigen-like polypeptides with each fraction comprising individual polypeptides, the polypeptides could first be transferred to a solid support for additional convenience. Such a solid support may simply be a piece of filter membrane, such as one made of nitrocellulose or nylon. In this manner, positive clones could be identified from a collection of transformed host cells of an expression library, which harbor a DNA construct encoding a polypeptide having a selective affinity for cardiovascular system antigen polypeptides or cardiovascular system antigen-like polypeptides. Furthermore, the amino acid sequence of the polypeptide having a selective affinity for the cardiovascular system antigen polypeptides or cardiovascular system antigen-like polypeptides can be determined directly by conventional means or the coding sequence of the DNA encoding the polypeptide can frequently be determined more conveniently. The primary sequence can then be deduced from the corresponding DNA sequence. If the amino acid sequence is to be determined from the polypeptide itself, one may use microsequencing techniques. The sequencing technique may include mass spectroscopy.

[0859] In certain situations, it may be desirable to wash away any unbound cardiovascular system antigen polypeptides or cardiovascular system antigen-like polypeptides, or alternatively, unbound polypeptides, from a mixture of the cardiovascular system antigen polypeptides or cardiovascular system antigen-like polypeptides and the plurality of polypeptides prior to attempting to determine or to detect the presence of a selective affinity interaction. Such a wash step may be particularly desirable when the cardiovascular system antigen polypeptides or cardiovascular system antigen-like polypeptides or the plurality of polypeptides is bound to a solid support.

[0860] The plurality of molecules provided according to this method may be provided by way of diversity libraries, such as random or combinatorial peptide or nonpeptide libraries which can be screened for molecules that specifically bind cardiovascular system antigen polypeptides. Many libraries are known in the art that can be used, e.g., chemically synthesized libraries, recombinant (e.g., phage display libraries), and in vitro translation-based libraries. Examples of chemically synthesized libraries are described in Fodor et al., 1991, Science 251:767-773; Houghten et al., 1991, Nature 354:84-86; Lam et al., 1991, Nature 354:82-84; Medynski, 1994, Bio/Technology 12:709-710;Gallop et al., 1994, J. Medicinal Chemistry 37(9):1233-1251; Ohlmeyer et al., 1993, Proc. Natl. Acad. Sci. USA 90:10922-10926; Erb et al., 1994, Proc. Natl. Acad. Sci. USA 91:11422-11426; Houghten et al., 1992, Biotechniques 13:412; Jayawickreme et al., 1994, Proc. Natl. Acad. Sci. USA 91:1614-1618; Salmon et al., 1993, Proc. Natl. Acad. Sci. USA 90:11708-11712; PCT Publication No. WO 93/20242; and Brenner and Lerner, 1992, Proc. Natl. Acad. Sci. USA 89:5381-5383.

[0861] Examples of phage display libraries are described in Scott and Smith, 1990, Science 249:386-390; Devlin et al., 1990, Science, 249:404-406; Christian, R. B., et al., 1992, J. Mol. Biol. 227:711-718); Lenstra, 1992, J. Immunol. Meth. 152:149-157; Kay et al., 1993, Gene 128:59-65; and PCT Publication No. WO 94/18318 dated Aug. 18, 1994.

[0862] In vitro translation-based libraries include but are not limited to those described in PCT Publication No. WO 91/05058 dated Apr. 18, 1991; and Mattheakis et al., 1994, Proc. Natl. Acad. Sci. USA 91:9022-9026.

[0863] By way of examples of nonpeptide libraries, a benzodiazepine library (see e.g., Bunin et al., 1994, Proc. Natl. Acad. Sci. USA 91:4708-4712) can be adapted for use. Peptoid libraries (Simon et al., 1992, Proc. Natl. Acad. Sci. USA 89:9367-9371) can also be used. Another example of a library that can be used, in which the amide functionalities in peptides have been permethylated to generate a chemically transformed combinatorial library, is described by Ostresh et al. (1994, Proc. Natl. Acad. Sci. USA 91:11138-11142).

[0864] The variety of non-peptide libraries that are useful in the present invention is great. For example, Ecker and Crooke, 1995, Bio/Technology 13:351-360 list benzodiazepines, hydantoins, piperazinediones, biphenyls, sugar analogs, beta-mercaptoketones, arylacetic acids, acylpiperidines, benzopyrans, cubanes, xanthines, aminimides, and oxazolones as among the chemical species that form the basis of various libraries.

[0865] Non-peptide libraries can be classified broadly into two types: decorated monomers and oligomers. Decorated monomer libraries employ a relatively simple scaffold structure upon which a variety functional groups is added. Often the scaffold will be a molecule with a known useful pharmacological activity. For example, the scaffold might be the benzodiazepine structure.

[0866] Non-peptide oligomer libraries utilize a large number of monomers that are assembled together in ways that create new shapes that depend on the order of the monomers. Among the monomer units that have been used are carbamates, pyrrolinones, and morpholinos. Peptoids, peptide-like oligomers in which the side chain is attached to the alpha amino group rather than the alpha carbon, form the basis of another version of non-peptide oligomer libraries. The first non-peptide oligomer libraries utilized a single type of monomer and thus contained a repeating backbone. Recent libraries have utilized more than one monomer, giving the libraries added flexibility.

[0867] Screening the libraries can be accomplished by any of a variety of commonly known methods. See, e.g., the following references, which disclose screening of peptide libraries: Parmley and Smith, 1989, Adv. Exp. Med. Biol. 251:215-218; Scott and Smith, 1990, Science 249:386-390; Fowlkes et al., 1992; BioTechniques 13:422-427; Oldenburg et al., 1992, Proc. Natl. Acad. Sci. USA 89:5393-5397; Yu et al., 1994, Cell 76:933-945; Staudt et al., 1988, Science 241:577-580; Bock et al., 1992, Nature 355:564-566; Tuerk et al., 1992, Proc. Natl. Acad. Sci. USA 89:6988-6992; Ellington et al., 1992, Nature 355:850-852; U.S. Pat. No. 5,096,815, U.S. Pat. No. 5,223,409, and U.S. Pat. No. 5,198,346, all to Ladner et al.; Rebar' and Pabo, 1993, Science 263:671-673; and CT Publication No. WO 94/18318.

[0868] In a specific embodiment, screening to identify a molecule that binds cardiovascular system antigen polypeptides can be carried out by contacting the library members with a cardiovascular system antigen polypeptides or cardiovascular system antigen-like polypeptides immobilized on a solid phase and harvesting those library members that bind to the cardiovascular system antigen polypeptides or cardiovascular system antigen-like polypeptides. Examples of such screening methods, termed “panning” techniques are described by way of example in Parmley and Smith, 1988, Gene 73:305-318; Fowlkes et al., 1992, BioTechniques 13:422-427; International Publication No. WO 94/18318; and in references cited herein.

[0869] In another embodiment, the two-hybrid system for selecting interacting proteins in yeast (Fields and Song, 1989, Nature 340:245-246; Chien et al., 1991, Proc. Natl. Acad. Sci. USA 88:9578-9582) can be used to identify molecules that specifically bind to cardiovascular system antigen polypeptides or cardiovascular system antigen-like polypeptides.

[0870] Where the cardiovascular system antigen binding molecule is a polypeptide, the polypeptide can be conveniently selected from any peptide library, including random peptide libraries, combinatorial peptide libraries, or biased peptide libraries. The term “biased” is used herein to mean that the method of generating the library is manipulated so as to restrict one or more parameters that govern the diversity of the resulting collection of molecules, in this case peptides.

[0871] Thus, a truly random peptide library would generate a collection of peptides in which the probability of finding a particular amino acid at a given position of the peptide is the same for all 20 amino acids. A bias can be introduced into the library, however, by specifying, for example, that a lysine occur every fifth amino acid or that positions 4, 8, and 9 of a decapeptide library be fixed to include only arginine. Clearly, many types of biases can be contemplated, and the present invention is not restricted to any particular bias. Furthermore, the present invention contemplates specific types of peptide libraries, such as phage displayed peptide libraries and those that utilize a DNA construct comprising a lambda phage vector with a DNA insert.

[0872] As mentioned above, in the case of a cardiovascular system antigen binding molecule that is a polypeptide, the polypeptide may have about 6 to less than about 60 amino acid residues, preferably about 6 to about 10 amino acid residues, and most preferably, about 6 to about 22 amino acids. In another embodiment, a cardiovascular system antigen binding polypeptide has in the range of 15-100 amino acids, or 20-50 amino acids.

[0873] The selected cardiovascular system antigen binding polypeptide can be obtained by chemical synthesis or recombinant expression.

[0874] Other Activities

[0875] A polypeptide, polynucleotide, agonist, or antagonist of the present invention, as a result of the ability to stimulate vascular endothelial cell growth, may be employed in treatment for stimulating re-vascularization of ischemic tissues due to various disease conditions such as thrombosis, arteriosclerosis, and other cardiovascular conditions. The polypeptide, polynucleotide, agonist, or antagonist of the present invention may also be employed to stimulate angiogenesis and limb regeneration, as discussed above.

[0876] A polypeptide, polynucleotide, agonist, or antagonist of the present invention may also be employed for treating wounds due to injuries, burns, post-operative tissue repair, and ulcers since they are mitogenic to various cells of different origins, such as fibroblast cells and skeletal muscle cells, and therefore, facilitate the repair or replacement of damaged or diseased tissue.

[0877] A polypeptide, polynucleotide, agonist, or antagonist of the present invention may also be employed to stimulate neuronal growth and to treat and prevent neuronal damage which occurs in certain neuronal disorders or neuro-degenerative conditions such as Alzheimer's disease, Parkinson's disease, and AIDS-related complex. A polypeptide, polynucleotide, agonist, or antagonist of the present invention may have the ability to stimulate chondrocyte growth; therefore, they may be employed to enhance bone and periodontal regeneration and aid in tissue transplants or bone grafts.

[0878] A polypeptide, polynucleotide, agonist, or antagonist of the present invention may be also be employed to prevent skin aging due to sunburn by stimulating keratinocyte growth.

[0879] A polypeptide, polynucleotide, agonist, or antagonist of the present invention may also be employed for preventing hair loss, since FGF family members activate hair-forming cells and promotes melanocyte growth. Along the same lines, a polypeptide, polynucleotide, agonist, or antagonist of the present invention may be employed to stimulate growth and differentiation of hematopoietic cells and bone marrow cells when used in combination with other cytokines.

[0880] A polypeptide, polynucleotide, agonist, or antagonist of the present invention may also be employed to maintain organs before transplantation or for supporting cell culture of primary tissues. A polypeptide, polynucleotide, agonist, or antagonist of the present invention may also be employed for inducing tissue of mesodermal origin to differentiate in early embryos.

[0881] A polypeptide, polynucleotide, agonist, or antagonist of the present invention may also increase or decrease the differentiation or proliferation of embryonic stem cells, besides, as discussed above, hematopoietic lineage.

[0882] A polypeptide, polynucleotide, agonist, or antagonist of the present invention may also be used to modulate mammalian characteristics, such as body height, weight, hair color, eye color, skin, percentage of adipose tissue, pigmentation, size, and shape (e.g., cosmetic surgery). Similarly, a polypeptide, polynucleotide, agonist, or antagonist of the present invention may be used to modulate mammalian metabolism affecting catabolism, anabolism, processing, utilization, and storage of energy.

[0883] A polypeptide, polynucleotide, agonist, or antagonist of the present invention may be used to change a mammal's mental state or physical state by influencing biorhythms, caricadic rhythms, depression (including depressive disorders), tendency for violence, tolerance for pain, reproductive capabilities (preferably by Activin or Inhibin-like activity), hormonal or endocrine levels, appetite, libido, memory, stress, or other cognitive qualities.

[0884] A polypeptide, polynucleotide, agonist, or antagonist of the present invention may also be used as a food additive or preservative, such as to increase or decrease storage capabilities, fat content, lipid, protein, carbohydrate, vitamins, minerals, cofactors or other nutritional components.

[0885] The above-recited applications have uses in a wide variety of hosts. Such hosts include, but are not limited to, human, murine, rabbit, goat, guinea pig, camel, horse, mouse, rat, hamster, pig, micro-pig, chicken, goat, cow, sheep, dog, cat, non-human primate, and human. In specific embodiments, the host is a mouse, rabbit, goat, guinea pig, chicken, rat, hamster, pig, sheep, dog or cat. In preferred embodiments, the host is a mammal. In most preferred embodiments, the host is a human.

[0886] Other Preferred Embodiments

[0887] Other preferred embodiments of the claimed invention include an isolated nucleic acid molecule comprising a nucleotide sequence which is at least 95% identical to a sequence of at least about 50 contiguous nucleotides in the nucleotide sequence of SEQ ID NO:X or the complementary strand thereto, the nucleotide sequence as defined in column 4 of Table 1A or columns 8 and 9 of Table 2 or the complementary strand thereto, and/or cDNA contained in Clone ID NO:Z.

[0888] Also preferred is a nucleic acid molecule wherein said sequence of contiguous nucleotides is included in the nucleotide sequence of the portion of SEQ ID NO:X as defined in column 4, “ORF (From-To)”, in Table 1A.

[0889] Also preferred is a nucleic acid molecule wherein said sequence of contiguous nucleotides is included in the nucleotide sequence of the portion of SEQ ID NO:X as defined in columns 8 and 9, “NT From” and “NT To” respectively, in Table 2.

[0890] Also preferred is an isolated nucleic acid molecule comprising a nucleotide sequence which is at least 95% identical to a sequence of at least about 150 contiguous nucleotides in the nucleotide sequence of SEQ ID NO:X or the complementary strand thereto, the nucleotide sequence as defined in column 4 of Table 1 A or columns 8 and 9 of Table 2 or the complementary strand thereto, and/or cDNA contained in Clone ID NO:Z.

[0891] Further preferred is an isolated nucleic acid molecule comprising a nucleotide sequence which is at least 95% identical to a sequence of at least about 500 contiguous nucleotides in the nucleotide sequence of SEQ ID NO:X or the complementary strand thereto, the nucleotide sequence as defined in column 4 of Table 1A or columns 8 and 9 of Table 2 or the complementary strand thereto, and/or cDNA contained in Clone ID NO:Z.

[0892] A further preferred embodiment is a nucleic acid molecule comprising a nucleotide sequence which is at least 95% identical to the nucleotide sequence of the portion of SEQ ID NO:X defined in column 4, “ORF (From-To)”, in Table 1A.

[0893] A further preferred embodiment is a nucleic acid molecule comprising a nucleotide sequence which is at least 95% identical to the nucleotide sequence of the portion of SEQ ID NO:X defined in columns 8 and 9, “NT From” and “NT To”, respectively, in Table 2.

[0894] A further preferred embodiment is an isolated nucleic acid molecule comprising a nucleotide sequence which is at least 95% identical to the complete nucleotide sequence of SEQ ID NO:X or the complementary strand thereto, the nucleotide sequence as defined in column 4 of Table 1A or columns 8 and 9 of Table 2 or the complementary strand thereto, and/or cDNA contained in Clone ID NO:Z.

[0895] Also preferred is an isolated nucleic acid molecule which hybridizes under stringent hybridization conditions to a nucleic acid molecule comprising a nucleotide sequence of SEQ ID NO:X or the complementary strand thereto, the nucleotide sequence as defined in column 4 of Table 1A or columns 8 and 9 of Table 2 or the complementary strand thereto, and/or cDNA contained in Clone ID NO:Z, wherein said nucleic acid molecule which hybridizes does not hybridize under stringent hybridization conditions to a nucleic acid molecule having a nucleotide sequence consisting of only A residues or of only T residues.

[0896] Also preferred is a composition of matter comprising a DNA molecule which comprises the cDNA contained in Clone ID NO:Z.

[0897] Also preferred is an isolated nucleic acid molecule comprising a nucleotide sequence which is at least 95% identical to a sequence of at least 50 contiguous nucleotides of the cDNA sequence contained in Clone ID NO:Z.

[0898] Also preferred is an isolated nucleic acid molecule, wherein said sequence of at least 50 contiguous nucleotides is included in the nucleotide sequence of an open reading frame sequence encoded by cDNA contained in Clone ID NO:Z.

[0899] Also preferred is an isolated nucleic acid molecule comprising a nucleotide sequence which is at least 95% identical to sequence of at least 150 contiguous nucleotides in the nucleotide sequence encoded by cDNA contained in Clone ID NO:Z.

[0900] A further preferred embodiment is an isolated nucleic acid molecule comprising a nucleotide sequence which is at least 95% identical to sequence of at least 500 contiguous nucleotides in the nucleotide sequence encoded by cDNA contained in Clone ID NO:Z.

[0901] A further preferred embodiment is an isolated nucleic acid molecule comprising a nucleotide sequence which is at least 95% identical to the complete nucleotide sequence encoded bycDNA contained in Clone ID NO:Z.

[0902] A further preferred embodiment is a method for detecting in a biological sample a nucleic acid molecule comprising a nucleotide sequence which is at least 95% identical to a sequence of at least 50 contiguous nucleotides in a sequence selected from the group consisting of: a nucleotide sequence of SEQ ID NO:X or the complementary strand thereto; the nucleotide sequence as defined in column 4 of Table 1A or columns 8 and 9 of Table 2 or the complementary strand thereto; and a nucleotide sequence encoded by cDNA contained in Clone ID NO:Z; which method comprises a step of comparing a nucleotide sequence of at least one nucleic acid molecule in said sample with a sequence selected from said group and determining whether the sequence of said nucleic acid molecule in said sample is at least 95% identical to said selected sequence.

[0903] Also preferred is the above method wherein said step of comparing sequences comprises determining the extent of nucleic acid hybridization between nucleic acid molecules in said sample and a nucleic acid molecule comprising said sequence selected from said group. Similarly, also preferred is the above method wherein said step of comparing sequences is performed by comparing the nucleotide sequence determined from a nucleic acid molecule in said sample with said sequence selected from said group. The nucleic acid molecules can comprise DNA molecules or RNA molecules.

[0904] A further preferred embodiment is a method for identifying the species, tissue or cell type of a biological sample which method comprises a step of detecting nucleic acid molecules in said sample, if any, comprising a nucleotide sequence that is at least 95% identical to a sequence of at least 50 contiguous nucleotides in a sequence selected from the group consisting of: a nucleotide sequence of SEQ ID NO:X or the complementary strand thereto; the nucleotide sequence as defined in column 4 of Table 1A or columns 8 and 9 of Table 2 or the complementary strand thereto; and a nucleotide sequence of the cDNA contained in Clone ID NO:Z.

[0905] The method for identifying the species, tissue or cell type of a biological sample can comprise a step of detecting nucleic acid molecules comprising a nucleotide sequence in a panel of at least two nucleotide sequences, wherein at least one sequence in said panel is at least 95% identical to a sequence of at least 50 contiguous nucleotides in a sequence selected from said group.

[0906] Also preferred is a method for diagnosing in a subject a pathological condition associated with abnormal structure or expression of a nucleotide sequence of SEQ ID NO:X or the complementary strand thereto; the nucleotide sequence as defined in column 4 of Table 1A or columns 8 and 9 of Table 2 or the complementary strand thereto; or the cDNA contained in Clone ID NO:Z which encodes a protein, wherein the method comprises a step of detecting in a biological sample obtained from said subject nucleic acid molecules, if any, comprising a nucleotide sequence that is at least 95% identical to a sequence of at least 50 contiguous nucleotides in a sequence selected from the group consisting of: a nucleotide sequence of SEQ ID NO:X or the complementary strand thereto; the nucleotide sequence as defined in column 4 of Table 1A or columns 8 and 9 of Table 2 or the complementary strand thereto; and a nucleotide sequence of cDNA contained in Clone ID NO:Z.

[0907] The method for diagnosing a pathological condition can comprise a step of detecting nucleic acid molecules comprising a nucleotide sequence in a panel of at least two nucleotide sequences, wherein at least one sequence in said panel is at least 95% identical to a sequence of at least 50 contiguous nucleotides in a sequence selected from said group.

[0908] Also preferred is a composition of matter comprising isolated nucleic acid molecules wherein the nucleotide sequences of said nucleic acid molecules comprise a panel of at least two nucleotide sequences, wherein at least one sequence in said panel is at least 95% identical to a sequence of at least 50 contiguous nucleotides in a sequence selected from the group consisting of: a nucleotide sequence of SEQ ID NO:X or the complementary strand thereto; the nucleotide sequence as defined in column 4 of Table 1A or columns 8 and 9 of Table 2 or the complementary strand thereto; and a nucleotide sequence encoded by cDNA contained in Clone ID NO:Z. The nucleic acid molecules can comprise DNA molecules or RNA molecules.

[0909] Also preferred is a composition of matter comprising isolated nucleic acid molecules wherein the nucleotide sequences of said nucleic acid molecules comprise a DNA microarray or “chip” of at least 1, 2, 3, 4, 5, 6, 7, 8, 9, 10, 15, 20, 25, 30, 40, 50, 100, 150, 200, 250, 300, 500, 1000, 2000, 3000, or 4000 nucleotide sequences, wherein at least one sequence in said DNA microarray or “chip” is at least 95% identical to a sequence of at least 50 contiguous nucleotides in a sequence selected from the group consisting of: a nucleotide sequence of SEQ ID NO:X wherein X is any integer as defined in Table 1A; and a nucleotide sequence encoded by a human cDNA clone identified by a cDNA “Clone ID” in Table 1A.

[0910] Also preferred is an isolated polypeptide comprising an amino acid sequence at least 90% identical to a sequence of at least about 10 contiguous amino acids in the polypeptide sequence of SEQ ID NO:Y; a polypeptide encoded by SEQ ID NO:X or the complementary strand thereto; the polypeptide encoded by the nucleotide sequence as defined in columns 8 and 9 of Table 2; and/or a polypeptide encoded by cDNA contained in Clone ID NO:Z.

[0911] Also preferred is an isolated polypeptide comprising an amino acid sequence at least 95% identical to a sequence of at least about 30 contiguous amino acids in the amino acid sequence of SEQ ID NO:Y; a polypeptide encoded by SEQ ID NO:X or the complementary strand thereto; the polypeptide encoded by the nucleotide sequence as defined in columns 8 and 9 of Table 2; and/or a polypeptide encoded by cDNA contained in Clone ID NO:Z.

[0912] Further preferred is an isolated polypeptide comprising an amino acid sequence at least 95% identical to a sequence of at least about 100 contiguous amino acids in the amino acid sequence of SEQ ID NO:Y; a polypeptide encoded by SEQ ID NO:X or the complementary strand thereto; the polypeptide-encoded by the nucleotide sequence as defined in columns 8 and 9 of Table 2; and/or a polypeptide encoded by cDNA contained in Clone ID NO:Z.

[0913] Further preferred is an isolated polypeptide comprising an amino acid sequence at least 95% identical to the complete amino acid sequence of SEQ ID NO:Y; a polypeptide encoded by SEQ ID NO:X or the complementary strand thereto; the polypeptide encoded by the nucleotide sequence as defined in columns 8 and 9 of Table 2; and/or a polypeptide encoded by cDNA contained in Clone ID NO:Z.

[0914] Further preferred is an isolated polypeptide comprising an amino acid sequence at least 90% identical to a sequence of at least about 10 contiguous amino acids in the complete amino acid sequence of a polypeptide encoded by contained in Clone ID NO:Z

[0915] Also preferred is a polypeptide wherein said sequence of contiguous amino acids is included in the amino acid sequence of a portion of said polypeptide encoded by cDNA contained in Clone ID NO:Z; a polypeptide encoded by SEQ ID NO:X or the complementary strand thereto; the polypeptide encoded by the nucleotide sequence as defined in columns 8 and 9 of Table 2; and/or the polypeptide sequence of SEQ ID NO:Y.

[0916] Also preferred is an isolated polypeptide comprising an amino acid sequence at least 95% identical to a sequence of at least about 30 contiguous amino acids in the amino acid sequence of a polypeptide encoded by the cDNA contained in Clone ID NO:Z.

[0917] Also preferred is an isolated polypeptide comprising an amino acid sequence at least 95% identical to a sequence of at least about 100 contiguous amino acids in the amino acid sequence of a polypeptide encoded by cDNA contained in Clone ID NO:Z.

[0918] Also preferred is an isolated polypeptide comprising an amino acid sequence at least 95% identical to the amino acid sequence of a polypeptide encoded by the cDNA contained in Clone ID NO:Z.

[0919] Further preferred is an isolated antibody which binds specifically to a polypeptide comprising an amino acid sequence that is at least 90% identical to a sequence of at least 10 contiguous amino acids in a sequence selected from the group consisting of: a polypeptide sequence of SEQ ID NO:Y; a polypeptide encoded by SEQ ID NO:X or the complementary strand thereto; the polypeptide encoded by the nucleotide sequence as defined in columns 8 and 9 of Table 2; and a polypeptide encoded by the cDNA contained in Clone ID NO:Z.

[0920] Further preferred is a method for detecting in a biological sample a polypeptide comprising an amino acid sequence which is at least 90% identical to a sequence of at least 10 contiguous amino acids in a sequence selected from the group consisting of: a polypeptide sequence of SEQ ID NO:Y; a polypeptide encoded by SEQ ID NO:X or the complementary strand thereto; the polypeptide encoded by the nucleotide sequence as defined in columns 8 and 9 of Table 2; and a polypeptide encoded by the cDNA contained in Clone ID NO:Z; which method comprises a step of comparing an amino acid sequence of at least one polypeptide molecule in said sample with a sequence selected from said group and determining whether the sequence of said polypeptide molecule in said sample is at least 90% identical to said sequence of at least 10 contiguous amino acids.

[0921] Also preferred is the above method wherein said step of comparing an amino acid sequence of at least one polypeptide molecule in said sample with a sequence selected from said group comprises determining the extent of specific binding of polypeptides in said sample to an antibody which binds specifically to a polypeptide comprising an amino acid sequence that is at least 90% identical to a sequence of at least 10 contiguous amino acids in a sequence selected from the group consisting of: a polypeptide sequence of SEQ ID NO:Y; a polypeptide encoded by SEQ ID NO:X or the complementary strand thereto; the polypeptide encoded by the nucleotide sequence as defined in columns 8 and 9 of Table 2; and a polypeptide encoded by the cDNA contained in Clone ID NO:Z.

[0922] Also preferred is the above method wherein said step of comparing sequences is performed by comparing the amino acid sequence determined from a polypeptide molecule in said sample with said sequence selected from said group.

[0923] Also preferred is a method for identifying the species, tissue or cell type of a biological sample which method comprises a step of detecting polypeptide molecules in said sample, if any, comprising an amino acid sequence that is at least 90% identical to a sequence of at least 10 contiguous amino acids in a sequence selected from the group consisting of: polypeptide sequence of SEQ ID NO:Y; a polypeptide encoded by SEQ ID NO:X or the complementary strand thereto; the polypeptide encoded by the nucleotide sequence as defined in columns 8 and 9 of Table 2; and a polypeptide encoded by the cDNA contained in Clone ID NO:Z.

[0924] Also preferred is the above method for identifying the species, tissue or cell type of a biological sample, which method comprises a step of detecting polypeptide molecules comprising an amino acid sequence in a panel of at least two amino acid sequences, wherein at least one sequence in said panel is at least 90% identical to a sequence of at least 10 contiguous amino acids in a sequence selected from the above group.

[0925] Also preferred is a method for diagnosing in a subject a pathological condition associated with abnormal structure or expression of a nucleic acid sequence identified in Table 1A or Table 2 encoding a polypeptide, which method comprises a step of detecting in a biological sample obtained from said subject polypeptide molecules comprising an amino acid sequence in a panel of at least two amino acid sequences, wherein at least one sequence in said panel is at least 90% identical to a sequence of at least 10 contiguous amino acids in a sequence selected from the group consisting of: polypeptide sequence of SEQ ID NO:Y; a polypeptide encoded by SEQ ID NO:X or the complementary strand thereto; the polypeptide encoded by the nucleotide sequence as defined in columns 8 and 9 of Table 2; and a polypeptide encoded by the cDNA contained in Clone ID NO:Z.

[0926] In any of these methods, the step of detecting said polypeptide molecules includes using an antibody.

[0927] Also preferred is an isolated nucleic acid molecule comprising a nucleotide sequence which is at least 95% identical to a nucleotide sequence encoding a polypeptide wherein said polypeptide comprises an amino acid sequence that is at least 90% identical to a sequence of at least 10 contiguous amino acids in a sequence selected from the group consisting of: polypeptide sequence of SEQ ID NO:Y; a polypeptide encoded by SEQ ID NO:X or the complementary strand thereto; the polypeptide encoded by the nucleotide sequence as defined in columns 8 and 9 of Table 2; and a polypeptide encoded by the cDNA contained in Clone ID NO:Z.

[0928] Also preferred is an isolated nucleic acid molecule, wherein said nucleotide sequence encoding a polypeptide has been optimized for expression of said polypeptide in a prokaryotic host.

[0929] Also preferred is a polypeptide molecule, wherein said polypeptide comprises an amino acid sequence selected from the group consisting of: polypeptide sequence of SEQ ID NO:Y; a polypeptide encoded by SEQ ID NO:X or the complementary strand thereto; the polypeptide encoded by the nucleotide sequence as defined in columns 8 and 9 of Table 2; and a polypeptide encoded by the cDNA contained in Clone ID NO:Z.

[0930] Further preferred is a method of making a recombinant vector comprising inserting any of the above isolated nucleic acid molecule into a vector. Also preferred is the recombinant vector produced by this method. Also preferred is a method of making a recombinant host cell comprising introducing the vector into a host cell, as well as the recombinant host cell produced by this method.

[0931] Also preferred is a method of making an isolated polypeptide comprising culturing this recombinant host cell under conditions such that said polypeptide is expressed and recovering said polypeptide. Also preferred is this method of making an isolated polypeptide, wherein said recombinant host cell is a eukaryotic cell and said polypeptide is a human protein comprising an amino acid sequence selected from the group consisting of: polypeptide sequence of SEQ ID NO:Y; a polypeptide encoded by SEQ ID NO:X or the complementary strand thereto; the polypeptide encoded by the nucleotide sequence as defined in columns 8 and 9 of Table 2; and a polypeptide encoded by the cDNA contained in Clone ID NO:Z. The isolated polypeptide produced by this method is also preferred.

[0932] Also preferred is a method of treatment of an individual in need of an increased level of a protein activity, which method comprises administering to such an individual a Therapeutic comprising an amount of an isolated polypeptide, polynucleotide, immunogenic fragment or analogue thereof, binding agent, antibody, or antigen binding fragment of the claimed invention effective to increase the level of said protein activity in said individual.

[0933] Also preferred is a method of treatment of an individual in need of a decreased level of a protein activity, which method comprised administering to such an individual a Therapeutic comprising an amount of an isolated polypeptide, polynucleotide, immunogenic fragment or analogue thereof, binding agent, antibody, or antigen binding fragment of the claimed invention effective to decrease the level of said protein activity in said individual.

[0934] Also preferred is a method of treatment of an individual in need of a specific delivery of toxic compositions to diseased cells (e.g., tumors, leukemias or lymphomas), which method comprises administering to such an individual a Therapeutic comprising an amount of an isolated polypeptide of the invention, including, but not limited to a binding agent, or antibody of the claimed invention that are associated with toxin or cytotoxic prodrugs.

[0935] Having generally described the invention, the same will be more readily understood by reference to the following examples, which are provided by way of illustration and are not intended as limiting.

TABLE 6

| ATCC Deposits | Deposit Date | ATCC Designation Number |
|---|---|---|
| LP01, LP02, LP03, LP04, | May-20-97 | 209059, 209060, 209061, 209062, 209063, |
| LP05, LP06, LP07, LP08, | | 209064, 209065, 209066, 209067, 209068, |
| LP09, LP10, LP11, | | 209069 |
| LP12 | Jan-12-98 | 209579 |
| LP13 | Jan-12-98 | 209578 |
| LP14 | Jul-16-98 | 203067 |
| LP15 | Jul-16-98 | 203068 |
| LP16 | Feb-1-99 | 203609 |
| LP17 | Feb-1-99 | 203610 |
| LP20 | Nov-17-98 | 203485 |
| LP21 | Jun-18-99 | PTA-252 |
| LP22 | Jun-18-99 | PTA-253 |
| LP23 | Dec-22-99 | PTA-1081 |

### EXAMPLES

### Example 1

### Isolation of a Selected cDNA Clone From the Deposited Sample

[0936] Each Clone ID NO:Z is contained in a plasmid. Table 7 identifies the vectors used to construct the cDNA library from which each clone was isolated. In many cases, the vector used to construct the library is a phage vector from which a plasmid has been excised. The following correlates the related plasmid for each phage vector used in constructing the cDNA library. For example, where a particular clone is identified in Table 7 as being isolated in the vector “Lambda Zap,” the corresponding deposited clone is in “pBluescript.”

| Vector Used to Construct Library | Corresponding Deposited Plasmid |
|---|---|
| Lambda Zap | pBluescript (pBS) |
| Uni-Zap XR | pBluescript (pBS) |
| Zap Express | pBK |
| lafmid BA | plafmid BA |
| pSport1 | pSport1 |
| pCMVSport 2.0 | pCMVSport 2.0 |
| pCMVSport 3.0 | pCMVSport 3.0 |
| pCR ® 2.1 | pCR ® 2.1 |

[0937] Vectors Lambda Zap (U.S. Pat. Nos. 5,128,256 and 5,286,636), Uni-Zap XR (U.S. Pat. Nos. 5,128, 256 and 5,286,636), Zap Express (U.S. Pat. Nos. 5,128,256 and 5,286,636), pBluescript (pBS) (Short, J. M. et al., Nucleic Acids Res. 16:7583-7600 (1988); Alting-Mees, M. A. and Short, J. M., Nucleic Acids Res. 17:9494 (1989)) and pBK (Alting-Mees, M. A. et al., Strategies 5:58-61 (1992)) are commercially available from Stratagene Cloning Systems, Inc., 11011 N. Torrey Pines Road, La Jolla, Calif., 92037. pBS contains an ampicillin resistance gene and pBK contains a neomycin resistance gene. Both can be transformed into E. coli strain XL-1 Blue, also available from Stratagene. pBS comes in 4 forms SK+, SK−, KS+and KS. The S and K refers to the orientation of the polylinker to the T7 and T3 primer sequences which flank the polylinker region (“S” is for Sacd and “K” is for KpnI which are the first sites on each respective end of the linker). “+” or “−” refer to the orientation of the f1 origin of replication (“ori”), such that in one orientation, single stranded rescue initiated from the f1 ori generates sense strand DNA and in the other, antisense.

[0938] Vectors pSport1, pCMVSport 2.0 and pCMVSport 3.0, were obtained from Life Technologies, Inc., P. O. Box 6009, Gaithersburg, Md. 20897. All Sport vectors contain an ampicillin resistance gene and may be transformed into E. coli strain DH10B, also available from Life Technologies. (See, for instance, Gruber, C. E., et al., Focus 15:59 (1993).) Vector lafmid BA (Bento Soares, Columbia University, NY) contains an ampicillin resistance gene and can be transformed into E. coli strain XL-1 Blue. Vector pCR®2.1, which is available from invitrogen, 1600 Faraday Avenue, Carlsbad, Calif. 92008, contains an ampicillin resistance gene and may be transformed into E. coli strain DH10B, available from Life Technologies. (See, for instance, Clark, J. M., Nuc. Acids Res. 16:9677-9686 (1988) and Mead, D. et al., Bio/Technology 9: (1991).) Preferably, a polynucleotide of the present invention does not comprise the vector sequences identified for the particular clone in Table 7, as well as the corresponding plasmid vector sequences designated above.

[0939] The deposited material in the sample assigned the ATCC Deposit Number cited by reference to Tables 1A, 2, 6 and 7 for any given cDNA clone also may contain one or more additional plasmids, each comprising a cDNA clone different from that given clone. Thus, deposits sharing the same ATCC Deposit Number contain at least a plasmid for each Clone ID NO:Z.

TABLE 7

| | | | ATCC |
|---|---|---|---|
| Libraries owned by Catalog | Catalog Description | Vector | Deposit |
| HUKA HUKB HUKC HUKD | Human Uterine Cancer | Lambda ZAP II | LP01 |
| HUKE HUKF HUKG | | | |
| HCNA HCNB | Human Colon | Lambda Zap II | LP01 |
| HFFA | Human Fetal Brain, random primed | Lambda Zap II | LP01 |
| HTWA | Resting T-Cell | Lambda ZAP II | LP01 |
| HBQA | Early Stage Human Brain, random | Lambda ZAP II | LP01 |
| | primed | | |
| HLMB HLMF HLMG HLMH | breast lymph node CDNA library | Lambda ZAP II | LP01 |
| HLMI HLMJ HLMM HLMN | | | |
| HCQA HCQB | human colon cancer | Lamda ZAP II | LP01 |
| HMEA HMEC HMED HMEE | Human Microvascular Endothelial | Lambda ZAP II | LP01 |
| HMEF HMEG HMEI HMEJ | Cells, fract. A | | |
| HMEK HMEL | | | |
| HUSA HUSC | Human Umbilical Vein Endothelial | Lambda ZAP II | LP01 |
| | Cells, fract. A | | |
| HLQA HLQB | Hepatocellular Tumor | Lambda ZAP II | LP01 |
| HHGA HHGB HHGC HHGD | Hemangiopericytoma | Lambda ZAP II | LP01 |
| HSDM | Human Striatum Depression, re-rescue | Lambda ZAP II | LP01 |
| HUSH | H Umbilical Vein Endothelial Cells, | Lambda ZAP II | LP01 |
| | frac A, re-excision | | |
| HSGS | Salivary gland, subtracted | Lambda ZAP II | LP01 |
| HFXA HFXB HFXC HFXD | Brain frontal cortex | Lambda ZAP II | LP01 |
| HFXE HFXF HFXG HFXH | | | |
| HPQA HPQB HPQC | PERM TF274 | Lambda ZAP II | LP01 |
| HFXJ HFXK | Brain Frontal Cortex, re-excision | Lambda ZAP II | LP01 |
| HCWA HCWB HCWC HCWD | CD34 positive cells (Cord Blood) | ZAP Express | LP02 |
| HCWE HCWF HCWG HCWH | | | |
| HCWI HCWJ HCWK | | | |
| HCUA HCUB HCUC | CD34 depleted Buffy Coat (Cord | ZAP Express | LP02 |
| | Blood) | | |
| HRSM | A-14 cell line | ZAP Express | LP02 |
| HRSA | A1-CELL LINE | ZAP Express | LP02 |
| HCUD HCUE HCUF HCUG | CD34 depleted Buffy Coat (Cord | ZAP Express | LP02 |
| HCUH HCUI | Blood), re-excision | | |
| HBXE HBXF HBXG | H. Whole Brain #2, re-excision | ZAP Express | LP02 |
| HRLM | L8 cell line | ZAP Express | LP02 |
| HBXA HBXB HBXC HBXD | Human Whole Brain #2 - Oligo dT > | ZAP Express | LP02 |
| | 1.5 Kb | | |
| HUDA HUDB HUDC | Testes | ZAP Express | LP02 |
| HHTM HHTN HHTO | H. hypothalamus, frac A;re-excision | ZAP Express | LP02 |
| HHTL | H. hypothalamus, frac A | ZAP Express | LP02 |
| HASA HASD | Human Adult Spleen | Uni-ZAP XR | LP03 |
| HFKC HFKD HFKE HFKF | Human Fetal Kidney | Uni-ZAP XR | LP03 |
| HFKG | | | |
| HE8A HE8B HE8C HE8D HE8E | Human 8 Week Whole Embryo | Uni-ZAP XR | LP03 |
| HE8F HE8M HE8N | | | |
| HGBA HGBD HGBE HGBF | Human Gall Bladder | Uni-ZAP XR | LP03 |
| HGBG HGBH HGBI | | | |
| HLHA HLHB HLHC HLHD | Human Fetal Lung III | Uni-ZAP XR | LP03 |
| HLHE HLHF HLHG HLHH | | | |
| HLHQ | | | |
| HPMA HPMB HPMC HPMD | Human Placenta | Uni-ZAP XR | LP03 |
| HPME HPMF HPMG HPMH | | | |
| HPRA HPRB HPRC HPRD | Human Prostate | Uni-ZAP XR | LP03 |
| HSIA HSIC HSID HSIE | Human Adult Small Intestine | Uni-ZAP XR | LP03 |
| HTEA HTEB HTEC HTED | Human Testes | Uni-ZAP XR | LP03 |
| HTEE HTEF HTEG HTEH HTEI | | | |
| HTEJ HTEK | | | |
| HTPA HTPB HTPC HTPD | Human Pancreas Tumor | Uni-ZAP XR | LP03 |
| HTPE | | | |
| HTTA HTTB HTTC HTTD | Human Testes Tumor | Uni-ZAP XR | LP03 |
| HTTE HTTF | | | |
| HAPA HAPB HAPC HAPM | Human Adult Pulmonary | Uni-ZAP XR | LP03 |
| HETA HETB HETC HETD | Human Endometrial Tumor | Uni-ZAP XR | LP03 |
| HETE HETF HETG HETH HETI | | | |
| HHFB HHFC HHFD HHFE | Human Fetal Heart | Uni-ZAP XR | LP03 |
| HHFF HHFG HHFH HHFI | | | |
| HHPB HHPC HHPD HHPE | Human Hippocampus | Uni-ZAP XR | LP03 |
| HHPF HHPG HHPH | | | |
| HCE1 HCE2 HCE3 HCE4 HCE5 | Human Cerebellum | Uni-ZAP XR | LP03 |
| HCEB HCEC HGED HCEE | | | |
| HCEF HCEG | | | |
| HUVB HUVC HUVD HUVE | Human Umbilical Vein, Endo. remake | Uni-ZAP XR | LP03 |
| HSTA HSTB HSTC HSTD | Human Skin Tumor | Uni-ZAP XR | LP03 |
| HTAA HTAB HTAC HTAD | Human Activated T-Cells | Uni-ZAP XR | LP03 |
| HTAE | | | |
| HFEA HFEB HFEC | Human Fetal Epithelium (Skin) | Uni-ZAP XR | LP03 |
| HJPA HJPB HJPC HJPD | HUMAN JURKAT MEMBRANE | Uni-ZAP XR | LP03 |
| | BOUND POLYSOMES | | |
| HESA | Human epithelioid sarcoma | Uni-Zap XR | LP03 |
| HLTA HLTB HLTC HLTD | Human T-Cell Lymphoma | Uni-ZAP XR | LP03 |
| HLTE HLTF | | | |
| HFTA HFTB HFTC HFTD | Human Fetal Dura Mater | Uni-ZAP XR | LP03 |
| HRDA HRDB HRDC HRDD | Human Rhabdomyosarcoma | Uni-ZAP XR | LP03 |
| HRDE HRDF | | | |
| HCAA HCAB HCAC | Cem cells cyclohexamide treated | Uni-ZAP XR | LP03 |
| HRGA HRGB HRGC HRGD | Raji Cells, cyclohexamide treated | Uni-ZAP XR | LP03 |
| HSUA HSUB HSUC HSUM | Supt Cells, cyclohexamide treated | Uni-ZAP XR | LP03 |
| HT4A HT4C HT4D | Activated T-Cells, 12 hrs. | Uni-ZAP XR | LP03 |
| HE9A HE9B HE9C HE9D HE9E | Nine Week Old Early Stage Human | Uni-ZAP XR | LP03 |
| HE9F HE9G HE9H HE9M | | | |
| HE9N | | | |
| HATA HATB HATC HATD | Human Adrenal Gland Tumor | Uni-ZAP XR | LP03 |
| HATE | | | |
| HT5A | Activated T-Cells, 24 hrs. | Uni-ZAP XR | LP03 |
| HFGA HFGM | Human Fetal Brain | Uni-ZAP XR | LP03 |
| HNEA HNEB HNEC HNED | Human Neutrophil | Uni-ZAP XR | LP03 |
| HNEE | | | |
| HBGB HBGD | Human Primary Breast Cancer | Uni-ZAP XR | LP03 |
| HBNA HBNB | Human Normal Breast | Uni-ZAP XR | LP03 |
| HCAS | Cem Cells, cyclohexamide treated, | Uni-ZAP XR | LP03 |
| | subtra | | |
| HHPS | Human Hippocampus, subtracted | pBS | LP03 |
| HKCS HKCU | Human Colon Cancer, subtracted | pBS | LP03 |
| HRGS | Raji cells, cyclohexamide treated, | pBS | LP03 |
| | subtracted | | |
| HSUT | Supt cells, cyclohexamide treated, | pBS | LP03 |
| | differentially expressed | | |
| HT4S | Activated T-Cells, 12 hrs, subtracted | Uni-ZAP XR | LP03 |
| HCDA HCDB HCDC HCDD | Human Chondrosarcoma | Uni-ZAP XR | LP03 |
| HCDE | | | |
| HOAA HOAB HOAC | Human Osteosarcoma | Uni-ZAP XR | LP03 |
| HTLA HTLB HTLC HTLD | Human adult testis, large inserts | Uni-ZAP XR | LP03 |
| HTLE HTLF | | | |
| HLMA HLMC HLMD | Breast Lymph node cDNA library | Uni-ZAP XR | LP03 |
| H6EA H6EB H6EC | HL-60, PMA 4H | Uni-ZAP XR | LP03 |
| HTXA HTXB HTXC HTXD | Activated T-Cell (12 hs)/Thiouridine | Uni-ZAP XR | LP03 |
| HTXE HTXF HTXG HTXH | labelledEco | | |
| HNFA HNFB HNFC HNFD | Human Neutrophil, Activated | Uni-ZAP XR | LP03 |
| HNFE HNFF HNFG HNFH | | | |
| HNFJ | | | |
| HTOB HTOC | HUMAN TONSILS, FRACTION 2 | Uni-ZAP XR | LP03 |
| HMGB | Human OB MG63 control fraction I | Uni-ZAP XR | LP03 |
| HOPB | Human OB HOS control fraction I | Uni-ZAP XR | LP03 |
| HORB | Human OB HOS treated (10 nM E2) | Uni-ZAP XR | LP03 |
| | fraction I | | |
| HSVA HSVB HSVC | Human Chronic Synovitis | Uni-ZAP XR | LP03 |
| HROA | HUMAN STOMACH | Uni-ZAP XR | LP03 |
| HBJA HBJB HBJC HBJD HBJE | HUMAN B CELL LYMPHOMA | Uni-ZAP XR | LP03 |
| HBJF HBJG HBJH HBJI HBJJ | | | |
| HBJK | | | |
| HCRA HCRB HCRC | human corpus colosum | Uni-ZAP XR | LP03 |
| HODA HODB HODC HODD | human ovarian cancer | Uni-ZAP XR | LP03 |
| HDSA | Dermatofibrosarcoma Protuberance | Uni-ZAP XR | LP03 |
| HMWA HMWB HMWC | Bone Marrow Cell Line (R54;11) | Uni-ZAP XR | LP03 |
| HMWD HMWE HMWF HMWG | | | |
| HMWH HMWI HMWJ | | | |
| HSOA | stomach cancer (human) | Uni-ZAP XR | LP03 |
| HERA | SKIN | Uni-ZAP XR | LP03 |
| HMDA | Brain-medulloblastoma | Uni-ZAP XR | LP03 |
| HGLA HGLB HGLD | Glioblastoma | Uni-ZAP XR | LP03 |
| HEAA | H. Atrophic Endometrium | Uni-ZAP XR | LP03 |
| HBCA HBCB | H. Lymph node breast Cancer | Uni-ZAP XR | LP03 |
| HPWT | Human Prostate BPH, re-excision | Uni-ZAP XR | LP03 |
| HFVG HFVH HFVI | Fetal Liver, subtraction IL | pBS | LP03 |
| HNFI | Human Neutrophils, Activated, re- | pBS | LP03 |
| | excision | | |
| HBMB HBMC HBMD | Human Bone Marrow, re-excision | pBS | LP03 |
| HKML HKMM HKMN | H. Kidney Medulla, re-excision | pBS | LP03 |
| HKIX HKIY | H. Kidney Cortex, subtracted | pBS | LP03 |
| HADT | H. Amygdala Depression, subtracted | pBS | LP03 |
| H6AS | HI-60, untreated, subtracted | Uni-ZAP XR | LP03 |
| H6ES | HL-60, PMA 4H, subtracted | Uni-ZAP XR | LP03 |
| H6BS | HL-60, RA 4h, Subtracted | Uni-ZAP XR | LP03 |
| H6CS | HL-60, PMA 1d, subtracted | Uni-ZAP XR | LP03 |
| HTXJ HTXK | Activated T-cell(12 h)/Thiouridine;re- | Uni-ZAP XR | LP03 |
| | excision | | |
| HMSA HMSB HMSC HMSD | Monocyte activated | Uni-ZAP XR | LP03 |
| HMSE HMSF HMSG HMSH | | | |
| HMSI HMSJ HMSK | | | |
| HAGA HAGB HAGC HAGD | Human Amygdala | Uni-ZAP XR | LP03 |
| HAGE HAGF | | | |
| HSRA HSRB HSRE | STROMAL-OSTEOCLASTOMA | Uni-ZAP XR | LP03 |
| HSRD HSRF HSRG HSRH | Human Osteoclastoma Stromal Cells - | Uni-ZAP XR | LP03 |
| | unamplified | | |
| HSQA HSQB HSQC HSQD | Stromal cell TF274 | Uni-ZAP XR | LP03 |
| HSQE HSQF HSQG | | | |
| HSKA HSKB HSKC HSKD | Smooth muscle, serum treated | Uni-ZAP XR | LP03 |
| HSKE HSKF HSKZ | | | |
| HSLA HSLB HSLC HSLD | Smooth muscle,control | Uni-ZAP XR | LP03 |
| HSLE HSLF HSLG | | | |
| HSDA HSDD HSDE HSDF | Spinal cord | Uni-ZAP XR | LP03 |
| HSDG HSDH | | | |
| HPWS | Prostate-BPH subtracted II | pBS | LP03 |
| HSKW HSKX HSKY | Smooth Muscle- HASTE normalized | pBS | LP03 |
| HFPB HFPC HFPD | H. Frontal conex,epileptic-re-excision | Uni-ZAP XR | LP03 |
| HSDI HSDJ HSDK | Spinal Cord, re-excision | Uni-ZAP XR | LP03 |
| HSKN HSKO | Smooth Muscle Serum Treated, Norm | pBS | LP03 |
| HSKG HSKH HSKI | Smooth muscle, serum induced,re-exc | pBS | LP03 |
| HFCA HFCB HFCC HFCD | Human Fetal Brain | Uni-ZAP XR | LP04 |
| HFCE HFCF | | | |
| HPTA HPTB HPTD | Human Pituitary | Uni-ZAP XR | LP04 |
| HTHB HTHC HTHD | Human Thymus | Uni-ZAP XR | LP04 |
| HE6B HE6C HE6D HE6E HE6F | Human Whole Six Week Old Embryo | Uni-ZAP XR | LP04 |
| HE6G HE6S | | | |
| HSSA HSSB HSSC HSSD HSSE | Human Synovial Sarcoma | Uni-ZAP XR | LP04 |
| HSSF HSSG HSSH HSSI HSSJ | | | |
| HSSK | | | |
| HE7T | 7 Week Old Early Stage Human, | Uni-ZAP XR | LP04 |
| | subtracted | | |
| HEPA HEPB HEPC | Human Epididymus | Uni-ZAP XR | LP04 |
| HSNA HSNB HSNC HSNM | Human Synovium | Uni-ZAP XR | LP04 |
| HSNN | | | |
| HPFB HPFC HPFD HPFE | Human Prostate Cancer, Stage C | Uni-ZAP XR | LP04 |
| | fraction | | |
| HE2A HE2D HE2E HE2H HE2I | 12 Week Old Early Stage Human | Uni-ZAP XR | LP04 |
| HE2M HE2N HE2O | | | |
| HE2B HE2C HE2F HE2G HE2P | 12 Week Old Early Stage Human, II | Uni -ZAP XR | LP04 |
| HE2Q | | | |
| HPTS HPTT HPTU | Human Pituitary, subtracted | Uni-ZAP XR | LP04 |
| HAUA HAUB HAUC | Amniotic Cells - TNF induced | Uni-ZAP XR | LP04 |
| HAQA HAQB HAQC HAQD | Amniotic Cells - Primary Culture | Uni-ZAP XR | LP04 |
| HWTA HWTB HWTC | wilm's tumor | Uni-ZAP XR | LP04 |
| HBSD | Bone Cancer, re-excision | Uni-ZAP XR | LP04 |
| HSGB | Salivary gland, re-excision | Uni-ZAP XR | LP04 |
| HSJA HSJB HSJC | Smooth muscle-ILb induced | Uni-ZAP XR | LP04 |
| HSXA HSXB HSXC HSXD | Human Substantia Nigra | Uni-ZAP XR | LP04 |
| HSHA HSHB HSHC | Smooth muscle, ILlb induced | Uni-ZAP XR | LP04 |
| HOUA HOUB HOUC HOUD | Adipocytes | Uni-ZAP XR | LP04 |
| HOUE | | | |
| HPWA HPWB HPWC HPWD | Prostate BPH | Uni-ZAP XR | LP04 |
| HPWE | | | |
| HELA HELB HELC HELD | Endothelial cells-control | Uni-ZAP XR | LP04 |
| HELE HELF HELG HELH | | | |
| HEMA HEMB HEMC HEMD | Endothelial-induced | Uni-ZAP XR | LP04 |
| HEME HEMF HEMG HEMH | | | |
| HBIA HBIB HBIC | Human Brain, Striatum | Uni-ZAP XR | LP04 |
| HHSA HHSB HHSC HHSD | Human Hypothalmus,Schizophrenia | Uni-ZAP XR | LP04 |
| HHSE | | | |
| HNGA HNGB HNGC HNGD | neutrophils control | Uni-ZAP XR | LP04 |
| HNGE HNGF HNGG HNGH | | | |
| HNGI HNGJ | | | |
| HNHA HNHB HNHC HNHD | Neutrophils IL-1 and LPS induced | Uni-ZAP XR | LP04 |
| HNHE HNHF HNHG HNHH | | | |
| HNHI HNHJ | | | |
| HSDB HSDC | STRIATUM DEPRESSION | Uni-ZAP XR | LP04 |
| HHPT | Hypothalamus | Uni-ZAP XR | LP04 |
| HSAT HSAU HSAV HSAW | Anergic T-cell | Uni-ZAP XR | LP04 |
| HSAX HSAY HSAZ | | | |
| HBMS HBMT HBMU HBMV | Bone marrow | Uni-ZAP XR | LP04 |
| HBMW HBMX | | | |
| HOEA HOEB HOEC HOED | Osteoblasts | Uni-ZAP XR | LP04 |
| HOEE HOEF HOEJ | | | |
| HAIA HAIB HAIC HAID HAIE | Epithelial-TNFa and INF induced | Uni-ZAP XR | LP04 |
| HAIF | | | |
| HTGA HTGB HTGC HTGD | Apoptotic T-cell | Uni-ZAP XR | LP04 |
| HMCA HMCB HMCC HMCD | Macrophage-oxLDL | Uni-ZAP XR | LP04 |
| HMCE | | | |
| HMAA HMAB HMAC HMAD | Macrophage (GM-CSF treated) | Uni-ZAP XR | LP04 |
| HMAE HMAF HMAG | | | |
| HPHA | Normal Prostate | Uni-ZAP XR | LP04 |
| HPIA HPIB HPIC | LNCAP prostate cell line | Uni-ZAP XR | LP04 |
| HPJA HPJB HPJC | PC3 Prostate cell line | Uni-ZAP XR | LP04 |
| HOSE HOSF HOSG | Human Osteoclastoma, re-excision | Uni-ZAP XR | LP04 |
| HTGE HTGF | Apoptotic T-cell, re-excision | Uni-ZAP XR | LP04 |
| HMAJ HMAK | H Macrophage (GM-CSF treated), re- | Uni-ZAP XR | LP04 |
| | excision | | |
| HACB HACC HACD | Human Adipose Tissue, re-excision | Uni-ZAP XR | LP04 |
| HFPA | H. Frontal Cortex, Epileptic | Uni-ZAP XR | LP04 |
| HFAA HFAB HFAC HFAD | Alzheimers, spongy change | Uni-ZAP XR | LP04 |
| HFAE | | | |
| HFAM | Frontal Lobe, Dementia | Uni-ZAP XR | LP04 |
| HMIA HMIB HMIC | Human Manic Depression Tissue | Uni-ZAP XR | LP04 |
| HTSA HTSE HTSF HTSG | Human Thymus | pBS | LP05 |
| HTSH | | | |
| HPBA HPBB HPBC HPBD | Human Pineal Gland | pBS | LP05 |
| HPBE | | | |
| HSAA HSAB HSAC | HSA 172 Cells | pBS | LP05 |
| HSBA HSBB HSBC HSBM | HSC172 cells | pBS | LP05 |
| HJAA HJAB HJAC HJAD | Jurkat T-cell G1 phase | pBS | LP05 |
| HJBA HJBB HJBC HJBD | Jurkat T-Cell, S phase | pBS | LP05 |
| HAFA HAFB | Aorta endothelial cells + TNF-a | pBS | LP05 |
| HAWA HAWB HAWC | Human White Adipose | pBS | LP05 |
| HTNA HTNB | Human Thyroid | pBS | LP05 |
| HONA | Normal Ovary, Premenopausal | pBS | LP05 |
| HARA HARB | Human Adult Retina | pBS | LP05 |
| HLJA HLJB | Human Lung | pCMVSport I | LP06 |
| HOFM HOFN HOFO | H. Ovarian Tumor, II, OV5232 | pCMVSport 2.0 | LP07 |
| HOGA HOGB HOGC | OV 10-3-95 | pCMVSport 2.0 | LP07 |
| HCGL | CD34 + cells, II | pCMVSport 2.0 | LP07 |
| HDLA | Hodgkin's Lymphoma I | pCMVSport 2.0 | LP07 |
| HDTA HDTB HDTC HDTD | Hodgkin's Lymphoma II | pCMVSport 2.0 | LP07 |
| HDTE | | | |
| HKAA HKAB HKAC HKAD | Keratinocyte | pCMVSport 2.0 | LP07 |
| HKAE HKAF HKAG HKAH | | | |
| HCIM | CAPFINDER, Crohn's Disease, lib 2 | pCMVSport 2.0 | LP07 |
| HKAL | Keratinocyte, lib 2 | pCMVSport2.0 | LP07 |
| HKAT | Keratinocyte, lib 3 | pCMVSport2.0 | LP07 |
| HNDA | Nasal polyps | pCMVSport2.0 | LP07 |
| HDRA | H. Primary Dendritic Cells,lib 3 | pCMVSport2.0 | LP07 |
| HOHA HOHB HOHC | Human Osteoblasts II | pCMVSport2.0 | LP07 |
| HLDA HLDB HLDC | Liver, Hepatoma | pCMVSport3.0 | LP08 |
| HLDN HLDO HLDP | Human Liver, normal | pCMVSport3.0 | LP08 |
| HMTA | pBMC stimulated w/ poly I/C | pCMVSport3.0 | LP08 |
| HNTA | NTERA2, control | pCMVSport3.0 | LP08 |
| HDPA HDPB HDPC HDPD | Primary Dendritic Cells, lib I | pCMVSport3.0 | LP08 |
| HDPF HDPG HDPH HDPI | | | |
| HDPJ HDPK | | | |
| HDPM HDPN HDPO HDPP | Primary Dendritic cells,frac 2 | pCMVSport3.0 | LP08 |
| HMUA HMUB HMUC | Myoloid Progenitor Cell Line | pCMVSport3.0 | LP08 |
| HHEA HHEB HHEC HHED | T Cell helper I | pCMVSport3.0 | LP08 |
| HHEM HHEN HHEO HHEP | T cell helper II | pCMVSport3.0 | LP08 |
| HEQA HEQB HEQC | Human endometrial stromal cells | pCMVSport3.0 | LP08 |
| HJMA HJMB | Human endometrial stromal cells- | pCMVSport3.0 | LP08 |
| | treated with progesterone | | |
| HSWA HSWB HSWC | Human endometrial stromal cells- | pCMVSport3.0 | LP08 |
| | treated with estradiol | | |
| HSYA HSYB HSYC | Human Thymus Stromal Cells | pCMVSport3.0 | LP08 |
| HLWA HLWB HLWC | Human Placenta | pCMVSport3.0 | LP08 |
| HRAA HRAB HRAC | Rejected Kidney, lib 4 | pCMVSport3.0 | LP08 |
| HMTM | PCR, pBMC I/C treated | PCRII | LP09 |
| HMJA | H. Meniingima, M6 | pSport 1 | LP10 |
| HMKA HMKB HMKC HMKD | H. Meningima, M1 | pSport 1 | LP10 |
| HMKE | | | |
| HUSG HUSI | Human umbilical vein endothelial cells, | pSport 1 | LP10 |
| | IL-4 induced | | |
| HUSX HUSY | Human Umbilical Vein Endothelial | pSport 1 | LP10 |
| | Cells, uninduced | | |
| HOFA | Ovarian Tumor I, OV5232 | pSport 1 | LP10 |
| HCFA HCFB HCFC HCFD | T-Cell PHA 16 hrs | pSport 1 | LP10 |
| HCFL HCFM HCFN HCFO | T-Cell PHA 24 hrs | pSport 1 | LP10 |
| HADA HADC HADD HADE | Human Adipose | pSport 1 | LP10 |
| HADF HADG | | | |
| HOVA HOVB HOVC | Human Ovary | pSport 1 | LP10 |
| HTWB HTWC HTWD HTWE | Resting T-Cell Library,II | pSport 1 | LP10 |
| HTWF | | | |
| HMMA | Spleen metastic melanoma | pSport 1 | LP10 |
| HLYA HLYB HLYC HLYD | Spleen, Chronic lymphocytic leukemia | pSport 1 | LP10 |
| HLYE | | | |
| HCGA | CD34 + cell, I | pSport 1 | LP10 |
| HEOM HEON | Human Eosinophils | pSport 1 | LP10 |
| HTDA | Human Tonsil, Lib 3 | pSport 1 | LP10 |
| HSPA | Salivary Gland, Lib 2 | pSport 1 | LP10 |
| HCHA HCHB HCHC | Breast Cancer cell line, MDA 36 | pSport 1 | LP10 |
| HCHM HCHN | Breast Cancer Cell line, angiogenic | pSport 1 | LP10 |
| HCIA | Crohn's Disease | pSport 1 | LP10 |
| HDAA HDAB HDAC | HEL cell line | pSport 1 | LP10 |
| HABA | Human Astrocyte | pSport 1 | LP10 |
| HUFA HUFB HUFC | Ulcerative Colitis | pSport 1 | LP10 |
| HNTM | NTERA2 + retinoic acid, 14 days | pSport 1 | LP10 |
| HDQA | Primary Dendritic cells,CapFinder2, | pSport 1 | LP10 |
| | frac 1 | | |
| HDQM | Primary Dendritic Cells, CapFinder, | pSport 1 | LP10 |
| | frac 2 | | |
| HLDX | Human Liver, | pSport 1 | LP10 |
| | normal,CapFinder | | |
| HULA HULB HULC | Human Dermal Endothelial | pSport1 | LP10 |
| | Cells.untreated | | |
| HUMA | Human Dermal Endothelial cells,treated | pSport1 | LP10 |
| HCJA | Human Stromal Endometrial | pSport1 | LP10 |
| | fibroblasts, untreated | | |
| HCJM | Human Stromal endometrial fibroblasts, | pSport1 | LP10 |
| | treated w/ estradiol | | |
| HEDA | Human Stromal endometrial fibroblasts, | pSport1 | LP10 |
| | treated with progesterone | | |
| HFNA | Human ovary tumor cell OV350721 | pSport1 | LP10 |
| HKGA HKGB HKGC HKGD | Merkel Cells | pSport1 | LP10 |
| HISA HISB HISC | Pancreas Islet Cell Tumor | pSport1 | LP10 |
| HLSA | Skin, burned | pSport1 | LP10 |
| HBZA | Prostate,BPH, Lib 2 | pSport 1 | LP10 |
| HBZS | Prostate BPH,Lib 2, subtracted | pSport 1 | LP10 |
| HFIA HFIB HFIC | Synovial Fibroblasts (control) | pSport 1 | LP10 |
| HFIH HFII HFIJ | Synovial hypoxia | pSport 1 | LP10 |
| HFIT HFIU HFIV | Synovial IL-1/TNF stimulated | pSport 1 | LP10 |
| HGCA | Messangial cell, frac 1 | pSport1 | LP10 |
| HMVA HMVB HMVC | Bone Marrow Stromal Cell, untreated | pSport1 | LP10 |
| HFIX HFIY HFIZ | Synovial Fibroblasts (I11/TNF), subt | pSport1 | LP10 |
| HFOX HFOY HFOZ | Synovial hypoxia-RSF subtracted | pSport1 | LP10 |
| HMQA HMQB HMQC HMQD | Human Activated Monocytes | Uni-ZAP XR | LP11 |
| HLIA HLIB HLIC | Human Liver | pCMVSport 1 | LP012 |
| HHBA HHBB HHBC HHBD | Human Heart | pCMVSport 1 | LP012 |
| HHBE | | | |
| HBBA HBBB | Human Brain | pCMVSport 1 | LP012 |
| HLJA HLIB HLJC HLJD HLJE | Human Lung | pCMVSport 1 | LP012 |
| HOGA HOGB HOGC | Ovarian Tumor | pCMVSport 2.0 | LP012 |
| HTJM | Human Tonsils, Lib 2 | pCMVSport 2.0 | LP012 |
| HAMF HAMG | KMH2 | pCMVSport 3.0 | LP012 |
| HAJA HAJB HAJC | L428 | pCMVSport 3.0 | LP012 |
| HWBA HWBB HWBC HWBD | Dendritic cells, pooled | pCMVSport 3.0 | LP012 |
| HWBE | | | |
| HWAA HWAB HWAC HWAD | Human Bone Marrow, treated | pCMVSport 3.0 | LP012 |
| HWAE | | | |
| HYAA HYAB HYAC | B Cell lymphoma | pCMVSport 3.0 | LP012 |
| HWHG HWHH HWHI | Healing groin wound, 6.5 hours post | pCMVSport 3.0 | LP012 |
| | incision | | |
| HWHP HWHQ HWHR | Healing groin wound; 7.5 hours post | pCMVSport 3.0 | LP012 |
| | incision | | |
| HARM | Heahng groin wound - zero hr post- | pCMVSport 3.0 | LP012 |
| | incision (control) | | |
| HBIM | Olfactory epithelium; nasalcavity | pCMVSport 3.0 | LP012 |
| HWDA | Healing Abdomen wound; 70&90 min | pCMVSport 3.0 | LP012 |
| | post incision | | |
| HWEA | Healing Abdomen Wound;15 days post | pCMVSport 3.0 | LP012 |
| | incision | | |
| HWJA | Healing Abdomen Wound;21&29 days | pCMVSport 3.0 | LP012 |
| HNAL | Human Tongue, frac 2 | pSport1 | LP012 |
| HMJA | H. Meniingima, M6 | pSport1 | LP012 |
| HMKA HMKB HMKC HMKD | H. Meningima, M1 | pSport1 | LP012 |
| HMKE | | | |
| HOFA | Ovarian Tumor 1, OV5232 | pSport1 | LP012 |
| HCFA HCFB HCFC HCFD | T-Cell PHA 16 hrs | pSport1 | LP012 |
| HCFL HCFM HCFN HCFO | T-Cell PHA 24 hrs | pSport1 | LP012 |
| HMMA HMMB HMMC | Spleen metastic melanoma | pSport1 | LP012 |
| HTDA | Human Tonsil, Lib 3 | pSport1 | LP012 |
| HDBA | Human Fetal Thymus | pSport1 | LP012 |
| HDUA | Pericardium | pSport1 | LP012 |
| HBZA | Prostate,BPH, Lib 2 | pSport1 | LP012 |
| HWCA | Larynx tumor | pSport1 | LP012 |
| HWKA | Normal lung | pSport1 | LP012 |
| HSMB | Bone marrow stroma,treated | pSport1 | LP012 |
| HBHM | Normal trachea | pSport1 | LP012 |
| HLFC | Human Larynx | pSport1 | LP012 |
| HLRB | Siebben Polyposis | pSport1 | LP012 |
| HNIA | Mammary Gland | pSport1 | LP012 |
| HNJB | Palate carcinoma | pSport1 | LP012 |
| HNKA | Palate normal | pSport1 | LP012 |
| HMZA | Pharynx carcinoma | pSport1 | LP012 |
| HABG | Cheek Carcinoma | pSport1 | LP012 |
| HMZM | Pharynx Carcinoma | pSport1 | LP012 |
| HDRM | Larynx Carcinoma | pSport1 | LP012 |
| HVAA | Pancreas normal PCA4 No | pSport1 | LP012 |
| HICA | Tongue carcinoma | pSport1 | LP012 |
| HUKA HUKB HUKC HUKD | Human Uterine Cancer | Lambda ZAP II | LP013 |
| HUKE | | | |
| HFFA | Human Fetal Brain, random primed | Lambda ZAP II | LP013 |
| HTUA | Activated T-cell labeled with 4-thioluri | Lambda ZAP II | LP013 |
| HBQA | Early Stage Human Brain, random | Lambda ZAP II | LP013 |
| | primed | | |
| HMEB | Human microvascular Endothelial cells. | Lambda ZAP II | LP013 |
| | fract. B | | |
| HUSH | Human Umbilical Vein Endothelial | Lambda ZAP II | LP013 |
| | cells, fract. A, re-excision | | |
| HLQC HLQD | Hepatocellular tumor, re-excision | Lambda ZAP II | LP013 |
| HTWJ HTWK HTWL | Resting T-cell, re-excision | Lambda ZAP II | LP013 |
| HF6S | Human Whole 6 week Old Embryo (II), | pBluescript | LP013 |
| | subt | | |
| HHPS | Human Hippocampus, subtracted | pBluescript | LP013 |
| HLIS | LNCAP, differential expression | pBluescript | LP013 |
| HLHS HLHT | Early Stage Human Lung, Subtracted | pBluescript | LP013 |
| HSUS | Supt cells, cyclohexamide treated, | pBluescript | LP013 |
| | subtracted | | |
| HSUT | Supt cells, cyclohexamide treated, | pBluescript | LP013 |
| | differentially expressed | | |
| HSDS | H. Striatum Depression, subtracted | pBluescript | LP013 |
| HPTZ | Human Pituitary, Subtracted VII | pBluescript | LP013 |
| HSDX | H. Striatum Depression, subt II | pBluescript | LP013 |
| HSDZ | H. Striatum Depression, subt | pBluescript | LP013 |
| HPBA HPBB HPBC HPBD | Human Pineal Gland | pBluescript SK- | LP013 |
| HPBE | | | |
| HRTA | Colorectal Tumor | pBluescript SK- | LP013 |
| HSBA HSBB HSBC HSBM | HSC172 cells | pBluescript SK- | LP013 |
| HJAA HJAB HJAC HJAD | Jurkat T-cell G1 phase | pBluescript SK- | LP013 |
| HJBA HJBB HJBC HJBD | Jurkat T-ceIl, S1 phase | pBluescript SK- | LP013 |
| HTNA HTNB | Human Thyroid | pBluescript SK- | LP013 |
| HAHA HAHB | Human Adult Heart | Uni-ZAP XR | LP013 |
| HE6A | Whole 6 week Old Embryo | Uni-ZAP XR | LP013 |
| HFCA HFCB HFCC HFCD | Human Fetal Brain | Uni-ZAP XR | LP013 |
| HFCE | | | |
| HFKC HFKD HFKE HFKF | Human Fetal Kidney | Uni-ZAP XR | LP013 |
| HFKG | | | |
| HGBA HGBD HGBE HGBF | Human Gall Bladder | Uni-ZAP XR | LP013 |
| HGBG | | | |
| HPRA HPRB HPRC HPRD | Human Prostate | Uni-ZAP XR | LP013 |
| HTEA HTEB HTEC HTED | Human Testes | Uni-ZAP XR | LP013 |
| HTEE | | | |
| HTTA HTTB HTTC HTTD | Human Testes Tumor | Uni-ZAP XR | LP013 |
| HTTE | | | |
| HYBA HYBB | Human Fetal Bone | Uni-ZAP XR | LP013 |
| HFLA | Human Fetal Liver | Uni-ZAP XR | LP013 |
| HHFB HHFC HHFD HHFE | Human Fetal Heart | Uni-ZAP XR | LP013 |
| HHFF | | | |
| HUVB HUVC HUVD HUVE | Human Umbilical Vein, End. remake | Uni-ZAP XR | LP013 |
| HTHB HTHC HTHD | Human Thymus | Uni-ZAP XR | LP013 |
| HSTA HSTB HSTC HSTD | Human Skin Tumor | Uni-ZAP XR | LP013 |
| HTAA HTAB HTAC HTAD | Human Activated T-cells | Uni-ZAP XR | LP013 |
| HTAE | | | |
| HFEA HFEB HFEC | Human Fetal Epithelium (skin) | Uni-ZAP XR | LP013 |
| HJPA HJPB HJPC HJPD | Human Jurkat Membrane Bound | Uni-ZAP XR | LP013 |
| | Polysomes | | |
| HESA | Human Epithelioid Sarcoma | Uni-ZAP XR | LP013 |
| HALS | Human Adult Liver, Subtracted | Uni-ZAP XR | LP013 |
| HFTA HFTB HFTC HFTD | Human Fetal Dura Mater | Uni-ZAP XR | LP013 |
| HCAA HCAB HCAC | Cem cells, cyclohexamide treated | Uni-ZAP XR | LP013 |
| HRGA HRGB HRGC HRGD | Raji Cells, cyclohexamide treated | Uni-ZAP XR | LP013 |
| HE9A HE9B HE9C HE9D HE9E | Nine Week Old Early Stage Human | Uni-ZAP XR | LP013 |
| HSFA | Human Fibrosarcoma | Uni-ZAP XR | LP013 |
| HATA HATB HATC HATD | Human Adrenal Gland Tumor | Uni-ZAP XR | LP013 |
| HATE | | | |
| HTRA | Human Trachea Tumor | Uni-ZAP XR | LP013 |
| HE2A HE2D HE2E HE2H HE2I | 12 Week Old Early Stage Human | Uni-ZAP XR | LP013 |
| HE2B HE2C HE2F HE2G HE2P | 12 Week Old Early Stage Human, II | Uni-ZAP XR | LP013 |
| HNEA HNEB HNEC HNED | Human Neutrophil | Uni-ZAP XR | LP013 |
| HNEE | | | |
| HBGA | Human Primary Breast Cancer | Uni-ZAP XR | LP013 |
| HPTS HPTT HPTU | Human Pituitary, subtracted | Uni-ZAP XR | LP013 |
| HMQA HMQB HMQC HMQD | Human Activated Monocytes | Uni-ZAP XR | LP013 |
| HOAA HOAB HOAC | Human Osteosarcoma | Uni-ZAP XR | LP013 |
| HTOA HTOD HTOE HTOF | human tonsils | Uni-ZAP XR | LP013 |
| HTOG | | | |
| HMGB | Human OB MG63 control fraction I | Uni-ZAP XR | LP013 |
| HOPB | Human OB HOS control fraction I | Uni-ZAP XR | LP013 |
| HOQB | Human OB HOS treated (1 nM E2) | Uni-ZAP XR | LP013 |
| | fraction I | | |
| HAUA HAUB HAUC | Amniotic Cells - TNF induced | Uni-ZAP XR | LP013 |
| HAQA HAQB HAQC HAQD | Amniotic Cells - Primary Culture | Uni-ZAP XR | LP013 |
| HROA HROC | HUMAN STOMACH | Uni-ZAP XR | LP013 |
| HBJA HBJB HBJC HBJD HBJE | HUMAN B CELL LYMPHOMA | Uni-ZAP XR | LP013 |
| HODA HODB HODC HODD | human ovarian cancer | Uni-ZAP XR | LP013 |
| HCPA | Corpus Callosum | Uni-ZAP XR | LP013 |
| HSOA | stomach cancer (human) | Uni-ZAP XR | LP013 |
| HERA | SKIN | Uni-ZAP XR | LP013 |
| HMDA | Brain-medulloblastoma | Uni-ZAP XR | LP013 |
| HGLA HGLB HGLD | Glioblastoma | Uni-ZAP XR | LP013 |
| HWTA HWTB HWTC | wilm's tumor | Uni-ZAP XR | LP013 |
| HEAA | H. Atrophic Endometrium | Uni-ZAP XR | LP013 |
| HAPN HAPO HAPP HAPQ | Human Adult Pulmonary;re-excision | Uni-ZAP XR | LP013 |
| HAPR | | | |
| HLTG HLTH | Human T-cell lymphoma;re-excision | Uni-ZAP XR | LP013 |
| HAHC HAHD HAHE | Human Adult Heart;re-excision | Uni-ZAP XR | LP013 |
| HAGA HAGB HAGC HAGD | Human Amygdala | Uni-ZAP XR | LP013 |
| HAGE | | | |
| HSJA HSJB HSJC | Smooth muscle-ILb induced | Uni-ZAP XR | LP013 |
| HSHA HSHB HSHC | Smooth muscle, ILIb induced | Uni-ZAP XR | LP013 |
| HPWA HPWB HPWC HPWD | Prostate BPH | Uni-ZAP XR | LP013 |
| HPWE | | | |
| HPIA HPIB HPIC | LNCAP prostate cell line | Uni-ZAP XR | LP013 |
| HPJA HPJB HPJC | PC3 Prostate cell line | Uni-ZAP XR | LP013 |
| HBTA | Bone Marrow Stroma, TNF&LPS ind | Uni-ZAP XR | LP013 |
| HMCF HMCG HMCH HMC1 | Macrophage-oxLDL; re-excision | Uni-ZAP XR | LP013 |
| HMCJ | | | |
| HAGG HAGH HAGI | Human Amygdala;re-excision | Uni-ZAP XR | LP013 |
| HACA | H. Adipose Tissue | Uni-ZAP XR | LP013 |
| HKFB | K562 + PMA (36 hrs),re-excision | ZAP Express | LP013 |
| HCWT HCWU HCWV | CD34 positive cells (cord blood),re-ex | ZAP Express | LP013 |
| HBWA | Whole brain | ZAP Express | LP013 |
| HBXA HBXB HBXC HBXD | Human Whole Brain #2 - Oligo dT > | ZAP Express | LP013 |
| | 1.5 Kb | | |
| HAVM | Temporal cortex-Alzheizmer | pT-Adv | LP014 |
| HAVT | Hippocampus, Alzheimer Subtracted | pT-Adv | LP014 |
| HHAS | CHME Cell Line | Uni-ZAP XR | LP014 |
| HAJR | Larynx normal | pSport 1 | LP014 |
| HWLE HWLF HWLG HWLH | Colon Normal | pSport 1 | LP014 |
| HCRM HCRN HCRO | Colon Carcinoma | pSport 1 | LP014 |
| HWLI HWLJ HWLK | Colon Normal | pSport 1 | LP014 |
| HWLQ HWLR HWLS HWLT | Colon Tumor | pSport 1 | LP014 |
| HBFM | Gastrocnemius Muscle | pSport 1 | LP014 |
| HBOD HBOE | Quadriceps Muscle | pSport 1 | LP014 |
| HBKD HBKE | Soleus Muscle | pSport 1 | LP014 |
| HCCM | Pancreatic Langerhans | pSport 1 | LP014 |
| HWGA | Larynx carcinoma | pSport 1 | LP014 |
| HWGM HWGN | Larynx carcinoma | pSport 1 | LP014 |
| HWLA HWLB HWLC | Normal colon | pSport 1 | LP014 |
| HWLM HWLN | Colon Tumor | pSport 1 | LP014 |
| HVAM HVAN HVAO | Pancreas Tumor | pSport 1 | LP014 |
| HWGQ | Larynx carcinoma | pSport 1 | LP014 |
| HAQM HAQN | Salivary Gland | pSport 1 | LP014 |
| HASM | Stomach; normal | pSport 1 | LP014 |
| HBCM | Uterus; normal | pSport 1 | LP014 |
| HCDM | Testis; normal | pSport 1 | LP014 |
| HDJM | Brain; normal | pSport 1 | LPOL4 |
| HEFM | Adrenal Gland,normal | pSport 1 | LP014 |
| HBAA | Rectum normal | pSport 1 | LP014 |
| HFDM | Rectum tumour | pSport 1 | LP014 |
| HGAM | Colon, normal | pSport 1 | LP014 |
| HHMM | Colon, tumour | pSport 1 | LP014 |
| HCLB HCLC | Human Lung Cancer | Lambda Zap II | LP015 |
| HRLA | L1 Cell line | ZAP Express | LP015 |
| HHAM | Hypothalamus, Alzheimer's | pCMVSport 3.0 | LP015 |
| HKBA | Ku 812F Basophils Line | pSport 1 | LP015 |
| HS2S | Saos2, Dexamethosome Treated | pSport 1 | LP016 |
| HA5A | Lung Carcinoma A549 TNFalpha | pSport 1 | LP016 |
| | activated | | |
| HTFM | TF-1 Cell Line GM-CSF Treated | pSport 1 | LP016 |
| HYAS | Thyroid Tumour | pSport 1 | LP016 |
| HUTS | Larynx Normal | pSport 1 | LP016 |
| HXOA | Larynx Tumor | pSport 1 | LP016 |
| HEAH | Ea.hy.926 cell line | pSport 1 | LP016 |
| HINA | Adenocarcinoma Human | pSport 1 | LP016 |
| HRMA | Lung Mesothelium | pSport 1 | LP016 |
| HLCL | Human Pre-Differentiated Adipocytes | Uni-Zap XR | LP017 |
| HS2A | Saos2 Cells | pSport 1 | LP020 |
| HS2I | Saos2 Cells; Vitamin D3 Treated | pSport 1 | LP020 |
| HUCM | CHME Cell Line, untreated | pSport 1 | LP020 |
| HEPN | Aryepiglottis Normal | pSport 1 | LP020 |
| HPSN | Sinus Piniforims Tumour | pSport1 | LP020 |
| HNSA | Stomach Normal | pSport 1 | LP020 |
| HNSM | Stomach Tumour | pSport 1 | LP020 |
| HNLA | Liver Normal Met5No | pSport1 | LP020 |
| HUTA | Liver Tumour Met 5 Tu | pSport 1 | LP020 |
| HOCN | Colon Normal | pSport 1 | LP020 |
| HOCT | Colon Tumor | pSport 1 | LP020 |
| HTNT | Tongue Tumour | pSport 1 | LP020 |
| HLXN | Larynx Normal | pSport 1 | LP020 |
| HLXT | Larynx Tumour | pSport 1 | LP020 |
| HTYN | Thymus | pSport 1 | LP020 |
| HPLN | Placenta | pSport 1 | LP020 |
| HTNG | Tongue Normal | pSport 1 | LP020 |
| HZAA | Thyroid Normal (SDCA2 No) | pSport 1 | LP020 |
| HWES | Thyroid Thyroiditis | pSport1 | LP020 |
| HFHD | Ficolled Human Stromal Cells, 5Fu | pTrip1Ex2 | LP021 |
| | treated | | |
| HFHM,HFHN | Ficolled Human Stromal Cells, | pTrip1Ex2 | LP021 |
| | Untreated | | |
| HPCI | Hep G2 Cells, lambda library | lambda Zap-CMV XR | LP02l |
| HBCA,HBCB,HBCC | H. Lymph node breast Cancer | Uni-ZAP XR | LP021 |
| HCOK | Chondrocytes | pSPORT1 | LP022 |
| HDCA, HDCB, HDCC | Dendritic Cells From CD34 Cells | pSPORT1 | LP022 |
| HDMA, HDMB | CD40 activated monocyte dendritic | pSPORT1 | LP022 |
| | cells | | |
| HDDM, HDDN, HDDO | LPS activated derived dendritic cells | pSPORT1 | LP022 |
| HPCR | Hep G2 Cells, PCR library | lambda Zap-CMV XR | LP022 |
| HAAA, HAAB, HAAC | Lung, Cancer (4005313A3): Invasive | pSPORT1 | LP022 |
| | Poorly Differentiated Lung | | |
| | Adenocarcinoma | | |
| HIPA, HIPB, HIPC | Lung, Cancer (4005163 B7): Invasive, | pSPORT1 | LP022 |
| | Poorly Diff. Adenocarcinoma, | | |
| | Metastatic | | |
| HOOR, HOOI | Ovary, Cancer: (4004562 B6) Papillary | pSPORT1 | LP022 |
| | Serous Cystic Neoplasm, Low | | |
| | Malignant Pot | | |
| HIDA | Lung, Normal: (4005313 B1) | pSPORT1 | LP022 |
| HUJA,HUJB,HUJC,HUJD,HUJE | B-Cells | pCMVSport 3.0 | LP022 |
| HNOA,HNOB,HNOC,HNOD | Ovary, Normal: (9805C040R) | pSPORT1 | LP022 |
| HNLM | Lung, Normal: (4005313 B1) | pSPORT1 | LP022 |
| HSCL | Stromal Cells | pSPORT1 | LP022 |
| HAAX | Lung, Cancer: (4005313 A3) Invasive | pSPORT1 | LP022 |
| | Poorly-differentiated Metastatic lung | | |
| | adenocarcinoma | | |
| HUUA.HU UB,HUUC,HUUD | B-cells (unstimulated) | pTrip1Ex2 | LP022 |
| HWWA,HWWB,HWWC,HWW | B-cells (stimulated) | pSPORT1 | LP022 |
| D,HWWE,HWWF,HWWG | | | |
| HCCC | Colon, Cancer: (9808C064R) | pCMVSport 3.0 | LP023 |
| HPDO HPDP HPDQ HPDR HPD | Ovary, Cancer (9809C332): Poorly | pSport 1 | LP023 |
| | differentiated adenocarcinoma | | |
| HPCO HPCP HPCQ HPCT | Ovary, Cancer (15395A1F): Grade II | pSport 1 | LP023 |
| | Papillary Carcinoma | | |
| HOCM HOCO HOCP HOCQ | Ovary, Cancer: (15799A1F) Poorly | pSport 1 | LP023 |
| | differentiated carcinoma | | |
| HCBM HCBN HCBO | Breast, Cancer: (4004943 A5) | pSport 1 | LP023 |
| HNBT HNBU HNBV | Breast, Normal: (4005522B2) | pSport 1 | LP023 |
| HBCP HBCQ | Breast, Cancer: (4005522 A2) | pSport 1 | LP023 |
| HBCJ | Breast, Cancer: (9806C012R) | pSport 1 | LP023 |
| HSAM HSAN | Stromal cells 3.88 | pSport 1 | LP023 |
| HVCA HVCB HVCC HVCD | Ovary, Cancer: (4004332 A2) | pSport 1 | LP023 |
| HSCK HSEN HSEO | Stromal cells (HBM3.18) | pSport 1 | LP023 |
| HSCP HSCQ | stromal cell clone 2.5 | pSport 1 | LP023 |
| HUXA | Breast Cancer: (4005385 A2) | pSport 1 | LP023 |
| HCOM HCON HCOO HCOP | Ovary, Cancer (4004650 A3): Well- | pSport 1 | LP023 |
| HCOQ | Differentiated Micropapillary Serous | | |
| | Carcinoma | | |
| HBNM | Breast, Cancer: (9802C020E) | pSport 1 | LP023 |
| HVVA HVVB HVVC HVVD | Human Bone Marrow, treated | pSport 1 | LP023 |
| HVVE | | | |

[0940] Two nonlimiting examples are provided below for isolating a particular clone from the deposited sample of plasmid cDNAs cited for that clone in Table 7. First, a plasmid is directly isolated by screening the clones using a polynucleotide probe corresponding to the nucleotide sequence of SEQ ID NO:X.

[0941] Particularly, a specific polynucleotide with 30-40 nucleotides is synthesized using an Applied Biosystems DNA synthesizer according to the sequence reported. The oligonucleotide is labeled, for instance, with ³²P-γ-ATP using T4 polynucleotide kinase and purified according to routine methods. (E.g., Maniatis et al., Molecular Cloning: A Laboratory Manual, Cold Spring Harbor Press, Cold Spring, N.Y. (1982).) The plasmid mixture is transformed into a suitable host, as indicated above (such as XL-1 Blue (Stratagene)) using techniques known to those of skill in the art, such as those provided by the vector supplier or in related publications or patents cited above. The transformants are plated on 1.5% agar plates (containing the appropriate selection agent, e.g., ampicillin) to a density of about 150 transformants (colonies) per plate. These plates are screened using Nylon membranes according to routine methods for bacterial colony screening (e.g., Sambrook et al., Molecular Cloning: A Laboratory Manual, 2nd Edit., (1989), Cold Spring Harbor Laboratory Press, pages 1.93 to 1.104), or other techniques known to those of skill in the art.

[0942] Alternatively, two primers of 17-20 nucleotides derived from both ends of the nucleotide sequence of SEQ ID NO:X are synthesized and used to amplify the desired cDNA using the deposited cDNA plasmid as a template. The polymerase chain reaction is carried out under routine conditions, for instance, in 25 μl of reaction mixture with 0.5 ug of the above cDNA template. A convenient reaction mixture is 1.5-5 mM MgCl₂, 0.01% (w/v) gelatin, 20 μM each of dATP, dCTP, dGTP, dTTP, 25 pmol of each primer and 0.25 Unit of Taq polymerase. Thirty five cycles of PCR (denaturation at 94° C. for 1 min; annealing at 55° C. for 1 min; elongation at 72° C. for 1 min) are performed with a Perkin-Elmer Cetus automated thermal cycler. The amplified product is analyzed by agarose gel electrophoresis and the DNA band with expected molecular weight is excised and purified. The PCR product is verified to be the selected sequence by subcloning and sequencing the DNA product.

[0943] Several methods are available for the identification of the 5′ or 3′ non-coding portions of a gene which may not be present in the deposited clone. These methods include but are not limited to, filter probing, clone enrichment using specific probes, and protocols similar or identical to 5′ and 3′ “RACE” protocols which are well known in the art. For instance, a method similar to 5′ RACE is available for generating the missing 5′ end of a desired full-length transcript. (Fromont-Racine et al., Nucleic Acids Res. 21(7):1683-1684 (1993).)

[0944] Briefly, a specific RNA oligonucleotide is ligated to the 5′ ends of a population of RNA presumably containing full-length gene RNA transcripts. A primer set containing a primer specific to the ligated RNA oligonucleotide and a primer specific to a known sequence of the gene of interest is used to PCR amplify the 5′ portion of the desired full-length gene. This amplified product may then be sequenced and used to generate the full length gene.

[0945] This above method starts with-total RNA isolated from the desired source, although poly-A+ RNA can be used. The RNA preparation can then be treated with phosphatase if necessary to eliminate 5′ phosphate groups on degraded or damaged RNA which may interfere with the later RNA ligase step. The phosphatase should then be inactivated and the RNA treated with tobacco acid pyrophosphatase in order to remove the cap structure present at the 5′ ends of messenger RNAs. This reaction leaves a 5′ phosphate group at the 5′ end of the cap cleaved RNA which can then be ligated to an RNA oligonucleotide using T4 RNA ligase.

[0946] This modified RNA preparation is used as a template for first strand cDNA synthesis using a gene specific oligonucleotide. The first strand synthesis reaction is used as a template for PCR amplification of the desired 5′ end using a primer specific to the ligated RNA oligonucleotide and a primer specific to the known sequence of the gene of interest. The resultant product is then sequenced and analyzed to confirm that the 5′ end sequence belongs to the desired gene.

### Example 2

### Isolation of Genomic Clones Corresponding to a Polynucleotide

[0947] A human genomic P1 library (Genomic Systems, Inc.) is screened by PCR using primers selected for the sequence corresponding to SEQ ID NO:X according to the method described in Example 1. (See also, Sambrook et al., Molecular Cloning: A Laboratory Manual, 2nd Edn., (1989), Cold Spring Harbor Laboratory Press).

### Example 3

### Tissue Specific Expression Analysis

[0948] The Human Genome Sciences, Inc. (HGS) database is derived from sequencing tissue and/or disease specific cDNA libraries. Libraries generated from a particular tissue are selected and the specific tissue expression pattern of EST groups or assembled contigs within these libraries is determined by comparison of the expression patterns of those groups or contigs within the entire database. ESTs and assembled contigs which show tissue specific expression are selected.

[0949] The original clone from which the specific EST sequence was generated, or in the case of an assembled contig, the clone from which the 5′ most EST sequence was generated, is obtained from the catalogued library of clones and the insert amplified by PCR using methods known in the art. The PCR product is denatured and then transferred in 96 or 384 well format to a nylon membrane (Schleicher and Scheull) generating an array filter of tissue specific clones. Housekeeping genes, maize genes, and known tissue specific genes are included on the filters. These targets can be used in signal normalization and to validate assay sensitivity. Additional targets are included to monitor probe length and specificity of hybridization.

[0950] Radioactively labeled hybridization probes are generated by first strand cDNA synthesis per the manufacturer's instructions (Life Technologies) from mRNA/RNA samples prepared from the specific tissue being analyzed (e.g., heart, heart valve, vascular system, heart cancer, prostate, prostate cancer, ovarian, ovarian cancer, etc.). The hybridization probes are purified by gel exclusion chromatography, quantitated, and hybridized with the array filters in hybridization bottles at 65° C. overnight. The filters are washed under stringent conditions and signals are captured using a Fuji phosphorimager.

[0951] Data is extracted using AIS software and following background subtraction, signal normalization is performed. This includes a normalization of filter-wide expression levels between different experimental runs. Genes that are differentially expressed in the tissue of interest are identified.

### Example 4

### Chromosomal Mapping of the Polynucleotides

[0952] An oligonucleotide primer set is designed according to the sequence at the 5′ end of SEQ ID NO:X. This primer preferably spans about 100 nucleotides. This primer set is then used in a polymerase chain reaction under the following set of conditions: 30 seconds, 95° C.; 1 minute, 56° C.; 1 minute, 70° C. This cycle is repeated 32 times followed by one 5 minute cycle at 70° C. Human, mouse, and hamster DNA is used as template in addition to a somatic cell hybrid panel containing individual chromosomes or chromosome fragments (Bios, Inc). The reactions are analyzed on either 8% polyacrylamide gels or 3.5% agarose gels. Chromosome mapping is determined by the presence of an approximately 100 bp PCR fragment in the particular somatic cell hybrid.

### Example 5

### Bacterial Expression of a Polypeptide

[0953] A polynucleotide encoding a polypeptide of the present invention is amplified using PCR oligonucleotide primers corresponding to the 5′ and 3′ ends of the DNA sequence, as outlined in Example 1, to synthesize insertion fragments. The primers used to amplify the cDNA insert should preferably contain restriction sites, such as BamHI and XbaI, at the 5′ end of the primers in order to clone the amplified product into the expression vector. For example, BamHI and XbaI correspond to the restriction enzyme sites on the bacterial expression vector pQE-9. (Qiagen, Inc., Chatsworth, Calif.). This plasmid vector encodes antibiotic resistance (Amp^{r}), a bacterial origin of replication (ori), an IPTG-regulatable promoter/operator (P/O), a ribosome binding site (RBS), a 6-histidine tag (6-His), and restriction enzyme cloning sites.

[0954] The pQE-9 vector is digested with BamHI and XbaI and the amplified fragment is ligated into the pQE-9 vector maintaining the reading frame initiated at the bacterial RBS. The ligation mixture is then used to transform the E. coli strain M15/rep4 (Qiagen, Inc.) which contains multiple copies of the plasmid pREP4, which expresses the lacI repressor and also confers kanamycin resistance (Kanr). Transformants are identified by their ability to grow on LB plates and ampicillin/kanamycin resistant colonies are selected. Plasmid DNA is isolated and confirmed by restriction analysis.

[0955] Clones containing the desired constructs are grown overnight (O/N) in liquid culture in LB media supplemented with both Amp (100 ug/ml) and Kan (25 ug/ml). The O/N culture is used to inoculate a large culture at a ratio of 1:100 to 1:250. The cells are grown to an optical density 600 (O.D.⁶⁰⁰) of between 0.4 and 0.6. IPTG (Isopropyl-B-D-thiogalacto pyranoside) is then added to a final concentration of 1 mM. IPTG induces by inactivating the lacI repressor, clearing the P/O leading to increased gene expression.

[0956] Cells are grown for an extra 3 to 4 hours. Cells are then harvested by centrifugation (20 mins at 6000×g). The cell pellet is solubilized in the chaotropic agent 6 Molar Guanidine HCl by stirring for 3-4 hours at 4° C. The cell debris is removed by centrifugation, and the supernatant containing the polypeptide is loaded onto a nickel-nitrilo-tri-acetic acid (“Ni-NTA”) affinity resin column (available from QIAGEN, Inc., supra). Proteins with a 6×His tag bind to the Ni-NTA resin with high affinity and can be purified in a simple one-step procedure (for details see: The QIAexpressionist (1995) QIAGEN, Inc., supra).

[0957] Briefly, the supernatant is loaded onto the column in 6 M guanidine-HCl, pH 8. The column is first washed with 10 volumes of 6 M guanidine-HCl, pH 8, then washed with 10 volumes of 6 M guanidine-HCl pH 6, and finally the polypeptide is eluted with 6 M guanidine-HCl, pH 5.

[0958] The purified protein is then renatured by dialyzing it against phosphate-buffered saline (PBS) or 50 mM Na-acetate, pH 6 buffer plus 200 mM NaCl. Alternatively, the protein can be successfully refolded while immobilized on the Ni-NTA column. The recommended conditions are as follows: renature using a linear 6M-1M urea gradient in 500 mM NaCl, 20% glycerol, 20 mM Tris/HCl pH 7.4, containing protease inhibitors. The renaturation should be performed over a period of 1.5 hours or more. After renaturation the proteins are eluted by the addition of 250 mM immidazole. Immidazole is removed by a final dialyzing step against PBS or 50 mM sodium acetate pH 6 buffer plus 200 mM NaCl. The purified protein is stored at 4° C. or frozen at −80° C.

[0959] In addition to the above expression vector, the present invention further includes an expression vector, called pHE4a (ATCC Accession Number 209645, deposited on Feb. 25, 1998) which contains phage operator and promoter elements operatively linked to a polynucleotide of the present invention. This vector contains: 1) a neomycinphosphotransferase gene as a selection marker, 2) an E. coli origin of replication, 3) a T5 phage promoter sequence, 4) two lac operator sequences, 5) a Shine-Delgarno sequence, and 6) the lactose operon repressor gene (lacIq). The origin of replication (oriC) is derived from pUC 19 (LTI, Gaithersburg, Md.). The promoter and operator sequences are made synthetically.

[0960] DNA can be inserted into the pHE4a by restricting the vector with NdeI and XbaI, BamHI, XhoI, or Asp718, running the restricted product on a gel, and isolating the larger fragment (the stuffer fragment should be about 310 base pairs). The DNA insert is generated according to the PCR protocol described in Example 1, using PCR primers having restriction sites for NdeI (5′ primer) and XbaI, BamHI, XhoI, or Asp718 (3′ primer). The PCR insert is gel purified and restricted with compatible enzymes. The insert and vector are ligated according to standard protocols.

[0961] The engineered vector could easily be substituted in the above protocol to express protein in a bacterial system.

### Example 6

### Purification of a Polypeptide from an Inclusion Body

[0962] The following alternative method can be used to purify a polypeptide expressed in E coli when it is present in the form of inclusion bodies. Unless otherwise specified, all of the following steps are conducted at 4-10° C.

[0963] Upon completion of the production phase of the E. coli fermentation, the cell culture is cooled to 4-10° C. and the cells harvested by continuous centrifugation at 15,000 rpm (Heraeus Sepatech). On the basis of the expected yield of protein per unit weight of cell paste and the amount of purified protein required, an appropriate amount of cell paste, by weight, is suspended in a buffer solution containing 100 mM Tris, 50 mM EDTA, pH 7.4. The cells are dispersed to a homogeneous suspension using a high shear mixer.

[0964] The cells are then lysed by passing the solution through a microfluidizer (Microfuidics, Corp. or APV Gaulin, Inc.) twice at 4000-6000 psi. The homogenate is then mixed with NaCl solution to a final concentration of 0.5 M NaCl, followed by centrifugation at 7000×g for 15 min. The resultant pellet is washed again using 0.5M NaCl, 100 mM Tris, 50 mM EDTA, pH 7.4.

[0965] The resulting washed inclusion bodies are solubilized with 1.5 M guanidine hydrochloride (GuHCl) for 2-4 hours. After 7000×g centrifugation for 15 min., the pellet is discarded and the polypeptide containing supernatant is incubated at 4° C. overnight to allow further GuHCl extraction.

[0966] Following high speed centrifugation (30,000×g) to remove insoluble particles, the GuHCl solubilized protein is refolded by quickly mixing the GuHCl extract with 20 volumes of buffer containing 50 mM sodium, pH 4.5, 150 mM NaCl, 2 mM EDTA by vigorous stirring. The refolded diluted protein solution is kept at 4° C. without mixing for 12 hours prior to further purification steps.

[0967] To clarify the refolded polypeptide solution, a previously prepared tangential filtration unit equipped with 0.16 μm membrane filter with appropriate surface area (e.g., Filtron), equilibrated with 40 mM sodium acetate, pH 6.0 is employed. The filtered sample is loaded onto a cation exchange resin (e.g., Poros HS-50, Perseptive Biosystems). The column is washed with 40 mM sodium acetate, pH 6.0 and eluted with 250 mM, 500 mM, 1000 mM, and 1500 mM NaCl in the same buffer, in a stepwise manner. The absorbance at 280 nm of the effluent is continuously monitored. Fractions are collected and further analyzed by SDS-PAGE.

[0968] Fractions containing the polypeptide are then pooled and mixed with 4 volumes of water. The diluted sample is then loaded onto a previously prepared set of tandem columns of strong anion (Poros HQ-50, Perseptive Biosystems) and weak anion (Poros CM-20, Perseptive Biosystems) exchange resins. The columns are equilibrated with 40 mM sodium acetate, pH 6.0. Both columns are washed with 40 mM sodium acetate, pH 6.0, 200 mM NaCl. The CM-20 column is then eluted using a 10 column volume linear gradient ranging from 0.2 M NaCl, 50 mM sodium acetate, pH 6.0 to 1.0 M NaCl, 50 mM sodium acetate, pH 6.5. Fractions are collected under constant A₂₈₀ monitoring of the effluent. Fractions containing the polypeptide (determined, for instance, by 16% SDS-PAGE) are then pooled.

[0969] The resultant polypeptide should exhibit greater than 95% purity after the above refolding and purification steps. No major contaminant bands should be observed from Commassie blue stained 16% SDS-PAGE gel when 5 μg of purified protein is loaded. The purified protein can also be tested for endotoxin/LPS contamination, and typically the LPS content is less than 0.1 ng/ml according to LAL assays.

### Example 7

### Cloning and Expression of a Polypeptide in a Baculovirus Expression System

[0970] In this example, the plasmid shuttle vector pA2 is used to insert a polynucleotide into a baculovirus to express a polypeptide. This expression vector contains the strong polyhedrin promoter of the Autographa californica nuclear polyhedrosis virus (AcMNPV) followed by convenient restriction sites such as BamHI, Xba I and Asp718. The polyadenylation site of the simian virus 40 (“SV40”) is used for efficient polyadenylation. For easy selection of recombinant virus, the plasmid contains the beta-galactosidase gene from E. coli under control of a weak Drosophila promoter in the same orientation, followed by the polyadenylation signal of the polyhedrin gene. The inserted genes are flanked on both sides by viral sequences for cell-mediated homologous recombination with wild-type viral DNA to generate a viable virus that express the cloned polynucleotide.

[0971] Many other baculovirus vectors can be used in place of the vector above, such as pAc373, pVL941, and pAcIM1, as one skilled in the art would readily appreciate, as long as the construct provides appropriately located signals for transcription, translation, secretion and the like, including a signal peptide and an in-frame AUG as required. Such vectors are described, for instance, in Luckow et al., Virology 170:31-39 (1989).

[0972] Specifically, the cDNA sequence contained in the deposited clone, including the AUG initiation codon, is amplified using the PCR protocol described in Example 1. If a naturally occurring signal sequence is used to produce the polypeptide of the present invention, the pA2 vector does not need a second signal peptide.

[0973] Alternatively, the vector can be modified (pA2 GP) to include a baculovirus leader sequence, using the standard methods described in Summers et al., “A Manual of Methods for Baculovirus Vectors and Insect Cell Culture Procedures,” Texas Agricultural Experimental Station Bulletin No. 1555 (1987).

[0974] The amplified fragment is isolated from a 1% agarose gel using a commercially available kit (“Geneclean,” BIO 101 Inc., La Jolla, Calif.). The fragment then is digested with appropriate restriction enzymes and again purified on a 1% agarose gel.

[0975] The plasmid is digested with the corresponding restriction enzymes and optionally, can be dephosphorylated using calf intestinal phosphatase, using routine procedures known in the art. The DNA is then isolated from a 1% agarose gel using a commercially available kit (“Geneclean” BIO 101 Inc., La Jolla, Calif.).

[0976] The fragment and the dephosphorylated plasmid are ligated together with T4 DNA ligase. E. coli HB101 or other suitable E. coli hosts such as XL-1 Blue (Stratagene Cloning Systems, La Jolla, Calif.) cells are transformed with the ligation mixture and spread on culture plates. Bacteria containing the plasmid are identified by digesting DNA from individual colonies and analyzing the digestion product by gel electrophoresis. The sequence of the cloned fragment is confirmed by DNA sequencing.

[0977] Five μg of a plasmid containing the polynucleotide is co-transfected with 1.0 μg of a commercially available linearized baculovirus DNA (“BaculoGold™ baculovirus DNA”, Pharmingen, San Diego, Calif.), using the lipofection method described by Felgner et al., Proc. Natl. Acad. Sci. USA 84:7413-7417 (1987). One μg of BaculoGold™ virus DNA and 5 μg of the plasmid are mixed in a sterile well of a microtiter plate containing 50 μl of serum-free Grace's medium (Life Technologies Inc., Gaithersburg, Md.). Afterwards, 10 μl Lipofectin plus 90 μl Grace's medium are added, mixed and incubated for 15 minutes at room temperature. Then the transfection mixture is added drop-wise to Sf9 insect cells (ATCC CRL 1711) seeded in a 35 mm tissue culture plate with 1 ml Grace's medium without serum. The plate is then incubated for 5 hours at 27° C. The transfection solution is then removed from the plate and 1 ml of Grace's insect medium supplemented with 10% fetal calf serum is added. Cultivation is then continued at 27° C. for four days.

[0978] After four days the supernatant is collected and a plaque assay is performed, as described by Summers and Smith, supra. An agarose gel with “Blue Gal” (Life Technologies Inc., Gaithersburg) is used to allow easy identification and isolation of gal-expressing clones, which produce blue-stained plaques. (A detailed description of a “plaque assay” of this type can also be found in the user's guide for insect cell culture and baculovirology distributed by Life Technologies Inc., Gaithersburg, page 9-10.) After appropriate incubation, blue stained plaques are picked with the tip of a micropipettor (e.g., Eppendorf). The agar containing the recombinant viruses is then resuspended in a microcentrifuge tube containing 200 μl of Grace's medium and the suspension containing the recombinant baculovirus is used to infect Sf9 cells seeded in 35 mm dishes. Four days later the supernatants of these culture dishes are harvested and then they are stored at 4° C.

[0979] To verify the expression of the polypeptide, Sf9 cells are grown in Grace's medium supplemented with 10% heat-inactivated FBS. The cells are infected with the recombinant baculovirus containing the polynucleotide at a multiplicity of infection (“MOI”) of about 2. If radiolabeled proteins are desired, 6 hours later the medium is removed and is replaced with SF900 II medium minus methionine and cysteine (available from Life Technologies Inc., Rockville, Md.). After 42 hours, 5 μCi of ³⁵S-methionine and 5 1 μCi ³⁵S-cysteine (available from Amersham) are added. The cells are further incubated for 16 hours and then are harvested by centrifugation. The proteins in the supernatant as well as the intracellular proteins are analyzed by SDS-PAGE followed by autoradiography (if radiolabeled).

[0980] Microsequencing of the amino acid sequence of the amino terminus of purified protein may be used to determine the amino terminal sequence of the produced protein.

### Example 8

### Expression of a Polypeptide in Mammalian Cells

[0981] The polypeptide of the present invention can be expressed in a mammalian cell. A typical mammalian expression vector contains a promoter element, which mediates the initiation of transcription of mRNA, a protein coding sequence, and signals required for the termination of transcription and polyadenylation of the transcript. Additional elements include enhancers, Kozak sequences and intervening sequences flanked by donor and acceptor sites for RNA splicing. Highly efficient transcription is achieved with the early and late promoters from SV40, the long terminal repeats (LTRs) from Retroviruses, e.g., RSV, HTLVI, HIVI and the early promoter of the cytomegalovirus (CMV). However, cellular elements can also be used (e.g., the human actin promoter).

[0982] Suitable expression vectors for use in practicing the present invention include, for example, vectors such as pSVL and pMSG (Pharmacia, Uppsala, Sweden), pRSVcat (ATCC 37152), pSV2dhfr (ATCC 37146), pBC12MI (ATCC 67109), pCMVSport 2.0, and pCMVSport 3.0. Mammalian host cells that could be used include, human Hela, 293, H9 and Jurkat cells, mouse NIH3T3 and C127 cells, Cos 1, Cos 7 and CV1, quail QC1-3 cells, mouse L cells and Chinese hamster ovary (CHO) cells.

[0983] Alternatively, the polypeptide can be expressed in stable cell lines containing the polynucleotide integrated into a chromosome. The co-transfection with a selectable marker such as DHFR, gpt, neomycin, or hygromycin allows the identification and isolation of the transfected cells.

[0984] The transfected gene can also be amplified to express large amounts of the encoded protein. The DHFR (dihydrofolate reductase) marker is useful in developing cell lines that carry several hundred or even several thousand copies of the gene of interest. (See, e.g., Alt, F. W., et al., J. Biol. Chem. 253:1357-1370 (1978); Hamlin, J. L. and Ma, C., Biochem. et Biophys. Acta, 1097:107-143 (1990); Page, M. J. and Sydenham, M. A., Biotechnology 9:64-68 (1991).) Another useful selection marker is the enzyme glutamine synthase (GS) (Murphy et al., Biochem J. 227:277-279 (1991); Bebbington et al., Bio/Technology 10:169-175 (1992). Using these markers, the mammalian cells are grown in selective medium and the cells with the highest resistance are selected. These cell lines contain the amplified gene(s) integrated into a chromosome. Chinese hamster ovary (CHO) and NSO cells are often used for the production of proteins.

[0985] Derivatives of the plasmid pSV2-dhfr (ATCC Accession No. 37146), the expression vectors pC4 (ATCC Accession No. 209646) and pC6 (ATCC Accession No.209647) contain the strong promoter (LTR) of the Rous Sarcoma Virus (Cullen et al., Molecular and Cellular Biology, 438-447 (March, 1985)) plus a fragment of the CMV-enhancer (Boshart et al., Cell 41:521-530 (1985).) Multiple cloning sites, e.g., with the restriction enzyme cleavage sites BamHI, XbaI and Asp718, facilitate the cloning of the gene of interest. The vectors also contain the 3′ intron, the polyadenylation and termination signal of the rat preproinsulin gene, and the mouse DHFR gene under control of the SV40 early promoter.

[0986] Specifically, the plasmid pC6, for example, is digested with appropriate restriction enzymes and then dephosphorylated using calf intestinal phosphates by procedures known in the art. The vector is then isolated from a 1% agarose gel.

[0987] A polynucleotide of the present invention is amplified according to the protocol outlined in Example 1. If a naturally occurring signal sequence is used to produce the polypeptide of the present invention, the vector does not need a second signal peptide. Alternatively, if a naturally occurring signal sequence is not used, the vector can be modified to include a heterologous signal sequence. (See, e.g., International Publication No. WO 96/34891.)

[0988] The amplified fragment is isolated from a 1% agarose gel using a commercially available kit (“Geneclean,” BIO 101 Inc., La Jolla, Calif.). The fragment then is digested with appropriate restriction enzymes and again purified on a 1% agarose gel.

[0989] The amplified fragment is then digested with the same restriction enzyme and purified on a 1% agarose gel. The isolated fragment and the dephosphorylated vector are then ligated with T4 DNA ligase. E. coli HB 101 or XL-1 Blue cells are then transformed and bacteria are identified that contain the fragment inserted into plasmid pC6 using, for instance, restriction enzyme analysis.

[0990] Chinese hamster ovary cells lacking an active DHFR gene is used for transfection. Five 1μg of the expression plasmid pC6 or pC4 is cotransfected with 0.5 μg of the plasmid pSVneo using lipofectin (Felgner et al., supra). The plasmid pSV2-neo contains a dominant selectable marker, the neo gene from Tn5 encoding an enzyme that confers resistance to a group of antibiotics including G418. The cells are seeded in alpha minus MEM supplemented with 1 mg/ml G418. After 2 days, the cells are trypsinized and seeded in hybridoma cloning plates (Greiner, Germany) in alpha minus MEM supplemented with 10, 25, or 50 ng/ml of methotrexate plus 1 mg/ml G418. After about 10-14 days single clones are trypsinized and then seeded in 6-well petri dishes or 10 ml flasks using different concentrations of methotrexate (50 nM, 100 nM, 200 nM, 400 nM, 800 nM). Clones growing at the highest concentrations of methotrexate are then transferred to new 6-well plates containing even higher concentrations of methotrexate (1 μM, 2 μM, 5 μM, 10 mM, 20 mM). The same procedure is repeated until clones are obtained which grow at a concentration of 100-200 μM. Expression of the desired gene product is analyzed, for instance, by SDS-PAGE and Western blot or by reversed phase HPLC analysis.

### Example 9

### Protein Fusions

[0991] The polypeptides of the present invention are preferably fused to other proteins. These fusion proteins can be used for a variety of applications. For example, fusion of the present polypeptides to His-tag, HA-tag, protein A, IgG domains, and maltose binding protein facilitates purification. (See Example 5; see also EP A 394,827; Traunecker, et al., Nature 331:84-86 (1988).) Similarly, fusion to IgG-1, IgG-3, and albumin increases the halflife time in vivo. Nuclear localization signals fused to the polypeptides of the present invention can target the protein to a specific subcellular localization, while covalent heterodimer or homodimers can increase or decrease the activity of a fusion protein. Fusion proteins can also create chimeric molecules having more than one function. Finally, fusion proteins can increase solubility and/or stability of the fused protein compared to the non-fused protein. All of the types of fusion proteins described above can be made by modifying the following protocol, which outlines the fusion of a polypeptide to an IgG molecule, or the protocol described in Example 5.

[0992] Briefly, the human Fc portion of the IgG molecule can be PCR amplified, using primers that span the 5′ and 3′ ends of the sequence described below. These primers also should have convenient restriction enzyme sites that will facilitate cloning into an expression vector, preferably a mammalian expression vector.

[0993] For example, if pC4 (ATCC Accession No. 209646) is used, the human Fc portion can be ligated into the BamHI cloning site. Note that the 3′ BamHI site should be destroyed. Next, the vector containing the human Fc portion is re-restricted with BamHI, linearizing the vector, and a polynucleotide of the present invention, isolated by the PCR protocol described in Example 1, is ligated into this BamHI site. Note that the polynucleotide is cloned without a stop codon, otherwise a fusion protein will not be produced.

[0994] If the naturally occurring signal sequence is used to produce the polypeptide of the present invention, pC4 does not need a second signal peptide. Alternatively, if the naturally occurring signal sequence is not used, the vector can be modified to include a heterologous signal sequence. (See, e.g., International Publication No. WO 96/34891.)

[0995] Human IgG Fc Region

| | |
|---|---|
| GGGATCCGGAGCCCAAATCTTCTGACAAAACTCACACATGCCCACCGTGCCCA | (SEQ ID NO: 1) |
| GCACCTGAATTCGAGGGTGCACCGTCAGTCTTCCTCTTCCCCCCAAAACCCAAG | |
| GACACCCTCATGATCTCCCGGACTCCTGAGGTCACATGCGTGGTGGTGGACGTA | |
| AGCCACGAAGACCCTGAGGTCAAGTTCAACTGGTACGTGGACGGCGTGGAGGT | |
| GCATAATGCCAAGACAAAGCCGCGGGAGGAGCAGTACAACAGCACGTACCGTG | |
| TGGTCAGCGTCCTCACCGTCCTGCACCAGGACTGGCTGAATGGCAAGGAGTAC | |
| AAGTGCAAGGTCTCCAACAAAGCCCTCCCAACCCCCATCGAGAAAACCATCTC | |
| CAAAGCCAAAGGGCAGCCCCGAGAACCACAGGTGTACACCCTGCCCCCATCCC | |
| GGGATGAGCTGACCAAGAACCAGGTCAGCCTGACCTGCCTGGTCAAAGGCTTC | |
| TATCCAAGCGACATCGCCGTGGAGTGGGAGAGCAATGGGCAGCCGGAGAACAA | |
| CTACAAGACCACGCCTCCCGTGCTGGACTCCGACGGCTCCTTCTTCCTCTACAG | |
| CAAGCTCACCGTGGACAAGAGCAGGTGGCAGCAGGGGAACGTCTTCTCATGCT | |
| CCGTGATGCATGAGGCTCTGCACAACCACTACACGCAGAAGAGCCTCTCCCTGT | |
| CTCCGGGTAAATGAGTGCGACGGCCGCGACTCTAGAGGAT | |

### Example 10

### Production of an Antibody from a Polypeptide

[0996] Hybridoma Technology

[0997] The antibodies of the present invention can be prepared by a variety of methods. (See, Current Protocols, Chapter 2.) As one example of such methods, cells expressing polypeptide of the present invention are administered to an animal to induce the production of sera containing polyclonal antibodies. In a preferred method, a preparation of polypeptide of the present invention is prepared and purified to render it substantially free of natural contaminants. Such a preparation is then introduced into an animal in order to produce polyclonal antisera of greater specific activity.

[0998] Monoclonal antibodies specific for polypeptide of the present invention are prepared using hybridoma technology (Kohler et al., Nature 256:495 (1975); Kohler et al., Eur. J. Immunol. 6:511 (1976); Kohler et al., Eur. J. Immunol. 6:292 (1976);

[0999] Hammerling et al., in: Monoclonal Antibodies and T-Cell Hybridomas, Elsevier, N.Y., pp. 563-681 (1981)). In general, an animal (preferably a mouse) is immunized with polypeptide of the present invention or, more preferably, with a secreted polypeptide of the present invention-expressing cell. Such polypeptide-expressing cells are cultured in any suitable tissue culture medium, preferably in Earle's modified Eagle's medium supplemented with 10% fetal bovine serum (inactivated at about 56° C.), and supplemented with about 10 g/l of nonessential amino acids, about 1,000 U/ml of penicillin, and about 100 μg/ml of streptomycin.

[1000] The splenocytes of such mice are extracted and fused with a suitable myeloma cell line. Any suitable myeloma cell line may be employed in accordance with the present invention; however, it is preferable to employ the parent myeloma cell line (SP20), available from the ATCC. After fusion, the resulting hybridoma cells are selectively maintained in HAT medium, and then cloned by limiting dilution as described by Wands et al. (Gastroenterology 80:225-232 (1981)). The hybridoma cells obtained through such a selection are then assayed to identify clones, which secrete antibodies capable of binding the polypeptide of the present invention.

[1001] Alternatively, additional antibodies capable of binding to polypeptide of the present invention can be produced in a two-step procedure using anti-idiotypic antibodies. Such a method makes use of the fact that antibodies are themselves antigens, and therefore, it is possible to obtain an antibody, which binds to a second antibody. In accordance with this method, protein specific antibodies are used to immunize an animal, preferably a mouse. The splenocytes of such an animal are then used to produce hybridoma cells, and the hybridoma cells are screened to identify clones which produce an antibody whose ability to bind to the polypeptide of the present invention-specific antibody can be blocked by polypeptide of the present invention. Such antibodies comprise anti-idiotypic antibodies to the polypeptide of the present invention-specific antibody and are used to immunize an animal to induce formation of further polypeptide of the present invention-specific antibodies.

[1002] For in vivo use of antibodies in humans, an antibody is “humanized”. Such antibodies can be produced using genetic constructs derived from hybridoma cells producing the monoclonal antibodies described above. Methods for producing chimeric and humanized antibodies are known in the art and are discussed herein. (See, for review, Morrison, Science 229:1202 (1985); Oi et al. BioTechniques 4:214 (1986); Cabilly et al., U.S. Pat. No. 4,816,567; Taniguchi et al., EP 171496; Morrison et al., EP 173494; Neuberger et al., WO 8601533; Robinson et al., International Publication No. WO 8702671; Boulianne et al., Nature 312:643 (1984); Neuberger et al., Nature 314:268 (1985).)

[1003] Isolation Of Antibody Fragments Directed Against Polypeptide of the Present Invention From A Library Of scFvs

[1004] Naturally occurring V-genes isolated from human PBLs are constructed into a library of antibody fragments which contain reactivities against polypeptide of the present invention to which the donor may or may not have been exposed (see e.g., U.S. Pat. No. 5,885,793 incorporated herein by reference in its entirety).

[1005] Rescue of the Library. A library of scFvs is constructed from the RNA of human PBLs as described in International Publication No. WO 92/01047. To rescue phage displaying antibody fragments, approximately 10⁹ E. coli harboring the phagemid are used to inoculate 50 ml of 2×TY containing 1% glucose and 100 μLg/ml of ampicillin (2×TY-AMP-GLU) and grown to an O.D. of 0.8 with shaking. Five ml of this culture is used to inoculate 50 ml of 2×TY-AMP-GLU, 2×108 TU of delta gene 3 helper (M13 delta gene III, see International Publication No. WO 92/01047) are added and the culture incubated at 37° C. for 45 minutes without shaking and then at 37° C. for 45 minutes with shaking. The culture is centrifuged at 4000 r.p.m. for 10 min. and the pellet resuspended in 2 liters of 2×TY containing 100 μg/ml ampicillin and 50 ug/ml kanamycin and grown overnight. Phage are prepared as described in International Application No. WO 92/01047.

[1006] M13 delta gene III is prepared as follows: M13 delta gene III helper phage does not encode gene III protein, hence the phage(mid) displaying antibody fragments have a greater avidity of binding to antigen. Infectious M13 delta gene III particles are made by growing the helper phage in cells harboring a pUC19 derivative supplying the wild type gene III protein during phage morphogenesis. The culture is incubated for 1 hour at 37° C. without shaking and then for a further hour at 37° C. with shaking. Cells are spun down (IEC-Centra 8,400 r.p.m. for 10 min), resuspended in 300 ml 2×TY broth containing 100 μg ampicillin/ml and 25 μg kanamycin/ml (2×TY-AMP-KAN) and grown overnight, shaking at 37° C. Phage particles are purified and concentrated from the culture medium by two PEG-precipitations (Sambrook et al., 1990), resuspended in 2 ml PBS and passed through a 0.45 μm filter (Minisart NML; Sartorius) to give a final concentration of approximately 10¹³ transducing units/ml (ampicillin-resistant clones).

[1007] Panning of the Library. Immunotubes (Nunc) are coated overnight in PBS with 4 ml of either 100 μg/ml or 10 μg/ml of a polypeptide of the present invention. Tubes are blocked with 2% Marvel-PBS for 2 hours at 37° C. and then washed 3 times in PBS. Approximately 10¹³ TU of phage is applied to the tube and incubated for 30 minutes at room temperature tumbling on an over and under turntable and then left to stand for another 1.5 hours. Tubes are washed 10 times with PBS 0.1% Tween-20 and 10 times with PBS. Phage are eluted by adding 1 ml of 100 mM triethylamine and rotating 15 minutes on an under and over turntable after which the solution is immediately neutralized with 0.5 ml of 1.0M Tris-HCl, pH 7.4. Phage are then used to infect 10 ml of mid-log E. coli TG 1 by incubating eluted phage with bacteria for 30 minutes at 37° C. The E. coli are then plated on TYE plates containing 1% glucose and 100 μg/ml ampicillin. The resulting bacterial library is then rescued with delta gene 3 helper phage as described above to prepare phage for a subsequent round of selection. This process is then repeated for a total of 4 rounds of affinity purification with tube-washing increased to 20 times with PBS, 0.1% Tween-20 and 20 times with PBS for rounds 3 and 4.

[1008] Characterization of Binders. Eluted phage from the 3rd and 4th rounds of selection are used to infect E. coli HB 2151 and soluble scFv is produced (Marks, et al., 1991) from single colonies for assay. ELISAs are performed with microtitre plates coated with 10 pg/ml of the polypeptide of the present invention in 50 mM bicarbonate pH 9.6. Clones positive in ELISA are further characterized by PCR fingerprinting (see, e.g., International Application No. WO 92/01047) and then by sequencing. These ELISA positive clones may also be further characterized by techniques known in the art, such as, for example, epitope mapping, binding affinity, receptor signal transduction, ability to block or competitively inhibit antibody/antigen binding, and competitive agonistic or antagonistic activity.

### Example 11

### Method of Determining Alterations in a Gene Corresponding to a Polynucleotide

[1009] RNA isolated from entire families or individual patients presenting with a phenotype of interest (such as a disease) is isolated. cDNA is then generated from these RNA samples using protocols known in the art. (See, Sambrook.) The cDNA is then used as a template for PCR, employing primers surrounding regions of interest in SEQ ID NO:X; and/or the nucleotide sequence of the cDNA contained in Clone ID NO:Z. Suggested PCR conditions consist of 35 cycles at 95 degrees C. for 30 seconds; 60-120 seconds at 52-58 degrees C.; and 60-120 seconds at 70 degrees C., using buffer solutions described in Sidransky et al., Science 252:706 (1991).

[1010] PCR products are then sequenced using primers labeled at their 5′ end with T4 polynucleotide kinase, employing SequiTherm Polymerase (Epicentre Technologies). The intron-exon boundaries of selected exons is also determined and genomic PCR products analyzed to confirm the results. PCR products harboring suspected mutations are then cloned and sequenced to validate the results of the direct sequencing.

[1011] PCR products are cloned into T-tailed vectors as described in Holton et al., Nucleic Acids Research, 19:1156 (1991) and sequenced with T7 polymerase (United States Biochemical). Affected individuals are identified by mutations not present in unaffected individuals.

[1012] Genomic rearrangements are also observed as a method of determining alterations in a gene corresponding to a polynucleotide. Genomic clones isolated according to Example 2 are nick-translated with digoxigenindeoxy-uridine 5′-triphosphate (Boehringer Manheim), and FISH performed as described in Johnson et al., Methods Cell Biol. 35:73-99 (1991). Hybridization with the labeled probe is carried out using a vast excess of human cot-1 DNA for specific hybridization to the corresponding genomic locus.

[1013] Chromosomes are counterstained with 4,6-diamino-2-phenylidole and propidium iodide, producing a combination of C- and R-bands. Aligned images for precise mapping are obtained using a triple-band filter set (Chroma Technology, Brattleboro, VT.) in combination with a cooled charge-coupled device camera (Photometrics, Tucson, Ariz.) and variable excitation wavelength filters. (Johnson et al., Genet. Anal. Tech. Appl., 8:75 (1991).) Image collection, analysis and chromosomal fractional length measurements are performed using the ISee Graphical Program System. (Inovision Corporation, Durham, N.C.) Chromosome alterations of the genomic region hybridized by the probe are identified as insertions, deletions, and translocations. These alterations are used as a diagnostic marker for an associated disease.

### Example 12

### Method of Detecting Abnormal Levels of a Polypeptide in a Biological Sample

[1014] A polypeptide of the present invention can be detected in a biological sample, and if an increased or decreased level of the polypeptide is detected, this polypeptide is a marker for a particular phenotype. Methods of detection are numerous, and thus, it is understood that one skilled in the art can modify the following assay to fit their particular needs.

[1015] For example, antibody-sandwich ELISAs are used to detect polypeptides in a sample, preferably a biological sample. Wells of a microtiter plate are coated with specific antibodies, at a final concentration of 0.2 to 10 ug/ml. The antibodies are either monoclonal or polyclonal and are produced by the method described in Example 10. The wells are blocked so that non-specific binding of the polypeptide to the well is reduced.

[1016] The coated wells are then incubated for >2 hours at RT with a sample containing the polypeptide. Preferably, serial dilutions of the sample should be used to validate results. The plates are then washed three times with deionized or distilled water to remove unbound polypeptide.

[1017] Next, 50 ul of specific antibody-alkaline phosphatase conjugate, at a concentration of 25-400 ng, is added and incubated for 2 hours at room temperature. The plates are again washed three times with deionized or distilled water to remove unbound conjugate.

[1018] Add 75 ul of 4-methylumbelliferyl phosphate (MUP) or p-nitrophenyl phosphate (NPP) substrate solution to each well and incubate 1 hour at room temperature. Measure the reaction by a microtiter plate reader. Prepare a standard curve, using serial dilutions of a control sample, and plot polypeptide concentration on the X-axis (log scale) and fluorescence or absorbance of the Y-axis (linear scale). Interpolate the concentration of the polypeptide in the sample using the standard curve.

### Example 13

### Formulation

[1019] The invention also provides methods of treatment and/or prevention of diseases or disorders (such as, for example, any one or more of the diseases or disorders disclosed herein) by administration to a subject of an effective amount of a Therapeutic. By therapeutic is meant polynucleotides or polypeptides of the invention (including fragments and variants), agonists or antagonists thereof, and/or antibodies thereto, in combination with a pharmaceutically acceptable carrier type (e.g., a sterile carrier).

[1020] The Therapeutic will be formulated and dosed in a fashion consistent with good medical practice, taking into account the clinical condition of the individual patient (especially the side effects of treatment with the Therapeutic alone), the site of delivery, the method of administration, the scheduling of administration, and other factors known to practitioners. The “effective amount” for purposes herein is thus determined by such considerations.

[1021] As a general proposition, the total pharmaceutically effective amount of the Therapeutic administered parenterally per dose will be in the range of about 1 ug/kg/day to 10 mg/kg/day of patient body weight, although, as noted above, this will be subject to therapeutic discretion. More preferably, this dose is at least 0.01 mg/kg/day, and most preferably for humans between about 0.01 and 1 mg/kg/day for the hormone. If given continuously, the Therapeutic is typically administered at a dose rate of about 1 ug/kg/hour to about 50 ug/kg/hour, either by 1-4 injections per day or by continuous subcutaneous infusions, for example, using a mini-pump. An intravenous bag solution may also be employed. The length of treatment needed to observe changes and the interval following treatment for responses to occur appears to vary depending on the desired effect.

[1022] Therapeutics can be are administered orally, rectally, parenterally, intracistemally, intravaginally, intraperitoneally, topically (as by powders, ointments, gels, drops or transdermal patch), bucally, or as an oral or nasal spray. “Pharmaceutically acceptable carrier” refers to a non-toxic solid, semisolid or liquid filler, diluent, encapsulating material or formulation auxiliary of any. The term “parenteral” as used herein refers to modes of administration which include intravenous, intramuscular, intraperitoneal, intrasternal, subcutaneous and intraarticular injection and infusion.

[1023] Therapeutics of the invention are also suitably administered by sustained-release systems. Suitable examples of sustained-release Therapeutics are administered orally, rectally, parenterally, intracistemally, intravaginally, intraperitoneally, topically (as by powders, ointments, gels, drops or transdermal patch), bucally, or as an oral or nasal spray. “Pharmaceutically acceptable carrier” refers to a non-toxic solid, semisolid or liquid filler, diluent, encapsulating material or formulation auxiliary of any type. The term “parenteral” as used herein refers to modes of administration which include intravenous, intramuscular, intraperitoneal, intrasternal, subcutaneous and intraarticular injection and infusion.

[1024] Therapeutics of the invention are also suitably administered by sustained-release systems. Suitable examples of sustained-release Therapeutics include suitable polymeric materials (such as, for example, semi-permeable polymer matrices in the form of shaped articles, e.g., films, or mirocapsules), suitable hydrophobic materials (for example as an emulsion in an acceptable oil) or ion exchange resins, and sparingly soluble-derivatives (such as, for example, a sparingly soluble salt).

[1025] Sustained-release matrices include polylactides (U.S. Pat. No. 3,773,919, EP 58,481), copolymers of L-glutamic acid and gamma-ethyl-L-glutamate (Sidman et al., Biopolymers 22:547-556 (1983)), poly (2-hydroxyethyl methacrylate) (Langer et al., J. Biomed. Mater. Res. 15:167-277 (1981), and Langer, Chem. Tech. 12:98-105 (1982)), ethylene vinyl acetate (Langer et al., Id.) or poly-D-(-)-3-hydroxybutyric acid (EP 133,988).

[1026] Sustained-release Therapeutics also include liposomally entrapped Therapeutics of the invention (see generally, Langer, Science 249:1527-1533 (1990); Treat et al., in Liposomes in the Therapy of Infections Disease and Cancer, Lopez-Berestein and Fidler (eds.), Liss, New York, pp. 3171-327 and 353-365 (1989)). Liposomes containing the Therapeutic are prepared by methods known per se: DE 3,218,121; Epstein et al., Proc. Natl. Acad. Sci. (USA) 82:3688-3692 (1985); Hwang et al., Proc. Natl. Acad. Sci.(USA) 77:4030-4034 (1980); EP 52,322; EP 36,676; EP 88,046; EP 143,949; EP 142,641; Japanese Pat. Appl. 83-118008; U.S. Pat. Nos. 4,485,045 and 4,544,545; and EP 102,324. Ordinarily, the liposomes are of the small (about 200-800 Angstroms) unilamellar type in which the lipid content is greater than about 30 mol. percent cholesterol, the selected proportion being adjusted for the optimal Therapeutic.

[1027] In yet an additional embodiment, the Therapeutics of the invention are delivered by way of a pump (see Langer, supra; Sefton, CRC Crit. Ref. Biomed. Eng. 14:201 (1987); Buchwald et al., Surgery 88:507 (1980); Saudek et al., N. Engl. J. Med. 321:574 (1989)).

[1028] Other controlled release systems are discussed in the review by Langer (Science 249:1527-1533 (1990)).

[1029] For parenteral administration, in one embodiment, the Therapeutic is formulated generally by mixing it at the desired degree of purity, in a unit dosage injectable form (solution, suspension, or emulsion), with a pharmaceutically acceptable carrier, i.e., one that is non-toxic to recipients at the dosages and concentrations employed and is compatible with other ingredients of the formulation. For example, the formulation preferably does not include oxidizing agents and other compounds that are known to be deleterious to the Therapeutic.

[1030] Generally, the formulations are prepared by contacting the Therapeutic uniformly and intimately with liquid carriers or finely divided solid carriers or both. Then, if necessary, the product is shaped into the desired formulation. Preferably the carrier is a parenteral carrier, more preferably a solution that is isotonic with the blood of the recipient. Examples of such carrier vehicles include water, saline, Ringer's solution, and dextrose solution. Non-aqueous vehicles such as fixed oils and ethyl oleate are also useful herein, as well as liposomes.

[1031] The carrier suitably contains minor amounts of additives such as substances that enhance isotonicity and chemical stability. Such materials are non-toxic to recipients at the dosages and concentrations employed, and include buffers such as phosphate, citrate, succinate, acetic acid, and other organic acids or their salts; antioxidants such as ascorbic acid; low molecular weight (less than about ten residues) polypeptides, e.g., polyarginine or tripeptides; proteins, such as serum albumin, gelatin, or immunoglobulins; hydrophilic polymers such as polyvinylpyrrolidone; amino acids, such as glycine, glutamic acid, aspartic acid, or arginine; monosaccharides, disaccharides, and other carbohydrates including cellulose or its derivatives, glucose, manose, or dextrins; chelating agents such as EDTA; sugar alcohols such as mannitol or sorbitol; counterions such as sodium; and/or nonionic surfactants such as polysorbates, poloxamers, or PEG.

[1032] The Therapeutic is typically formulated in such vehicles at a concentration of about 0. 1 mg/ml to 100 mg/ml, preferably 1-10 mg/ml, at a pH of about 3 to 8. It will be understood that the use of certain of the foregoing excipients, carriers, or stabilizers will result in the formation of polypeptide salts.

[1033] Any pharmaceutical used for therapeutic administration can be sterile. Sterility is readily accomplished by filtration through sterile filtration membranes (e.g., 0.2 micron membranes). Therapeutics generally are placed into a container having a sterile access port, for example, an intravenous solution bag or vial having a stopper pierceable by a hypodermic injection needle.

[1034] Therapeutics ordinarily will be stored in unit or multi-dose containers, for example, sealed ampoules or vials, as an aqueous solution or as a lyophilized formulation for reconstitution. As an example of a lyophilized formulation, 10-ml vials are filled with 5 ml of sterile-filtered 1% (w/v) aqueous Therapeutic solution, and the resulting mixture is lyophilized. The infusion solution is prepared by reconstituting the lyophilized Therapeutic using bacteriostatic Water-for-Injection.

[1035] The invention also provides a pharmaceutical pack or kit comprising one or more containers filled with one or more of the ingredients of the Therapeutics of the invention. Associated with such container(s) can be a notice in the form prescribed by a governmental agency regulating the manufacture, use or sale of pharmaceuticals or biological products, which notice reflects approval by the agency of manufacture, use or sale for human administration. In addition, the Therapeutics may be employed in conjunction with other therapeutic compounds.

[1036] The Therapeutics of the invention may be administered alone or in combination with adjuvants. Adjuvants that may be administered with the Therapeutics of the invention include, but are not limited to, alum, alum plus deoxycholate (ImmunoAg), MTP-PE (Biocine Corp.), QS21. (Genentech, Inc.), BCG (e.g., THERACYS®, MPL and nonviable prepartions of Corynebacterium parvum. In a specific embodiment, Therapeutics of the invention are administered in combination with alum. In another specific embodiment, Therapeutics of the invention are administered in combination with QS-21. Further adjuvants that may be administered with the Therapeutics of the invention include, but are not limited to, Monophosphoryl lipid immunomodulator, AdjuVax 100a, QS-21, QS-18, CRL1005, Aluminum salts, MF-59, and Virosomal adjuvant technology. Vaccines that may be administered with the Therapeutics of the invention include, but are not limited to, vaccines directed toward protection against MMR (measles, mumps, rubella), polio, varicella, tetanus/diptheria, hepatitis A, hepatitis B, haemophilus influenzae B, whooping cough, pneumonia, influenza, Lyme's Disease, rotavirus, cholera, yellow fever, Japanese encephalitis, poliomyelitis, rabies, typhoid fever, and pertussis. Combinations may be administered either concomitantly, e.g., as an admixture, separately but simultaneously or concurrently; or sequentially. This includes presentations in which the combined agents are administered together as a therapeutic mixture, and also procedures in which the combined agents are administered separately but simultaneously, e.g., as through separate intravenous lines into the same individual. Administration “in combination” further includes the separate administration of one of the compounds or agents given first, followed by the second.

[1037] The Therapeutics of the invention may be administered alone or in combination with other therapeutic agents. Therapeutic agents that may be administered in combination with the Therapeutics of the invention, include but not limited to, chemotherapeutic agents, antibiotics, steroidal and non-steroidal anti-inflammatories, conventional immunotherapeutic agents, and/or therapeutic treatments described below. Combinations may be administered either concomitantly, e.g., as an admixture, separately but simultaneously or concurrently; or sequentially. This includes presentations in which the combined agents are administered together as a therapeutic mixture, and also procedures in which the combined agents are administered separately but simultaneously, e.g., as through separate intravenous lines into the same individual. Administration “in combination” further includes the separate administration of one of the compounds or agents given first, followed by the second.

[1038] In certain embodiments, Therapeutics of the invention are administered in combination with antiretroviral agents, nucleoside/nucleotide reverse transcriptase inhibitors (NRTIs), non-nucleoside reverse transcriptase inhibitors (NNRTIs), and/or protease inhibitors (PIs). NRTIs that may be administered in combination with the Therapeutics of the invention, include, but are not limited to, RETROVIR™ (zidovudine/AZT), VIDEX™ (didanosine/ddI), HIVID™ (zalcitabine/ddC), ZERIT™ (stavudine/d4T), EPIVIR™ (lamivudine/3TC), and COMBIVIR™ (zidovudine/lamivudine). NNRTIs that may be administered in combination with the Therapeutics of the invention, include, but are not limited to, VIRAMUNE™ (nevirapine), RESCRIPTOR™ (delavirdine), and SUSTIVA™ (efavirenz). Protease inhibitors that may be administered in combination with the Therapeutics of the invention, include, but are not limited to, CRIXIVAN™ (indinavir), NORVIR™ (ritonavir), INVIRASE™ (saquinavir), and VIRACEPT™ (nelfinavir). In a specific embodiment, antiretroviral agents, nucleoside reverse transcriptase inhibitors, non-nucleoside reverse transcriptase inhibitors, and/or protease inhibitors may be used in any combination with Therapeutics of the invention to treat AIDS and/or to prevent or treat HIV infection.

[1039] Additional NRTIs include LODENOSINE™ (F-ddA; an acid-stable adenosine NRTI; Triangle/Abbott; COVIRACIL™ (emtricitabine/FTC; structurally related to lamivudine (3TC) but with 3- to 10-fold greater activity in vitro; Triangle/Abbott); dOTC (BCH-10652, also structurally related to lamivudine but retains activity against a substantial proportion of lamivudine-resistant isolates; Biochem Pharma); Adefovir (refused approval for anti-HIV therapy by FDA; Gilead Sciences); PREVEON® (Adefovir Dipivoxil, the active prodrug of adefovir; its active form is PMEA-pp); TENOFOVIR™ (bis-POC PMPA, a PMPA prodrug; Gilead); DAPD/DXG (active metabolite of DAPD; Triangle/Abbott); D-D4FC (related to 3TC, with activity against AZT/3TC-resistant virus); GW420867X (Glaxo Wellcome); ZIAGEN™ (abacavir/159U89; Glaxo Wellcome Inc.); CS-87 (3′azido-2′,3′-dideoxyuridine; WO 99/66936); and S-acyl-2-thioethyl (SATE)-bearing prodrug forms of β-L-FD4C and β-L-FddC (WO 98/17281).

[1040] Additional NNRTIs include COACTINON™ (Emivirine/MKC-442, potent NNRTI of the HEPT class; Triangle/Abbott); CAPRAVIRINE™ (AG-1549/S-1153, a next generation NNRTI with activity against viruses containing the K103N mutation; Agouron); PNU-142721 (has 20- to 50-fold greater activity than its predecessor delavirdine and is active against K103N mutants; Pharmacia & Upjohn); DPC-961 and DPC-963 (second-generation derivatives of efavirenz, designed to be active against viruses with the K103N mutation; DuPont); GW-420867X (has 25-fold greater activity than HBY097 and is active against K103N mutants; Glaxo Wellcome); CALANOLIDE A (naturally occurring agent from the latex tree; active against viruses containing either or both the Y181C and K103N mutations); and Propolis (WO 99/49830).

[1041] Additional protease inhibitors include LOPINAVIR™ (ABT378/r; Abbott Laboratories); BMS-232632 (an azapeptide; Bristol-Myres Squibb); TIPRANAVIR™ (PNU-140690, a non-peptic dihydropyrone; Pharmacia & Upjohn); PD-178390 (a nonpeptidic dihydropyrone; Parke-Davis); BMS 232632 (an azapeptide; Bristol-Myers Squibb); L-756,423 (an indinavir analog; Merck); DMP-450 (a cyclic urea compound; Avid & DuPont); AG-1776 (a peptidomimetic with in vitro activity against protease inhibitor-resistant viruses; Agouron); VX-175/GW-433908 (phosphate prodrug of amprenavir; Vertex & Glaxo Welcome); CGP61755 (Ciba); and AGENERASE™ (amprenavir; Glaxo Wellcome Inc.).

[1042] Additional antiretroviral agents include fusion inhibitors/gp41 binders. Fusion inhibitors/gp41 binders include T-20 (a peptide from residues 643-678 of the HIV gp41 transmembrane protein ectodomain which binds to gp41 in its resting state and prevents transformation to the fusogenic state; Trimeris) and T-1249 (a second-generation fusion inhibitor; Trimeris).

[1043] Additional antiretroviral agents include fusion inhibitors/chemokine receptor antagonists. Fusion inhibitors/chemokine receptor antagonists include CXCR4 antagonists such as AMD 3100 (a bicyclam), SDF-1 and its analogs, and ALX40-4C (a cationic peptide), T22 (an 18 amino acid peptide; Trimeris) and the T22 analogs T134 and T140; CCR5 antagonists such as RANTES (9-68), AOP-RANTES, NNY-RANTES, and TAK-779; and CCR5/CXCR4 antagonists such as NSC 651016 (a distamycin analog). Also included are CCR2B, CCR3, and CCR6 antagonists. Chemokine recpetor agonists such as RANTES, SDF-1, MIP-1α, MIP-1β, etc., may also inhibit fusion.

[1044] Additional antiretroviral agents include integrase inhibitors. Integrase inhibitors include dicaffeoylquinic (DFQA) acids; L-chicoric acid (a dicaffeoyltartaric (DCTA) acid); quinalizarin (QLC) and related anthraquinones; ZINTEVIR™ (AR 177, an oligonucleotide that probably acts at cell surface rather than being a true integrase inhibitor; Arondex); and naphthols such as those disclosed in WO 98/50347.

[1045] Additional antiretroviral agents include hydroxyurea-like compunds such as BCX-34 (a purine nucleoside phosphorylase inhibitor; Biocryst); ribonucleotide reductase inhibitors such as DIDOX™ (Molecules for Health); inosine monophosphate dehydrogenase (IMPDH) inhibitors sucha as VX-497 (Vertex); and myvopholic acids such as CellCept (mycophenolate mofetil; Roche).

[1046] Additional antiretroviral agents include inhibitors of viral integrase, inhibitors of viral genome nuclear translocation such as arylene bis(methylketone) compounds; inhibitors of HIV entry such as AOP-RANTES, NNY-RANTES, RANTES-IgG fusion protein, soluble complexes of RANTES and glycosaminoglycans (GAG), and AMD-3100; nucleocapsid zinc finger inhibitors such as dithiane compounds; targets of HIV Tat and Rev; and pharmacoenhancers such as ABT-378.

[1047] Other antiretroviral therapies and adjunct therapies include cytokines and lymphokines such as MIP-1α, MIP-1β, SDF-1α, IL-2, PROLEUKIN™ (aldesleukin/L2-7001; Chiron), IL-4, IL-10, IL-12, and IL-13; interferons such as IFN-α2a; antagonists of TNFs, NFκB, GM-CSF, M-CSF, and IL-10; agents that modulate immune activation such as cyclosporin and prednisone; vaccines such as Remune™ (HIV Immunogen), APL 400-003 (Apollon), recombinant gp120 and fragments, bivalent (B/E) recombinant envelope glycoprotein, rgp120CM235, MN rgp120, SF-2 rgp120, gp120/soluble CD4 complex, Delta JR-FL protein, branched synthetic peptide derived from discontinuous gp120 C3/C4 domain, fusion-competent immunogens, and Gag, Pol, Nef, and Tat vaccines; gene-based therapies such as genetic suppressor elements (GSEs; WO 98/54366), and intrakines (genetically modified CC chemokines targetted to the ER to block surface expression of newly synthesized CCR5 (Yang et al., PNAS 94:11567-72 (1997); Chen et al., Nat. Med. 3:1110-16 (1997)); antibodies such as the anti-CXCR4 antibody 12G5, the anti-CCR5 antibodies 2D7, 5C7, PA8, PA9, PA10, PA11, PA12, and PA14, the anti-CD4 antibodies Q4120 and RPA-T4, the anti-CCR3 antibody 7B11, the anti-gp120 antibodies 17b, 48d, 447-52D, 257-D, 268-D and 50.1, anti-Tat antibodies, anti-TNF-α antibodies, and monoclonal antibody 33A; aryl hydrocarbon (AH) receptor agonists and antagonists such as TCDD, 3,3′, 4,4′, 5-pentachlorobiphenyl, 3,3′, 4,4′-tetrachlorobiphenyl, and α-naphthoflavone (WO 98/30213); and antioxidants such as γ-L-glutamyl-L-cysteine ethyl ester (γ-GCE; WO 99/56764).

[1048] In a further embodiment, the Therapeutics of the invention are administered in combination with an antiviral agent. Antiviral agents that may be administered with the Therapeutics of the invention include, but are not limited to, acyclovir, ribavirin, amantadine, and remantidine.

[1049] In other embodiments, Therapeutics of the invention may be administered in combination with anti-opportunistic infection agents. Anti-opportunistic agents that may be administered in combination with the Therapeutics of the invention, include, but are not limited to, TRIMETHOPRIM-SULFAMETHOXAZOLE™, DAPSONE™, PENTAMIDINE™, ATOVAQUONE™, ISONIAZID™, RIFAMPIN™, PYRAZINAMIDE™, ETHAMBUTOL™, RIFABUTIN™, CLARITHROMYCIN™, AZITHROMYCIN™, GANCICLOVIR™, FOSCARNET™, CIDOFOVIR™, FLUCONAZOLE™, ITRACONAZOLE™, KETOCONAZOLE™, ACYCLOVIR™, FAMCICOLVIR™, PYRIMETHAMINE™, LEUCOVORIN™, NEUPOGEN™ (filgrastim/G-CSF), and LEUKINE™ (sargramostim/GM-CSF). In a specific embodiment, Therapeutics of the invention are used in any combination with TRIMETHOPRIM-SULFAMETHOXAZOLE™, DAPSONE™, PENTAMIDINE™, and/or ATOVAQUONE™ to prophylactically treat or prevent an opportunistic Pneumocystis carinii pneumonia infection. In another specific embodiment, Therapeutics of the invention are used in any combination with ISONIAZID™, RIFAMPIN™, PYRAZINAMIDE™, and/or ETHAMBUTOL™ to prophylactically treat or prevent an opportunistic Mycobacterium avium complex infection. In another specific embodiment, Therapeutics of the invention are used in any combination with RIFABUTIN™, CLARITHROMYCIN™, and/or AZITHROMYCIN™ to prophylactically treat or prevent an opportunistic Mycobacterium tuberculosis infection. In another specific embodiment, Therapeutics of the invention are used in any combination with GANCICLOVIR™, FOSCARNET™, and/or CIDOFOVIR™ to prophylactically treat or prevent an opportunistic cytomegalovirus infection. In another specific embodiment, Therapeutics of the invention are used in any combination with FLUCONAZOLE™, ITRACONAZOLE™, and/or KETOCONAZOLE™ to prophylactically treat or prevent an opportunistic fungal infection. In another specific embodiment, Therapeutics of the invention are used in any combination with ACYCLOVIR™ and/or FAMCICOLVIR™ to prophylactically treat or prevent an opportunistic herpes simplex virus type I and/or type II infection. In another specific embodiment, Therapeutics of the invention are used in any combination with PYRIMETHAMINE™ and/or LEUCOVORIN™ to prophylactically treat or prevent an opportunistic Toxoplasma gondii infection. In another specific embodiment, Therapeutics of the invention are used in any combination with LEUCOVORIN™ and/or NEUPOGEN™ to prophylactically treat or prevent an opportunistic bacterial infection.

[1050] In a further embodiment, the Therapeutics of the invention are administered in combination with an antibiotic agent. Antibiotic agents that may be administered with the Therapeutics of the invention include, but are not limited to, amoxicillin, beta-lactamases, aminoglycosides, beta-lactam (glycopeptide), beta-lactamases, Clindamycin, chloramphenicol, cephalosporins, ciprofloxacin, ciprofloxacin, erythromycin, fluoroquinolones, macrolides, metronidazole, penicillins, quinolones, rapamycin, rifampin, streptomycin, sulfonamide, tetracyclines, trimethoprim, trimethoprim-sulfamthoxazole, and vancomycin.

[1051] In other embodiments, Therapeutics of the invention are administered in combination with immunosuppressive agents. Immunosuppressive agents that may be administered in combination with the Therapeutics of the invention include, but are not limited to, steroids, cyclosporine, cyclosporine analogs, cyclophosphamide methylprednisone, prednisone, azathioprine, FK-506, 15-deoxyspergualin, and other immunosuppressive agents that act by suppressing the function of responding T cells. Other immunosuppressive agents that may be administered in combination with the Therapeutics of the invention include, but are not limited to, prednisolone, methotrexate, thalidomide, methoxsalen, rapamycin, leflunomide, mizoribine (BREDININ™), brequinar, deoxyspergualin, and azaspirane (SKF 105685), ORTHOCLONE OKT® 3 (muromonab-CD3), SANDIMMUNE™, NEORAL™, SANGDYA™ (cyclosporine), PROGRAF® (FK506, tacrolimus), CELLCEPT® (mycophenolate motefil, of which the active metabolite is mycophenolic acid), IMURAN™ (azathioprine), glucocorticosteroids, adrenocortical steroids such as DELTASONE™ (prednisone) and HYDELTRASOL™ (prednisolone), FOLEX™ and MEXATE™ (methotrxate), OXSORALEN-ULTRA™ (methoxsalen) and RAPAMUNE™ (sirolimus). In a specific embodiment, immunosuppressants may be used to prevent rejection of organ or bone marrow transplantation.

[1052] In an additional embodiment, Therapeutics of the invention are administered alone or in combination with one or more intravenous immune globulin preparations. Intravenous immune globulin preparations that may be administered with the Therapeutics of the invention include, but not limited to, GAMMAR™, IVEEGAM™, SANDOGLOBULIN™, GAMMAGARD S/D™, ATGAM™ (antithymocyte glubulin), and GAMIMUNE™. In a specific embodiment, Therapeutics of the invention are administered in combination with intravenous immune globulin preparations in transplantation therapy (e.g., bone marrow transplant).

[1053] In certain embodiments, the Therapeutics of the invention are administered alone or in combination with an anti-inflammatory agent. Anti-inflammatory agents that may be administered with the Therapeutics of the invention include, but are not limited to, corticosteroids (e.g. betamethasone, budesonide, cortisone, dexamethasone, hydrocortisone, methylprednisolone, prednisolone, prednisone, and triamcinolone), nonsteroidal anti-inflammatory drugs (e.g., diclofenac, diflunisal, etodolac, fenoprofen, floctafenine, flurbiprofen, ibuprofen, indomethacin, ketoprofen, meclofenamate, mefenamic acid, meloxicam, nabumetone, naproxen, oxaprozin, phenylbutazone, piroxicam, sulindac, tenoxicam, tiaprofenic acid, and tolmetin.), as well as antihistamines, aminoarylcarboxylic acid derivatives, arylacetic acid derivatives, arylbutyric acid derivatives, arylcarboxylic acids, arylpropionic acid derivatives, pyrazoles, pyrazolones, salicylic acid derivatives, thiazinecarboxamides, e-acetamidocaproic acid, S-adenosylmethionine, 3-amino-4-hydroxybutyric acid, amixetrine, bendazac, benzydarmine, bucolome, difenpiramide, ditazol, emorfazone, guaiazulene, nabumetone, nimesulide, orgotein, oxaceprol, paranyline, perisoxal, pifoxime, proquazone, proxazole, and tenidap.

[1054] In an additional embodiment, the compositions of the invention are administered alone or in combination with an anti-angiogenic agent. Anti-angiogenic agents that may be administered with the compositions of the invention include, but are not limited to, Angiostatin (Entremed, Rockville, Md.), Troponin-1 (Boston Life Sciences, Boston, Mass.), anti-Invasive Factor, retinoic acid and derivatives thereof, paclitaxel (Taxol), Suramin, Tissue Inhibitor of Metalloproteinase-1, Tissue Inhibitor of Metalloproteinase-2, VEGI, Plasminogen Activator Inhibitor-1, Plasminogen Activator Inhibitor-2, and various forms of the lighter “d group” transition metals.

[1055] Lighter “d group” transition metals include, for example, vanadium, molybdenum, tungsten, titanium, niobium, and tantalum species. Such transition metal species may form transition metal complexes. Suitable complexes of the above-mentioned transition metal species include oxo transition metal complexes.

[1056] Representative examples of vanadium complexes include oxo vanadium complexes such as vanadate and vanadyl complexes. Suitable vanadate complexes include metavanadate and orthovanadate complexes such as, for example, ammonium metavanadate, sodium metavanadate, and sodium orthovanadate. Suitable vanadyl complexes include, for example, vanadyl acetylacetonate and vanadyl sulfate including vanadyl sulfate hydrates such as vanadyl sulfate mono- and trihydrates.

[1057] Representative examples of tungsten and molybdenum complexes also include oxo complexes. Suitable oxo tungsten complexes include tungstate and tungsten oxide complexes. Suitable tungstate complexes include ammonium tungstate, calcium tungstate, sodium tungstate dihydrate, and tungstic acid. Suitable tungsten oxides include tungsten (IV) oxide and tungsten (VI) oxide. Suitable oxo molybdenum complexes include molybdate, molybdenum oxide, and molybdenyl complexes. Suitable molybdate complexes include ammonium molybdate and its hydrates, sodium molybdate and its hydrates, and potassium molybdate and its hydrates. Suitable molybdenum oxides include molybdenum (VI) oxide, molybdenum (VI) oxide, and molybdic acid. Suitable molybdenyl complexes include, for example, molybdenyl acetylacetonate. Other suitable tungsten and molybdenum complexes include hydroxo derivatives derived from, for example, glycerol, tartaric acid, and sugars.

[1058] A wide variety of other anti-angiogenic factors may also be utilized within the context of the present invention. Representative examples include, but are not limited to, platelet factor 4; protamine sulphate; sulphated chitin derivatives (prepared from queen crab shells), (Murata et al., Cancer Res. 51:22-26, (1991)); Sulphated Polysaccharide Peptidoglycan Complex (SP-PG) (the function of this compound may be enhanced by the presence of steroids such as estrogen, and tamoxifen citrate); Staurosporine; modulators of matrix metabolism, including for example, proline analogs, cishydroxyproline, d,L-3,4-dehydroproline, Thiaproline, alpha,alpha-dipyridyl, aminopropionitrile fumarate; 4-propyl-5-(4-pyridinyl)-2(3H)-oxazolone; Methotrexate; Mitoxantrone; Heparin; Interferons; 2 Macroglobulin-serum; ChIMP-3 (Pavloff et al., J. Bio. Chem. 267:17321-17326, (1992)); Chymostatin (Tomkinson et al., Biochem J. 286:475-480, (1992)); Cyclodextrin Tetradecasulfate; Eponemycin; Camptothecin; Fumagillin (Ingber et al., Nature 348:555-557, (1990)); Gold Sodium Thiomalate (“GST”; Matsubara and Ziff, J. Clin. Invest. 79:1440-1446, (1987)); anticollagenase-serum; alpha2-antiplasmin (Holmes et al., J. Biol. Chem. 262(4):1659-1664, (1987)); Bisantrene (National Cancer Institute); Lobenzarit disodium (N-(2)-carboxyphenyl-4- chloroanthronilic acid disodium or “CCA”; (Takeuchi et al., Agents Actions 36:312-316, (1992)); and metalloproteinase inhibitors such as BB94.

[1059] Additional anti-angiogenic factors that may also be utilized within the context of the present invention include Thalidomide, (Celgene, Warren, N.J.); Angiostatic steroid; AGM-1470 (H. Brem and J. Folkman J Pediatr. Surg. 28:445-51 (1993)); an integrin alpha v beta 3 antagonist (C. Storgard et al., J Clin. Invest. 103:47-54 (1999)); carboxynaminolmidazole; Carboxyamidotriazole (CAI) (National Cancer Institute, Bethesda, Md.); Conbretastatin A-4 (CA4P) (OXiGENE, Boston, Mass.); Squalamine (Magainin Pharmaceuticals, Plymouth Meeting, Pa. ); TNP-470, (Tap Pharmaceuticals, Deerfield, Ill.); ZD-0101 AstraZeneca (London, UK); APRA (CT2584); Benefin, Byrostatin-1 (SC339555); CGP-41251 (PKC 412); CM101; Dexrazoxane (ICRF187); DMXAA; Endostatin; Flavopridiol; Genestein; GTE; ImmTher; Iressa (ZD1839); Octreotide (Somatostatin); Panretin; Penacillamine; Photopoint; PI-88; Prinomastat (AG-3340) Purlytin; Suradista (FCE26644); Tamoxifen (Nolvadex); Tazarotene; Tetrathiomolybdate; Xeloda (Capecitabine); and 5-Fluorouracil.

[1060] Anti-angiogenic agents that may be administed in combination with the compounds of the invention may work through a variety of mechanisms including, but not limited to, inhibiting proteolysis of the extracellular matrix, blocking the function of endothelial cell-extracellular matrix adhesion molecules, by antagonizing the function of angiogenesis inducers such as growth factors, and inhibiting integrin receptors expressed on proliferating endothelial cells. Examples of anti-angiogenic inhibitors that interfere with extracellular matrix proteolysis and which may be administered in combination with the compositons of the invention include, but are not lmited to, AG-3340 (Agouron, La Jolla, Calif.), BAY-12-9566 (Bayer, West Haven, Conn.), BMS-275291 (Bristol Myers Squibb, Princeton, N.J.), CGS-27032A (Novartis, East Hanover, N.J.), Marimastat (British Biotech, Oxford, UK), and Metastat (Aeterna, St-Foy, Quebec). Examples of anti-angiogenic inhibitors that act by blocking the function of endothelial cell-extracellular matrix adhesion molecules and which may be administered in combination with the compositons of the invention include, but are not limited to, EMD-121974 (Merck KcgaA Darmstadt, Germany) and Vitaxin (Ixsys, La Jolla, Calif./Medimmune, Gaithersburg, Md.). Examples of anti-angiogenic agents that act by directly antagonizing or inhibiting angiogenesis inducers and which may be administered in combination with the compositons of the invention include, but are not limited to, Angiozyme (Ribozyme, Boulder, Colo.), Anti-VEGF antibody (Genentech, S. San Francisco, Calif.), PTK-787/ZK-225846 (Novartis, Basel, Switzerland), SU-101 (Sugen, S. San Francisco, Calif.), SU-5416 (Sugen/ Pharmacia Upjohn, Bridgewater, N.J.), and SU-6668 (Sugen). Other anti-angiogenic agents act to indirectly inhibit angiogenesis. Examples of indirect inhibitors of angiogenesis which may be administered in combination with the compositons of the invention include, but are not limited to, IM-862 (Cytran, Kirkland, Wash.), Interferon-alpha, IL-12 (Roche, Nutley, N.J.), and Pentosan polysulfate (Georgetown University, Washington, D.C.).

[1061] In particular embodiments, the use of compositions of the invention in combination with anti-angiogenic agents is contemplated for the treatment, prevention, and/or amelioration of an autoimmune disease, such as for example, an autoimmune disease described herein.

[1062] In a particular embodiment, the use of compositions of the invention in combination with anti-angiogenic agents is contemplated for the treatment, prevention, and/or amelioration of arthritis. In a more particular embodiment, the use of compositions of the invention in combination with anti-angiogenic agents is contemplated for the treatment, prevention, and/or amelioration of rheumatoid arthritis.

[1063] In another embodiment, the polynucleotides encoding a polypeptide of the present invention are administered in combination with an angiogenic protein, or polynucleotides encoding an angiogenic protein. Examples of angiogenic proteins that may be administered with the compositions of the invention include, but are not limited to, acidic and basic fibroblast growth factors, VEGF-1, VEGF-2, VEGF-3, epidermal growth factor alpha and beta, platelet-derived endothelial cell growth factor, platelet-derived growth factor, tumor necrosis factor alpha, hepatocyte growth factor, insulin-like growth factor, colony stimulating factor, macrophage colony stimulating factor, granulocyte/macrophage colony stimulating factor, and nitric oxide synthase.

[1064] In additional embodiments, compositions of the invention are administered in combination with a chemotherapeutic agent. Chemotherapeutic agents that may be administered with the Therapeutics of the invention include, but are not limited to alkylating agents such as nitrogen mustards (for example, Mechlorethamine, cyclophosphamide, Cyclophosphamide Ifosfamide, Melphalan (L-sarcolysin), and Chlorambucil), ethylenimines and methylmelamines (for example, Hexamethylmelamine and Thiotepa), alkyl sulfonates (for example, Busulfan), nitrosoureas (for example, Carmustine (BCNU), Lomustine (CCNU), Semustine (methyl-CCNU), and Streptozocin (streptozotocin)), triazenes (for example, Dacarbazine (DTIC; dimethyltriazenoimidazolecarboxamide)), folic acid analogs (for example, Methotrexate (amethopterin)), pyrimidine analogs (for example, Fluorouacil (5-fluorouracil; 5-FU), Floxuridine (fluorodeoxyuridine; FudR), and Cytarabine (cytosine arabinoside)), purine analogs and related inhibitors (for example, Mercaptopurine (6-mercaptopurine; 6-MP), Thioguanine (6-thioguanine; TG), and Pentostatin (2′-deoxycoformycin)), vinca alkaloids (for example, Vinblastine (VLB, vinblastine sulfate) and Vincristine (vincristine sulfate)), epipodophyllotoxins (for example, Etoposide and Teniposide), antibiotics (for example, Dactinomycin (actinomycin D), Daunorubicin (daunomycin; rubidomycin), Doxorubicin, Bleomycin, Plicamycin (mithramycin), and Mitomycin (mitomycin C), enzymes (for example, L-Asparaginase), biological response modifiers (for example, Interferon-alpha and interferon-alpha-2b), platinum coordination compounds (for example, Cisplatin (cis-DDP) and Carboplatin), anthracenedione (Mitoxantrone), substituted ureas (for example, Hydroxyurea), methylhydrazine derivatives (for example, Procarbazine (N-methylhydrazine; MIH), adrenocorticosteroids (for example, Prednisone), progestins (for example, Hydroxyprogesterone caproate, Medroxyprogesterone, Medroxyprogesterone acetate, and Megestrol acetate), estrogens (for example, Diethylstilbestrol (DES), Diethylstilbestrol diphosphate, Estradiol, and Ethinyl estradiol), antiestrogens (for example, Tamoxifen), androgens (Testosterone proprionate, and Fluoxymesterone), antiandrogens (for example, Flutamide), gonadotropin-releasing horomone analogs (for example, Leuprolide), other hormones and hormone analogs (for example, methyltestosterone, estramustine, estramustine phosphate sodium, chlorotrianisene, and testolactone), and others (for example, dicarbazine, glutamic acid, and mitotane).

[1065] In one embodiment, the compositions of the invention are administered in combination with one or more of the following drugs: infliximab (also known as Remicade™ Centocor, Inc.), Trocade (Roche, RO-32-3555), Leflunomide (also known as Arava™ from Hoechst Marion Roussel), Kineret™ (an IL-1 Receptor antagonist also known as Anakinra from Amgen, Inc.).

[1066] In a specific embodiment, compositions of the invention are administered in combination with CHOP (cyclophosphamide, doxorubicin, vincristine, and prednisone) or combination of one or more of the components of CHOP. In one embodiment, the compositions of the invention are administered in combination with anti-CD20 antibodies, human monoclonal anti-CD20 antibodies. In another embodiment, the compositions of the invention are administered in combination with anti-CD20 antibodies and CHOP, or anti-CD20 antibodies and any combination of one or more of the components of CHOP, particularly cyclophosphamide and/or prednisone. In a specific embodiment, compositions of the invention are administered in combination with Rituximab. In a further embodiment, compositions of the invention are administered with Rituximab and CHOP, or Rituximab and any combination of one or more of the components of CHOP, particularly cyclophosphamide and/or prednisone. In a specific embodiment, compositions of the invention are administered in combination with tositumomab. In a further embodiment, compositions of the invention are administered with tositumomab and CHOP, or tositumomab and any combination of one or more of the components of CHOP, particularly cyclophosphamide and/or prednisone. The anti-CD20 antibodies may optionally be associated with radioisotopes, toxins or cytotoxic prodrugs.

[1067] In another specific embodiment, the compositions of the invention are administered in combination Zevalin™. In a further embodiment, compositions of the invention are administered with Zevalin™ and CHOP, or Zevalin™ and any combination of one or more of the components of CHOP, particularly cyclophosphamide and/or prednisone. Zevalin™ may be associated with one or more radisotopes. Particularly preferred isotopes are ⁹⁰Y and ¹¹¹In.

[1068] In an additional embodiment, the Therapeutics of the invention are administered in combination with cytokines. Cytokines that may be administered with the Therapeutics of the invention include, but are not limited to, IL2, IL3, IL4, IL5, IL6, IL7, IL10, IL12, IL13, IL15, anti-CD40, CD40L, IFN-gamma and TNF-alpha. In another embodiment, Therapeutics of the invention may be administered with any interleukin, including, but not limited to, IL-1alpha, IL-1beta, IL-2, IL-3, IL-4, IL-5, IL-6, IL-7, IL-8, IL-9, IL-10, IL-11, IL-12, IL-13, IL-14, IL-15, IL-16, IL17, IL-18, IL-19, IL-20, and IL-21.

[1069] In one embodiment, the Therapeutics of the invention are administered in combination with members of the TNF family. TNF, TNF-related or TNF-like molecules that may be administered with the Therapeutics of the invention include, but are not limited to, soluble forms of TNF-alpha, lymphotoxin-alpha (LT-alpha, also known as TNF-beta), LT-beta (found in complex heterotrimer LT-alpha2-beta), OPGL, FasL, CD27L, CD30L, CD40L, 4-1BBL, DcR3, OX40L, TNF-gamma (International Publication No. WO 96/14328), AIM-I (International Publication No. WO 97/33899), endokine-alpha (International Publication No. WO 98/07880), OPG, and neutrokine-alpha (International Publication No. WO 98/18921, OX40, and nerve growth factor (NGF), and soluble forms of Fas, CD30, CD27, CD40 and 4-IBB, TR2 (International Publication No. WO 96/34095), DR3 (International Publication No. WO 97/33904), DR4 (International Publication No. WO 98/32856), TR5 (International Publication No. WO 98/30693), TRANK, TR9 (International Publication No. WO 98/56892),TR10(International Publication No. WO 98/54202), 312C2 (International Publication No. WO 98/06842), and TR12, and soluble forms CD 154, CD70, and CD 153.

[1070] In an additional embodiment, the Therapeutics of the invention are administered in combination with angiogenic proteins. Angiogenic proteins that may be administered with the Therapeutics of the invention include, but are not limited to, Glioma Derived Growth Factor (GDGF), as disclosed in European Patent Number EP-399816; Platelet Derived Growth Factor-A (PDGF-A), as disclosed in European Patent Number EP-682110; Platelet Derived Growth Factor-B (PDGF-B), as disclosed in European Patent Number EP-282317; Placental Growth Factor (PIGF), as disclosed in International Publication Number WO 92/06194; Placental Growth Factor-2 (PIGF-2), as disclosed in Hauser et al., Growth Factors, 4:259-268 (1993); Vascular Endothelial Growth Factor (VEGF), as disclosed in International Publication Number WO 90/13649; Vascular Endothelial Growth Factor-A (VEGF-A), as disclosed in European Patent Number EP-506477; Vascular Endothelial Growth Factor-2 (VEGF-2), as disclosed in International Publication Number WO 96/39515; Vascular Endothelial Growth Factor B (VEGF-3); Vascular Endothelial Growth Factor B-186 (VEGF-B186), as disclosed in International Publication Number WO 96/26736; Vascular Endothelial Growth Factor-D (VEGF-D), as disclosed in International Publication Number WO 98/02543; Vascular Endothelial Growth Factor-D (VEGF-D), as disclosed in International Publication Number WO 98/07832; and Vascular Endothelial Growth Factor-E (VEGF-E), as disclosed in German Patent Number DE19639601. The above mentioned references are herein incorporated by reference in their entireties.

[1071] In an additional embodiment, the Therapeutics of the invention are administered in combination with Fibroblast Growth Factors. Fibroblast Growth Factors that may be administered with the Therapeutics of the invention include, but are not limited to, FGF-1, FGF-2, FGF-3, FGF-4, FGF-5, FGF-6, FGF-7, FGF-8, FGF-9, FGF-10, FGF-11, FGF-12, FGF-13, FGF-14, and FGF-15.

[1072] In an additional embodiment, the Therapeutics of the invention are administered in combination with hematopoietic growth factors. Hematopoietic growth factors that may be administered with the Therapeutics of the invention include, but are not limited to, granulocyte macrophage colony stimulating factor (GM-CSF) (sargramostim, LEUKINE™, PROKINE™), granulocyte colony stimulating factor (G-CSF) (fligrastim, NEUPOGEN™), macrophage colony stimulating factor (M-CSF, CSF-1) erythropoietin (epoetin alfa, EPOGENT™, PROCRIT™), stem cell factor (SCF, c-kit ligand, steel factor), megakaryocyte colony stimulating factor, PIXY321 (a GMCSF/IL-3 fusion protein), interleukins, especially any one or more of IL-1 through IL-12, interferon-gamma, or thrombopoietin.

[1073] In certain embodiments, Therapeutics of the present invention are administered in combination with adrenergic blockers, such as, for example, acebutolol, atenolol, betaxolol, bisoprolol, carteolol, labetalol, metoprolol, nadolol, oxprenolol, penbutolol, pindolol, propranolol, sotalol, and timolol.

[1074] In another embodiment, the Therapeutics of the invention are administered in combination with an antiarrhythmic drug (e.g., adenosine, amidoarone, bretylium, digitalis, digoxin, digitoxin, diliazem, disopyramide, esmolol, flecainide, lidocaine, mexiletine, moricizine, phenytoin, procainamide, N-acetyl procainamide, propafenone, propranolol, quinidine, sotalol, tocainide, and verapamil).

[1075] In another embodiment, the Therapeutics of the invention are administered in combination with diuretic agents, such as carbonic anhydrase-inhibiting agents (e.g., acetazolamide, dichlorphenamide, and methazolamide), osmotic diuretics (e.g., glycerin, isosorbide, mannitol, and urea), diuretics that inhibit Na⁺-K⁺-2Cl⁻ symport (e.g., fuirosemide, bumetanide, azosemide, piretanide, tripamide, ethacrynic acid, muzolimine, and torsemide), thiazide and thiazide-like diuretics (e.g., bendroflumethiazide, benzthiazide, chlorothiazide, hydrochlorothiazide, hydroflumethiazide, methyclothiazide, polythiazide, trichormethiazide, chlorthalidone, indapamide, metolazone, and quinethazone), potassium sparing diuretics (e.g., amiloride and triamterene), and mineralcorticoid receptor antagonists (e.g., spironolactone, canrenone, and potassium canrenoate).

[1076] In one embodiment, the Therapeutics of the invention are administered in combination with treatments for endocrine and/or hormone imbalance disorders. Treatments for endocrine and/or hormone imbalance disorders include, but are not limited to, ¹²⁷I, radioactive isotopes of iodine such as ¹³¹I and ¹²³I; recombinant growth hormone, such as HUMATROPE™ (recombinant somatropin); growth hormone analogs such as PROTROPIN™ (somatrem); dopamine agonists such as PARLODEL™ (bromocriptine); somatostatin analogs such as SANDOSTATIN™ (octreotide); gonadotropin preparations such as PREGNYL™, A.P.L.™ and PROFASI™ (chorionic gonadotropin (CG)), PERGONAL™ (menotropins), and METRODIN™ (urofollitropin (uFSH)); synthetic human gonadotropin releasing hormone preparations such as FACTREL™ and LUTREPULSE™ (gonadorelin hydrochloride); synthetic gonadotropin agonists such as LUPRON™ (leuprolide acetate), SUPPRELIN™ (histrelin acetate), SYNAREL™ (nafarelin acetate), and ZOLADEX™ (goserelin acetate); synthetic preparations of thyrotropin-releasing hormone such as RELEFACT TRH™ and THYPINONE™ (protirelin); recombinant human TSH such as THYROGEN™; synthetic preparations of the sodium salts of the natural isomers of thyroid hormones such as L-T₄™, SYNTHROID™ and LEVOTHROID™ (levothyroxine sodium), L-T₃™, CYTOMEL™ and TRIOSTAT™ (liothyroine sodium), and THYROLAR™ (liotrix); antithyroid compounds such as 6-n-propylthiouracil (propylthiouracil), 1-methyl-2-mercaptoimidazole and TAPAZOLE™ (methimazole), NEO-MERCAZOLE™, (carbimazole); beta-adrenergic receptor antagonists such as propranolol and esmolol; Ca²⁺ channel blockers; dexamethasone and iodinated radiological contrast agents such as TELEPAQUE™ (iopanoic acid) and ORAGRAFIN™ (sodium ipodate); estrogens or congugated estrogens such as ESTRACE™ (estradiol), ESTINYL™ (ethinyl estradiol), PREMARIN™, ESTRATAB™, ORTHO-EST™, OGEN™ and estropipate (estrone), ESTROVIS™ (quinestrol), ESTRADERM™ (estradiol), DELESTROGEN™ and VALERGEN™ (estradiol valerate), DEPO-ESTRADIOL CYPIONATE™ and ESTROJECT LA™ (estradiol cypionate); antiestrogens such as NOLVADEX™ (tamoxifen), SEROPHENE™ and CLOMID™ (clomiphene); progestins such as DURALUTIN™ (hydroxyprogesterone caproate), MPA™ and DEPO-PROVERA™ (medroxyprogesterone acetate), PROVERA™ and CYCRIN™ (MPA), MEGACE™ (megestrol acetate), NORLUTIN™ (norethindrone), and NORLUTATE™ and AYGESTIN™ (norethindrone acetate); progesterone implants such as NORPLANT SYSTEM™ (subdermal implants of norgestrel); antiprogestins such as RU 486™ (mifepristone); hormonal contraceptives such as ENOVID™ (norethynodrel plus mestranol), PROGESTASERT™ (intrauterine device that releases progesterone), LOESTRIN™, BREVICON™, MODICON™, GENORA™, NELONA™, NORINYL™, OVACON-35™ and OVACON-50™ (ethinyl estradiol/norethindrone), LEVLEN™, NORDETTE-™, TRI-LEVLEN™ and TRIPHASIL-21™ (ethinyl estradiol/levonorgestrel) LO/OVRAL™ and OVRAL™ (ethinyl estradiol/norgestrel), DEMULEN™ (ethinyl estradiol/ethynodiol diacetate), NORINYL™, ORTHO-NOVUM™, NORETHIN™, GENORA™, and NELOVA™ (norethindrone/mestranol), DESOGEN™ and ORTHO-CEPT™ (ethinyl estradiol/desogestrel), ORTHO-CYCLEN™ and ORTHO-TRICYCLEN™ (ethinyl estradiol/norgestimate), MICRONOR™ and NOR-QD™ (norethindrone), and OVRETTE™ (norgestrel); testosterone esters such as methenolone acetate and testosterone undecanoate; parenteral and oral androgens such as TESTOJECT-50™ (testosterone), TESTEX™ (testosterone propionate), DELATESTRYL™ (testosterone enanthate), DEPO-TESTOSTERONE™ (testosterone cypionate), DANOCRINE™ (danazol), HALOTESTIN™ (fluoxymesterone), ORETON METHYL™, TESTRED™ and VIRILON™ (methyltestosterone), and OXANDRIN™ (oxandrolone); testosterone transdermal systems such as TESTODERM™; androgen receptor antagonist and 5-alpha-reductase inhibitors such as ANDROCUR™ (cyproterone acetate), EULEXIN™ (flutamide), and PROSCAR™ (finasteride); adrenocorticotropic hormone preparations such as CORTROSYN™ (cosyntropin); adrenocortical steroids and their synthetic analogs such as ACLOVATE™ (alclometasone dipropionate), CYCLOCORT™ (amcinonide), BECLOVENT™ and VANCERIL™ (beclomethasone dipropionate), CELESTONE™ (betamethasone), BENISONE™ and UTICORT™ (betamethasone benzoate), DIPROSONE™ (betamethasone dipropionate), CELESTONE PHOSPHATE™ (betamethasone sodium phosphate), CELESTONE SOLUSPAN™ (betamethasone sodium phosphate and acetate), BETA-VAL™ and VALISONE™ (betamethasone valerate), TEMOVATE™ (clobetasol propionate), CLODERM™ (clocortolone pivalate), CORTEF™ and HYDROCORTONE™ (cortisol (hydrocortisone)), HYDROCORTONE ACETATE™ (cortisol (hydrocortisone) acetate), LOCOID™ (cortisol (hydrocortisone) butyrate), HYDROCORTONE PHOSPHATE™ (cortisol (hydrocortisone) sodium phosphate), A-HYDROCORT™ and SOLU CORTEF™ (cortisol (hydrocortisone) sodium succinate), WESTCORT™ (cortisol(hydrocortisone)valerate), CORTISONE ACETATE™ (cortisone acetate), DESOWEN™ and TRIDESILON™ (desonide), TOPICORT™ (desoximetasone), DECADRON™ (dexamethasone), DECADRON LA™ (dexamethasone acetate), DECADRON PHOSPHATE™ and HEXADROL PHOSPHATE™ (dexamethasone sodium phosphate), FLORONE™ and MAXIFLOR™ (diflorasone diacetate), FLORINEF ACETATE™ (fludrocortisone acetate), AEROBID™ and NASALIDE™ (flunisolide), FLUONID™ and SYNALAR™ (fluocinolone acetonide), LIDEX™ (fluocinonide), FLUOR-OP™ and FML™ (fluorometholone), CORDRAN™ (flurandrenolide), HALOG™ (halcinonide), HMS LIZUIFILM™ (medrysone), MEDROL™ (methylprednisolone), DEPO-MEDROL™ and MEDROL ACETATE™ (methylprednisone acetate), A-METHAPRED™ and SOLUMEDROL™ (methylprednisolone sodium succinate), ELOCON™ (mometasone furoate), HALDRONE™ (paramethasone acetate), DELTA-CORTEF™ (prednisolone), ECONOPRED™ (prednisolone acetate), HYDELTRASOL™ (prednisolone sodium phosphate), HYDELTRA-T.B.A™ (prednisolone tebutate), DELTASONE™ (prednisone), ARISTOCORT™ and KENACORT™ (triamcinolone), KENALOG™ (triamcinolone acetonide), ARISTOCORT™ and KENACORT DIACETATE™ (triamcinolone diacetate), and ARISTOSPAN™ (triamcinolone hexacetonide); inhibitors of biosynthesis and action of adrenocortical steroids such as CYTADREN™ (aminoglutethimide), NIZORAL™ (ketoconazole), MODRASTANE™ (trilostane), and METOPIRONE™ (metyrapone); bovine, porcine or human insulin or mixtures thereof; insulin analogs; recombinant human insulin such as HUMULIN™ and NOVOLIN™; oral hypoglycemic agents such as ORAMIDE™ and ORINASE™ (tolbutamide), DIABINESE™ (chlorpropamide), TOLAMIDE™ and TOLINASE™ (tolazamide), DYMELOR™ (acetohexamide), glibenclamide, MICRONASE™, DIBETA™ and GLYNASE™ (glyburide), GLUCOTROL™ (glipizide), and DIAMICRON™ (gliclazide), GLUCOPHAGE™ (metformin), ciglitazone, pioglitazone, and alpha-glucosidase inhibitors; bovine or porcine glucagon; somatostatins such as SANDOSTATIN™ (octreotide); and diazoxides such as PROGLYCEM™ (diazoxide).

[1077] In one embodiment, the Therapeutics of the invention are administered in combination with treatments for uterine motility disorders. Treatments for uterine motility disorders include, but are not limited to, estrogen drugs such as conjugated estrogens (e.g., PREMARIN® and ESTRATAB®), estradiols (e.g., CLIMARA® and ALORA®), estropipate, and chlorotrianisene; progestin drugs (e.g., AMEN® (medroxyprogesterone), MICRONOR® (norethidrone acetate), PROMETRIUM® progesterone, and megestrol acetate); and estrogen/progesterone combination therapies such as, for example, conjugated estrogens/medroxyprogesterone (e.g., PREMPRO™ and PREMPHASE®) and norethindrone acetate/ethinyl estradiol (e.g., FEMHRT™).

[1078] In an additional embodiment, the Therapeutics of the invention are administered in combination with drugs effective in treating iron deficiency and hypochromic anemias, including but not limited to, ferrous sulfate (iron sulfate, FEOSOL™), ferrous fumarate (e.g., FEOSTAT™), ferrous gluconate (e.g., FERGON™), polysaccharide-iron complex (e.g., NIFEREX™), iron dextran injection (e.g., INFED™), cupric sulfate, pyroxidine, riboflavin, Vitamin B₂, cyancobalamin injection (e.g., REDISOL™, RUBRAMIN PC™), hydroxocobalamin, folic acid (e.g., FOLVITE™), leucovorin (folinic acid, 5-CHOH4PteGlu, citrovorum factor) or WELLCOVORIN (Calcium salt of leucovorin), transferrin or ferritin.

[1079] In certain embodiments, the Therapeutics of the invention are administered in combination with agents used to treat psychiatric disorders. Psychiatric drugs that may be administered with the Therapeutics of the invention include, but are not limited to, antipsychotic agents (e.g., chlorpromazine, chlorprothixene, clozapine, fluphenazine, haloperidol, loxapine, mesoridazine, molindone, olanzapine, perphenazine, pimozide, quetiapine, risperidone, thioridazine, thiothixene, trifluoperazine, and triflupromazine), antimanic agents (e.g., carbamazepine, divalproex sodium, lithium carbonate, and lithium citrate), antidepressants (e.g., amitriptyline, amoxapine, bupropion, citalopram, clomipramine, desipramine, doxepin, fluvoxamine, fluoxetine, imipramine, isocarboxazid, maprotiline, mirtazapine, nefazodone, nortriptyline, paroxetine, phenelzine, protriptyline, sertraline, tranylcypromine, trazodone, trimipramine, and venlafaxine), antianxiety agents (e.g., alprazolam, buspirone, chlordiazepoxide, clorazepate, diazepam, halazepam, lorazepam, oxazepam, and prazepam), and stimulants (e.g., d-amphetamine, methylphenidate, and pemoline).

[1080] In other embodiments, the Therapeutics of the invention are administered in combination with agents used to treat neurological disorders. Neurological agents that may be administered with the Therapeutics of the invention include, but are not limited to, antiepileptic agents (e.g., carbamazepine, clonazepam, ethosuximide, phenobarbital, phenytoin, primidone, valproic acid, divalproex sodium, felbamate, gabapentin, lamotrigine, levetiracetam, oxcarbazepine, tiagabine, topiramate, zonisamide, diazepam, lorazepam, and clonazepam), antiparkinsonian agents (e.g., levodopa/carbidopa, selegiline, amantidine, bromocriptine, pergolide, ropinirole, pramipexole, benztropine; biperiden; ethopropazine; procyclidine; trihexyphenidyl, tolcapone), and ALS therapeutics (e.g. riluzole).

[1081] In another embodiment, Therapeutics of the invention are administered in combination with vasodilating agents and/or calcium channel blocking agents. Vasodilating agents that may be administered with the Therapeutics of the invention include, but are not limited to, Angiotensin Converting Enzyme (ACE) inhibitors (e.g., papaverine, isoxsuprine, benazepril, captopril, cilazapril, enalapril, enalaprilat, fosinopril, lisinopril, moexipril, perindopril, quinapril, ramipril, spirapril, trandolapril, and nylidrin), and nitrates (e.g., isosorbide dinitrate, isosorbide mononitrate, and nitroglycerin). Examples of calcium channel blocking agents that may be administered in combination with the Therapeutics of the invention include, but are not limited to amlodipine, bepridil, diltiazem, felodipine, flunarizine, isradipine, nicardipine, nifedipine, nimodipine, and verapamil.

[1082] In additional embodiments, the Therapeutics of the invention are administered in combination with other therapeutic or prophylactic regimens, such as, for example, radiation therapy.

### Example 14

### Method of Treating Decreased Levels of the Polypeptide

[1083] The present invention relates to a method for treating an individual in need of an increased level of a polypeptide of the invention in the body comprising administering to such an individual a composition comprising a therapeutically effective amount of an agonist of the invention (including polypeptides of the invention). Moreover, it will be appreciated that conditions caused by a decrease in the standard or normal expression level of a polypeptide of the present invention in an individual can be treated by administering the agonist or antagonist of the present invention. Thus, the invention also provides a method of treatment of an individual in need of an increased level of the polypeptide comprising administering to such an individual a Therapeutic comprising an amount of the agonist or antagonist to increase the activity level of the polypeptide in such an individual.

[1084] For example, a patient with decreased levels of a polypeptide receives a daily dose 0.1-100 ug/kg of the agonist or antagonist for six consecutive days. The exact details of the dosing scheme, based on administration and formulation, are provided in Example 13.

### Example 15

### Method of Treating Increased Levels of the Polypeptide

[1085] The present invention also relates to a method of treating an individual in need of a decreased level of a polypeptide of the invention in the body comprising administering to such an individual a composition comprising a therapeutically effective amount of an antagonist of the invention (including polypeptides and antibodies of the invention).

[1086] In one example, antisense technology is used to inhibit production of a polypeptide of the present invention. This technology is one example of a method of decreasing levels of a polypeptide, due to a variety of etiologies, such as cancer.

[1087] For example, a patient diagnosed with abnormally increased levels of a polypeptide is administered intravenously antisense polynucleotides at 0.5, 1.0, 1.5, 2.0 and 3.0 mg/kg day for 21 days. This treatment is repeated after a 7-day rest period if the treatment was well tolerated. The formulation of the antisense polynucleotide is provided in Example 13.

### Example 16

### Method of Treatment Using Gene Therapy-Ex Vivo

[1088] One method of gene therapy transplants fibroblasts, which are capable of expressing a polypeptide, onto a patient. Generally, fibroblasts are obtained from a subject by skin biopsy. The resulting tissue is placed in tissue-culture medium and separated into small pieces. Small chunks of the tissue are placed on a wet surface of a tissue culture flask, approximately ten pieces are placed in each flask. The flask is turned upside down, closed tight and left at room temperature over night. After 24 hours at room temperature, the flask is inverted and the chunks of tissue remain fixed to the bottom of the flask and fresh media (e.g., Ham's F12 media, with 10% FBS, penicillin and streptomycin) is added. The flasks are then incubated at 37 degree C. for approximately one week.

[1089] At this time, fresh media is added and subsequently changed every several days. After an additional two weeks in culture, a monolayer of fibroblasts emerge. The monolayer is trypsinized and scaled into larger flasks.

[1090] pMV-7 (Kirschmeier, P.T. et al., DNA, 7:219-25 (1988)), flanked by the long terminal repeats of the Moloney murine sarcoma virus, is digested with EcoRI and HindIII and subsequently treated with calf intestinal phosphatase. The linear vector is fractionated on agarose gel and purified, using glass beads.

[1091] The cDNA encoding a polypeptide of the present invention can be amplified using PCR primers which correspond to the 5′ and 3′ end sequences respectively as set forth in Example 1 using primers and having appropriate restriction sites and initiation/stop codons, if necessary. Preferably, the 5′ primer contains an EcoRI site and the 3′ primer includes a HindIII site. Equal quantities of the Moloney murine sarcoma virus linear backbone and the amplified EcoRI and HindIII fragment are added together, in the presence of T4 DNA ligase. The resulting mixture is maintained under conditions appropriate for ligation of the two fragments. The ligation mixture is then used to transform bacteria HB101, which are then plated onto agar containing kanamycin for the purpose of confirming that the vector has the gene of interest properly inserted.

[1092] The amphotropic pA317 or GP+am12 packaging cells are grown in tissue culture to confluent density in Dulbecco's Modified Eagles Medium (DMEM) with 10% calf serum (CS), penicillin and streptomycin. The MSV vector containing the gene is then added to the media and the packaging cells transduced with the vector. The packaging cells now produce infectious viral particles containing the gene (the packaging cells are now referred to as producer cells).

[1093] Fresh media is added to the transduced producer cells, and subsequently the media is harvested from a 10 cm plate of confluent producer cells. The spent media, containing the infectious viral particles, is filtered through a millipore filter to remove detached producer cells and this media is then used to infect fibroblast cells. Media is removed from a sub-confluent plate of fibroblasts and quickly replaced with the media from the producer cells. This media is removed and replaced with fresh media. If the titer of virus is high, then virtually all fibroblasts will be infected and no selection is required. If the titer is very low, then it is necessary to use a retroviral vector that has a selectable marker, such as neo or his. Once the fibroblasts have been efficiently infected, the fibroblasts are analyzed to determine whether protein is produced.

[1094] The engineered fibroblasts are then transplanted onto the host, either alone or after having been grown to confluence on cytodex 3 microcarrier beads.

### Example 17

### Gene Therapy Using Endogenous Genes Corresponding To Polynucleotides of the Invention

[1095] Another method of gene therapy according to the present invention involves operably associating the endogenous polynucleotide sequence of the invention with a promoter via homologous recombination as described, for example, in U.S. Pat. No. 5,641,670, issued Jun. 24, 1997; International Publication NO: WO 96/29411, published Sep. 26, 1996; International Publication NO: WO 94/12650, published Aug. 4, 1994; Koller et al., Proc. Natl. Acad. Sci. USA, 86:8932-8935 (1989); and Zijlstra et al., Nature, 342:435-438 (1989). This method involves the activation of a gene which is present in the target cells, but which is not expressed in the cells, or is expressed at a lower level than desired.

[1096] Polynucleotide constructs are made which contain a promoter and targeting sequences, which are homologous to the 5′ non-coding sequence of endogenous polynucleotide sequence, flanking the promoter. The targeting sequence will be sufficiently near the 5′ end of the polynucleotide sequence so the promoter will be operably linked to the endogenous sequence upon homologous recombination. The promoter and the targeting sequences can be amplified using PCR. Preferably, the amplified promoter contains distinct restriction enzyme sites on the 5′ and 3′ ends. Preferably, the 3′ end of the first targeting sequence contains the same restriction enzyme site as the 5′ end of the amplified promoter and the 5′ end of the second targeting sequence contains the same restriction site as the 3′ end of the amplified promoter.

[1097] The amplified promoter and the amplified targeting sequences are digested with the appropriate restriction enzymes and subsequently treated with calf intestinal phosphatase. The digested promoter and digested targeting sequences are added together in the presence of T4 DNA ligase. The resulting mixture is maintained under conditions appropriate for ligation of the two fragments. The construct is size fractionated on an agarose gel, then purified by phenol extraction and ethanol precipitation.

[1098] In this Example, the polynucleotide constructs are administered as naked polynucleotides via electroporation. However, the polynucleotide constructs may also be administered with transfection-facilitating agents, such as liposomes, viral sequences, viral particles, precipitating agents, etc. Such methods of delivery are known in the art.

[1099] Once the cells are transfected, homologous recombination will take place which results in the promoter being operably linked to the endogenous polynucleotide sequence. This results in the expression of polynucleotide corresponding to the polynucleotide in the cell. Expression may be detected by immunological staining, or any other method known in the art.

[1100] Fibroblasts are obtained from a subject by skin biopsy. The resulting tissue is placed in DMEM+ 10% fetal calf serum. Exponentially growing or early stationary phase fibroblasts are trypsinized and rinsed from the plastic surface with nutrient medium. An aliquot of the cell suspension is removed for counting, and the remaining cells are subjected to centrifugation. The supernatant is aspirated and the pellet is resuspended in 5 ml of electroporation buffer (20 mM HEPES pH 7.3, 137 mM NaCl, 5 mM KCl, 0.7 mM Na₂ HPO₄, 6 mM dextrose). The cells are recentrifuged, the supernatant aspirated, and the cells resuspended in electroporation buffer containing 1 mg/ml acetylated bovine serum albumin. The final cell suspension contains approximately 3×10⁶ cells/ml. Electroporation should be performed immediately following resuspension.

[1101] Plasmid DNA is prepared according to standard techniques. For example, to construct a plasmid for targeting to the locus corresponding to the polynucleotide of the invention, plasmid pUC18 (MBI Fermentas, Amherst, N.Y.) is digested with HindIII. The CMV promoter is amplified by PCR with an XbaI site on the 5′ end and a BamHI site on the 3′ end. Two non-coding sequences are amplified via PCR: one non-coding sequence (fragment 1) is amplified with a HindIII site at the 5′ end and an Xba site at the 3′ end; the other non-coding sequence (fragment 2) is amplified with a BamHI site at the Send and a HindIII site at the 3′ end. The CMV promoter and the fragments (1 and 2) are digested with the appropriate enzymes (CMV promoter—XbaI and BamHI; fragment 1—XbaI; fragment 2—BamHI) and ligated together. The resulting ligation product is digested with HindIII, and ligated with the HindIII-digested pUC 18 plasmid.

[1102] Plasmid DNA is added to a sterile cuvette with a 0.4 cm electrode gap (Bio-Rad). The final DNA concentration is generally at least 120 μg/ml. 0.5 ml of the cell suspension (containing approximately 1.5.×10⁶ cells) is then added to the cuvette, and the cell suspension and DNA solutions are gently mixed. Electroporation is performed with a Gene-Pulser apparatus (Bio-Rad). Capacitance and voltage are set at 960 μF and 250-300 V, respectively. As voltage increases, cell survival decreases, but the percentage of surviving cells that stably incorporate the introduced DNA into their genome increases dramatically. Given these parameters, a pulse time of approximately 14-20 mSec should be observed.

[1103] Electroporated cells are maintained at room temperature for approximately 5 min, and the contents of the cuvette are then gently removed with a sterile transfer pipette. The cells are added directly to 10 ml of prewarmed nutrient media (DMEM with 15% calf serum) in a 10 cm dish and incubated at 37 degree C. The following day, the media is aspirated and replaced with 10 ml of fresh media and incubated for a further 16-24 hours.

[1104] The engineered fibroblasts are then injected into the host, either alone or after having been grown to confluence on cytodex 3 microcarrier beads. The fibroblasts now produce the protein product. The fibroblasts can then be introduced into a patient as described above.

### Example 18

### Method of Treatment Using Gene Therapy—In Vivo

[1105] Another aspect of the present invention is using in vivo gene therapy methods to treat disorders, diseases and conditions. The gene therapy method relates to the introduction of naked nucleic acid (DNA, RNA, and antisense DNA or RNA) sequences into an animal to increase or decrease the expression of the polypeptide. The polynucleotide of the present invention may be operatively linked to (i.e., associated with) a promoter or any other genetic elements necessary for the expression of the polypeptide by the target tissue. Such gene therapy and delivery techniques and methods are known in the art, see, for example, WO90/11092, WO98/11779; U.S. Pat. No. 5,693,622, 5,705,151, 5,580,859; Tabata et al., Cardiovasc. Res. 35(3):470-479 (1997); Chao et al., Pharmacol. Res. 35(6):517-522 (1997); Wolff, Neuromuscul. Disord. 7(5):314-318 (1997); Schwartz et al., Gene Ther. 3(5):405-411 (1996); Tsurumi et al., Circulation 94(12):3281-3290 (1996) (incorporated herein by reference).

[1106] The polynucleotide constructs may be delivered by any method that delivers injectable materials to the cells of an animal, such as, injection into the interstitial space of tissues (heart, muscle, skin, lung, liver, intestine and the like). The polynucleotide constructs can be delivered in a pharmaceutically acceptable liquid or aqueous carrier.

[1107] The term “naked” polynucleotide, DNA or RNA, refers to sequences that are free from any delivery vehicle that acts to assist, promote, or facilitate entry into the cell, including viral sequences, viral particles, liposome formulations, lipofectin or precipitating agents and the like. However, the polynucleotides of the present invention may also be delivered in liposome formulations (such as those taught in Felgner P. L. et al. (1995) Ann. NY Acad. Sci. 772:126-139 and Abdallah B. et al. (1995) Biol. Cell 85(1):1-7) which can be prepared by methods well known to those skilled in the art.

[1108] The polynucleotide vector constructs used in the gene therapy method are preferably constructs that will not integrate into the host genome nor will they contain sequences that allow for replication. Any strong promoter known to those skilled in the art can be used for driving the expression of DNA. Unlike other gene therapy techniques, one major advantage of introducing naked nucleic acid sequences into target cells is the transitory nature of the polynucleotide synthesis in the cells. Studies have shown that non-replicating DNA sequences can be introduced into cells to provide production of the desired polypeptide for periods of up to six months.

[1109] The polynucleotide construct can be delivered to the interstitial space of tissues within an animal, including muscle, skin, brain, lung, liver, spleen, bone marrow, thymus, heart, lymph, blood, bone, cartilage, pancreas, kidney, gall bladder, stomach, intestine, testis, ovary, uterus, rectum, nervous system, eye, gland, and connective tissue. Interstitial space of the tissues comprises the intercellular fluid, mucopolysaccharide matrix among the reticular fibers of organ tissues, elastic fibers in the walls of vessels or chambers, collagen fibers of fibrous tissues, or that same matrix within connective tissue ensheathing muscle cells or in the lacunae of bone. It is similarly the space occupied by the plasma of the circulation and the lymph fluid of the lymphatic channels. Delivery to the interstitial space of muscle tissue is preferred for the reasons discussed below. They may be conveniently delivered by injection into the tissues comprising these cells. They are preferably delivered to and expressed in persistent, non-dividing cells which are differentiated, although delivery and expression may be achieved in non-differentiated or less completely differentiated cells, such as, for example, stem cells of blood or skin fibroblasts. In vivo muscle cells are particularly competent in their ability to take up and express polynucleotides.

[1110] For the naked polynucleotide injection, an effective dosage amount of DNA or RNA will be in the range of from about 0.05 g/kg body weight to about 50 mg/kg body weight. Preferably the dosage will be from about 0.005 mg/kg to about 20 mg/kg and more preferably from about 0.05 mg/kg to about 5 mg/kg. Of course, as the artisan of ordinary skill will appreciate, this dosage will vary according to the tissue site of injection. The appropriate and effective dosage of nucleic acid sequence can readily be determined by those of ordinary skill in the art and may depend on the condition being treated and the route of administration. The preferred route of administration is by the parenteral route of injection into the interstitial space of tissues. However, other parenteral routes may also be used, such as, inhalation of an aerosol formulation particularly for delivery to lungs or bronchial tissues, throat or mucous membranes of the nose. In addition, naked polynucleotide constructs can be delivered to arteries during angioplasty by the catheter used in the procedure.

[1111] The dose response effects of injected polynucleotide in muscle in vivo is determined as follows. Suitable template DNA for production of mRNA coding for polypeptide of the present invention is prepared in accordance with a standard recombinant DNA methodology. The template DNA, which may be either circular or linear, is either used as naked DNA or complexed with liposomes. The quadriceps muscles of mice are then injected with various amounts of the template DNA.

[1112] Five to six week old female and male Balb/C mice are anesthetized by intraperitoneal injection with 0.3 ml of 2.5% Avertin. A 1.5 cm incision is made on the anterior thigh, and the quadriceps muscle is directly visualized. The template DNA is injected in 0.1 ml of carrier in a 1 cc syringe through a 27 gauge needle over one minute, approximately 0.5 cm from the distal insertion site of the muscle into the knee and about 0.2 cm deep. A suture is placed over the injection site for future localization, and the skin is closed with stainless steel clips.

[1113] After an appropriate incubation time (e.g., 7 days) muscle extracts are prepared by excising the entire quadriceps. Every fifth 15 um cross-section of the individual quadriceps muscles is histochemically stained for protein expression. A time course for protein expression may be done in a similar fashion except that quadriceps from different mice are harvested at different times. Persistence of DNA in muscle following injection may be determined by Southern blot analysis after preparing total cellular DNA and HIRT supernatants from injected and control mice. The results of the above experimentation in mice can be used to extrapolate proper dosages and other treatment parameters in humans and other animals using naked DNA.

### Example 19

### Transgenic Animals

[1114] The polypeptides of the invention can also be expressed in transgenic animals. Animals of any species, including, but not limited to, mice, rats, rabbits, hamsters, guinea pigs, pigs, micro-pigs, goats, sheep, cows and non-human primates, e.g., baboons, monkeys, and chimpanzees may be used to generate transgenic animals. In a specific embodiment, techniques described herein or otherwise known in the art, are used to express polypeptides of the invention in humans, as part of a gene therapy protocol.

[1115] Any technique known in the art may be used to introduce the transgene (i.e., polynucleotides of the invention) into animals to produce the founder lines of transgenic animals. Such techniques include, but are not limited to, pronuclear microinjection (Paterson et al., Appl. Microbiol. Biotechnol. 40:691-698 (1994);

[1116] Carver et al., Biotechnology (NY) 11:1263-1270 (1993); Wright et al., Biotechnology (NY) 9:830-834 (1991); and Hoppe et al., U.S. Pat. No. 4,873,191 (1989)); retrovirus mediated gene transfer into germ lines (Van der Putten et al., Proc. Natl. Acad. Sci., USA 82:6148-6152 (1985)), blastocysts or embryos; gene targeting in embryonic stem cells (Thompson et al., Cell 56:313-321 (1989)); electroporation of cells or embryos (Lo, 1983, Mol Cell. Biol. 3:1803-1814 (1983)); introduction of the polynucleotides of the invention using a gene gun (see, e.g., Ulmer et al., Science 259:1745 (1993); introducing nucleic acid constructs into embryonic pleuripotent stem cells and transferring the stem cells back into the blastocyst; and sperm-mediated gene transfer (Lavitrano et al., Cell 57:717-723 (1989); etc. For a review of such techniques, see Gordon, “Transgenic Animals,” Intl. Rev. Cytol. 115:171-229 (1989), which is incorporated by reference herein in its entirety.

[1117] Any technique known in the art may be used to produce transgenic clones containing polynucleotides of the invention, for example, nuclear transfer into enucleated oocytes of nuclei from cultured embryonic, fetal, or adult cells induced to quiescence (Campell et al., Nature 380:64-66 (1996); Wilmut et al., Nature 385:810-813 (1997)).

[1118] The present invention provides for transgenic animals that carry the transgene in all their cells, as well as animals which carry the transgene in some, but not all their cells, i.e., mosaic animals or chimeric. The transgene may be integrated as a single transgene or as multiple copies such as in concatamers, e.g., head-to-head tandems or head-to-tail tandems. The transgene may also be selectively introduced into and activated in a particular cell type by following, for example, the teaching of Lasko et al. (Lasko et al., Proc. Natl. Acad. Sci. USA 89:6232-6236 (1992)). The regulatory sequences required for such a cell-type specific activation will depend upon the particular cell type of interest, and will be apparent to those of skill in the art. When it is desired that the polynucleotide transgene be integrated into the chromosomal site of the endogenous gene, gene targeting is preferred. Briefly, when such a technique is to be utilized, vectors containing some nucleotide sequences homologous to the endogenous gene are designed for the purpose of integrating, via homologous recombination with chromosomal sequences, into and disrupting the function of the nucleotide sequence of the endogenous gene. The transgene may also be selectively introduced into a particular cell type, thus inactivating the endogenous gene in only that cell type, by following, for example, the teaching of Gu et al. (Gu et al., Science 265:103-106 (1994)). The regulatory sequences required for such a cell-type specific inactivation will depend upon the particular cell type of interest, and will be apparent to those of skill in the art.

[1119] Once transgenic animals have been generated, the expression of the recombinant gene may be assayed utilizing standard techniques. Initial screening may be accomplished by Southern blot analysis or PCR techniques to analyze animal tissues to verify that integration of the transgene has taken place. The level of mRNA expression of the transgene in the tissues of the transgenic animals may also be assessed using techniques which include, but are not limited to, Northern blot analysis of tissue samples obtained from the animal, in situ hybridization analysis, and reverse transcriptase-PCR (rt-PCR). Samples of transgenic gene-expressing tissue may also be evaluated immunocytochemically or immunohistochemically using antibodies specific for the transgene product.

[1120] Once the founder animals are produced, they may be bred, inbred, outbred, or crossbred to produce colonies of the particular animal. Examples of such breeding strategies include, but are not limited to: outbreeding of founder animals with more than one integration site in order to establish separate lines; inbreeding of separate lines in order to produce compound transgenics that express the transgene at higher levels because of the effects of additive expression of each transgene; crossing of heterozygous transgenic animals to produce animals homozygous for a given integration site in order to both augment expression and eliminate the need for screening of animals by DNA analysis; crossing of separate homozygous lines to produce compound heterozygous or homozygous lines; and breeding to place the transgene on a distinct background that is appropriate for an experimental model of interest.

[1121] Transgenic animals of the invention have uses which include, but are not limited to, animal model systems useful in elaborating the biological function of polypeptides of the present invention, studying conditions and/or disorders associated with aberrant expression, and in screening for compounds effective in ameliorating such conditions and/or disorders.

### Example 20

### Knock-Out Animals

[1122] Endogenous gene expression can also be reduced by inactivating or “knocking out” the gene and/or its promoter using targeted homologous recombination. (See e.g., Smithies et al., Nature 317:230-234 (1985); Thomas & Capecchi, Cell 51:503-512 (1987); Thompson et al., Cell 5:313-321 (1989); each of which is incorporated by reference herein in its entirety.) For example, a mutant, non-functional polynucleotide of the invention (or a completely unrelated DNA sequence) flanked by DNA homologous to the endogenous polynucleotide sequence (either the coding regions or regulatory regions of the gene) can be used, with or without a selectable marker and/or a negative selectable marker, to transfect cells that express polypeptides of the invention in vivo. In another embodiment, techniques known in the art are used to generate knockouts in cells that contain, but do not express the gene of interest. Insertion of the DNA construct, via targeted homologous recombination, results in inactivation of the targeted gene. Such approaches are particularly suited in research and agricultural fields where modifications to embryonic stem cells can be used to generate animal offspring with an inactive targeted gene (e.g., see Thomas & Capecchi 1987 and Thompson 1989, supra). However this approach can be routinely adapted for use in humans provided the recombinant DNA constructs are directly administered or targeted to the required site in vivo using appropriate viral vectors that will be apparent to those of skill in the art.

[1123] In further embodiments of the invention, cells that are genetically engineered to express the polypeptides of the invention, or alternatively, that are genetically engineered not to express the polypeptides of the invention (e.g., knockouts) are administered to a patient in vivo. Such cells may be obtained from the patient (i.e., animal, including human) or an MHC compatible donor and can include, but are not limited to fibroblasts, bone marrow cells, blood cells (e.g., lymphocytes), adipocytes, muscle cells,, endothelial cells etc. The cells are genetically engineered in vitro using recombinant DNA techniques to introduce the coding sequence of polypeptides of the invention into the cells, or alternatively, to disrupt the coding sequence and/or endogenous regulatory sequence associated with the polypeptides of the invention, e.g., by transduction (using viral vectors, and preferably vectors that integrate the transgene into the cell genome) or transfection procedures, including, but not limited to, the use of plasmids, cosmids, YACs, naked DNA, electroporation, liposomes, etc. The coding sequence of the polypeptides of the invention can be placed under the control of a strong constitutive or inducible promoter or promoter/enhancer to achieve expression, and preferably secretion, of the polypeptides of the invention. The engineered cells which express and preferably secrete the polypeptides of the invention can be introduced into the patient systemically, e.g., in the circulation, or intraperitoneally.

[1124] Alternatively, the cells can be incorporated into a matrix and implanted in the body, e.g., genetically engineered fibroblasts can be implanted as part of a skin graft; genetically engineered endothelial cells can be implanted as part of a lymphatic or vascular graft. (See, for example, Anderson et al. U.S. Pat. No. 5,399,349; and Mulligan & Wilson, U.S. Pat. No. 5,460,959 each of which is incorporated by reference herein in its entirety).

[1125] When the cells to be administered are non-autologous or non-MHC compatible cells, they can be administered using well known techniques which prevent the development of a host immune response against the introduced cells. For example, the cells may be introduced in an encapsulated form which, while allowing for an exchange of components with the immediate extracellular environment, does not allow the introduced cells to be recognized by the host immune system.

[1126] Transgenic and “knock-out” animals of the invention have uses which include, but are not limited to, animal model systems useful in elaborating the biological function of polypeptides of the present invention, studying conditions and/or disorders associated with aberrant expression, and in screening for compounds effective in ameliorating such conditions and/or disorders.

### Example 21

### Assays Detecting Stimulation or Inhibition of B cell Proliferation and Differentiation

[1127] Generation of functional humoral immune responses requires both soluble and cognate signaling between B-lineage cells and their microenvironment. Signals may impart a positive stimulus that allows a B-lineage cell to continue its programmed development, or a negative stimulus that instructs the cell to arrest its current developmental pathway. To date, numerous stimulatory and inhibitory signals have been found to influence B cell responsiveness including IL-2, IL-4, IL-5, IL-6, IL-7, IL10, IL-13, IL-14 and IL-15. Interestingly, these signals are by themselves weak effectors but can, in combination with various co-stimulatory proteins, induce activation, proliferation, differentiation, homing, tolerance and death among B cell populations.

[1128] One of the best studied classes of B-cell co-stimulatory proteins is the TNF-superfamily. Within this family CD40, CD27, and CD30 along with their respective ligands CD154, CD70, and CD153 have been found to regulate a variety of immune responses. Assays which allow for the detection and/or observation of the proliferation and differentiation of these B-cell populations and their precursors are valuable tools in determining the effects various proteins may have on these B-cell populations in terms of proliferation and differentiation. Listed below are two assays designed to allow for the detection of the differentiation, proliferation, or inhibition of B-cell populations and their precursors.

[1129] In vitro Assay-Agonists or antagonists of the invention can be assessed for its ability to induce activation, proliferation, differentiation or inhibition and/or death in B-cell populations and their precursors. The activity of the agonists or antagonists of the invention on purified human tonsillar B cells, measured qualitatively over the dose range from 0.1 to 10,000 ng/mL, is assessed in a standard B-lymphocyte co-stimulation assay in which purified tonsillar B cells are cultured in the presence of either formalin-fixed Staphylococcus aureus Cowan I (SAC) or immobilized anti-human IgM antibody as the priming agent. Second signals such as IL-2 and IL-15 synergize with SAC and IgM crosslinking to elicit B cell proliferation as measured by tritiated-thymidine incorporation. Novel synergizing agents can be readily identified using this assay. The assay involves isolating human tonsillar B cells by magnetic bead (MACS) depletion of CD3-positive cells. The resulting cell population is greater than 95% B cells as assessed by expression of CD45R(B220).

[1130] Various dilutions of each sample are placed into individual wells of a 96-well plate to which are added 10⁵ B-cells suspended in culture medium (RPMI 1640 containing 10% FBS, 5×10⁻⁵M 2ME, 100 U/ml penicillin, 10 ug/ml streptomycin, and 10⁻⁵ dilution of SAC) in a total volume of 150ul. Proliferation or inhibition is quantitated by a 20 h pulse (luCi/well) with 3H-thymidine (6.7 Ci/mM) beginning 72 h post factor addition. The positive and negative controls are IL2 and medium respectively.

[1131] In Vivo Assay—BALB/c mice are injected (i.p.) twice per day with buffer only, or 2 mg/Kg of agonists or antagonists of the invention, or truncated forms thereof. Mice receive this treatment for 4 consecutive days, at which time they are sacrificed and various tissues and serum collected for analyses. Comparison of H&E sections from normal spleens and spleens treated with agonists or antagonists of the invention identify the results of the activity of the agonists or antagonists on spleen cells, such as the diffusion of peri-arterial lymphatic sheaths, and/or significant increases in the nucleated cellularity of the red pulp regions, which may indicate the activation of the differentiation and proliferation of B-cell populations. Immunohistochemical studies using a B cell marker, anti-CD45R(B220), are used to determine whether any physiological changes to splenic cells, such as splenic disorganization, are due to increased B-cell representation within loosely defined B-cell zones that infiltrate established T-cell regions.

[1132] Flow cytometric analyses of the spleens from mice treated with agonist or antagonist is used to indicate whether the agonists or antagonists specifically increases the proportion of ThB+, CD45R(B220)dull B cells over that which is observed in control mice.

[1133] Likewise, a predicted consequence of increased mature B-cell representation in vivo is a relative increase in serum Ig titers. Accordingly, serum IgM and IgA levels are compared between buffer and agonists or antagonists-treated mice.

[1134] The studies described in this example tested activity of agonists or antagonists of the invention. However, one skilled in the art could easily modify the exemplified-studies to test the activity of polynucleotides or polypeptides of the invention (e.g., gene therapy).

### Example 22

### T Cell Proliferation Assay

[1135] A CD3-induced proliferation assay is performed on PBMCs and is measured by the uptake of ³H-thymidine. The assay is performed as follows. Ninety-six well plates are coated with 100 μl/well of mAb to CD3 (HIT3a, Pharmingen) or isotype-matched control mAb (B33.1) overnight at 4 degrees C. (1 μg/ml in 0.05M bicarbonate buffer, pH 9.5), then washed three times with PBS. PBMC are isolated by F/H gradient centrifugation from human peripheral blood and added to quadruplicate wells (5×10⁴/well) of mAb coated plates in RPMI containing 10% FCS and P/S in the presence of varying concentrations of agonists or antagonists of the invention (total volume 200 ul). Relevant protein buffer and medium alone are controls. After 48 hr. culture at 37 degrees C., plates are spun for 2 min. at 1000 rpm and 100 μl of supernatant is removed and stored −20 degrees C. for measurement of IL-2 (or other cytokines) if effect on proliferation is observed. Wells are supplemented with 100 ul of medium containing 0.5 uCi of ³H-thymidine and cultured at 37 degrees C. for 18-24 hr. Wells are harvested and incorporation of ³H-thymidine used as a measure of proliferation. Anti-CD3 alone is the positive control for proliferation. IL-2 (100 U/ml) is also used as a control which enhances proliferation. Control antibody which does not induce proliferation of T cells is used as the negative control for the effects of agonists or antagonists of the invention.

[1136] The studies described in this example tested activity of agonists or antagonists of the invention. However, one skilled in the art could easily modify the exemplified studies to test the activity of polynucleotides or polypeptides of the invention (e.g., gene therapy).

### Example 23

### Effect of Agonists or Antagonists of the Invention on the Expression of MHC Class II, Costimulatory and Adhesion Molecules and Cell Differentiation of Monocytes and Monocyte-Derived Hutman Dendritic Cells

[1137] Dendritic cells are generated by the expansion of proliferating precursors found in the peripheral blood: adherent PBMC or elutriated monocytic fractions are cultured for 7-10 days with GM-CSF (50 ng/ml) and IL-4 (20 ng/ml). These dendritic cells have the characteristic phenotype of immature cells (expression of CD1, CD80, CD86, CD40 and MHC class II antigens). Treatment with activating factors, such as TNF-α, causes a rapid change in surface phenotype (increased expression of MHC class I and II, costimulatory and adhesion molecules, downregulation of FCγRII, upregulation of CD83). These changes correlate with increased antigen-presenting capacity and with functional maturation of the dendritic cells.

[1138] FACS analysis of surface antigens is performed as follows. Cells are treated 1-3 days with increasing concentrations of agonist or antagonist of the invention or LPS (positive control), washed with PBS containing 1% BSA and 0.02 mM sodium azide, and then incubated with 1:20 dilution of appropriate FITC- or PE-labeled monoclonal antibodies for 30 minutes at 4 degrees C. After an additional wash, the labeled cells are analyzed by flow cytometry on a FACScan (Becton Dickinson).

[1139] Effect on the production of cytokines. Cytokines generated by dendritic cells, in particular IL-12, are important in the initiation of T-cell dependent immune responses. IL-12 strongly influences the development of Th1 helper T-cell immune response, and induces cytotoxic T and NK cell function. An ELISA is used to measure the IL-12 release as follows. Dendritic cells (10⁶/ml) are treated with increasing concentrations of agonists or antagonists of the invention for 24 hours. LPS (100 ng/ml) is added to the cell culture as positive control. Supernatants from the cell cultures are then collected and analyzed for IL-12 content using commercial ELISA kit (e.g., R & D Systems (Minneapolis, Minn.)). The standard protocols provided with the kits are used.

[1140] Effect on the expression of MHC Class II costimulatory and adhesion molecules. Three major families of cell surface antigens can be identified on monocytes: adhesion molecules, molecules involved in antigen presentation, and Fc receptor. Modulation of the expression of MHC class II antigens and other costimulatory molecules, such as B7 and ICAM-1, may result in changes in the antigen presenting capacity of monocytes and ability to induce T cell activation. Increased expression of Fc receptors may correlate with improved monocyte cytotoxic activity, cytokine release and phagocytosis.

[1141] FACS analysis is used to examine the surface antigens as follows. Monocytes are treated 1-5 days with increasing concentrations of agonists or antagonists of the invention or LPS (positive control), washed with PBS containing 1% BSA and 0.02 mM sodium azide, and then incubated with 1:20 dilution of appropriate FITC- or PE-labeled monoclonal antibodies for 30 minutes at 4 degrees C. After an additional wash, the labeled cells are analyzed by flow cytometry on a FACScan (Becton Dickinson).

[1142] Monocyte activation and/or increased survival. Assays for molecules that activate (or alternatively, inactivate) monocytes and/or increase monocyte survival (or alternatively, decrease monocyte survival) are known in the art and may routinely be applied to determine whether a molecule of the invention functions as an inhibitor or activator of monocytes. Agonists or antagonists of the invention can be screened using the three assays described below. For each of these assays, Peripheral blood mononuclear cells (PBMC) are purified from single donor leukopacks (American Red Cross, Baltimore, Md.) by centrifugation through a Histopaque gradient (Sigma). Monocytes are isolated from PBMC by counterflow centrifugal elutriation.

[1143] Monocyte Survival Assay. Human peripheral blood monocytes progressively lose viability when cultured in absence of serum or other stimuli. Their death results from internally regulated processes (apoptosis). Addition to the culture of activating factors, such as TNF-alpha dramatically improves cell survival and prevents DNA fragmentation. Propidium iodide (PI) staining is used to measure apoptosis as follows. Monocytes are cultured for 48 hours in polypropylene tubes in serum-free medium (positive control), in the presence of 100 ng/ml TNF-alpha (negative control), and in the presence of varying concentrations of the compound to be tested. Cells are suspended at a concentration of 2×10⁶/ml in PBS containing PI at a final concentration of 5 μg/ml, and then incubated at room temperature for 5 minutes before FACScan analysis. PI uptake has been demonstrated to correlate with DNA fragmentation in this experimental paradigm.

[1144] Effect on cytokine release. An important function of monocytes/macrophages is their regulatory activity on other cellular populations of the immune system through the release of cytokines after stimulation. An ELISA to measure cytokine release is performed as follows. Human monocytes are incubated at a density of 5×10⁵ cells/ml with increasing concentrations of agonists or antagonists of the invention and under the same conditions, but in the absence of agonists or antagonists. For IL-12 production, the cells are primed overnight with IFN (100 U/ml) in the presence of agonist or antagonist of the invention. LPS (10 ng/ml) is then added. Conditioned media are collected after 24h and kept frozen until use. Measurement of TNF-alpha, IL-10, MCP-1 and IL-8 is then performed using a commercially available ELISA kit (e.g., R & D Systems (Minneapolis, Minn.)) and applying the standard protocols provided with the kit.

[1145] Oxidative burst. Purified monocytes are plated in 96-w plate at 2-1×10⁵ cell/well. Increasing concentrations of agonists or antagonists of the invention are added to the wells in a total volume of 0.2 ml culture medium (RPMI 1640+10% FCS, glutamine and antibiotics). After 3 days incubation, the plates are centrifuged and the medium is removed from the wells. To the macrophage monolayers, 0.2 ml per well of phenol red solution (140 mM NaCl, 10 mM potassium phosphate buffer pH 7.0, 5.5 mM dextrose, 0.56 mM phenol red and 19 U/ml of HRPO) is added, together with the stimulant (200 nM PMA). The plates are incubated at 37° C. for 2 hours and the reaction is stopped by adding 20 μl 1N NaOH per well. The absorbance is read at 610 nm. To calculate the amount of H₂O₂ produced by the macrophages, a standard curve of a H₂O₂ solution of known molarity is performed for each experiment.

[1146] The studies described in this example tested activity of agonists or antagonists of the invention. However, one skilled in the art could easily modify the exemplified studies to test the activity of polynucleotides or polypeptides of the invention (e.g., gene therapy).

### Example 24

### Biological Effects of Agonists or Antagonists of the Invention

[1147] Astrocyte and Neuronal Assays

[1148] Agonists or antagonists of the invention, expressed in Escherichia coli and purified as described above, can be tested for activity in promoting the survival, neurite outgrowth, or phenotypic differentiation of cortical neuronal cells and for inducing the proliferation of glial fibrillary acidic protein immunopositive cells, astrocytes. The selection of cortical cells for the bioassay is based on the prevalent expression of FGF-1 and FGF-2 in cortical structures and on the previously reported enhancement of cortical neuronal survival resulting from FGF-2 treatment. A thymidine incorporation assay, for example, can be used to elucidate an agonist or antagonist of the invention's activity on these cells.

[1149] Moreover, previous reports describing the biological effects of FGF-2 (basic FGF) on cortical or hippocampal neurons in vitro have demonstrated increases in both neuron survival and neurite outgrowth (Walicke et al., “Fibroblast growth factor promotes survival of dissociated hippocampal neurons and enhances neurite extension.” Proc. Natl. Acad. Sci. USA 83:3012-3016. (1986), assay herein incorporated by reference in its entirety). However, reports from experiments done on PC-12 cells suggest that these two responses are not necessarily synonymous and may depend on not only which FGF is being tested but also on which receptor(s) are expressed on the target cells. Using the primary cortical neuronal culture paradigm, the ability of an agonist or antagonist of the invention to induce neurite outgrowth can be compared to the response achieved with FGF-2 using, for example, a thymidine incorporation assay.

[1150] Fibroblast and Endothelial Cell Assays

[1151] Human lung fibroblasts are obtained from Clonetics (San Diego, Calif.) and maintained in growth media from Clonetics. Dermal microvascular endothelial cells are obtained from Cell Applications (San Diego, Calif.). For proliferation assays, the human lung fibroblasts and dermal microvascular endothelial cells can be cultured at 5,000 cells/well in a 96-well plate for one day in growth medium. The cells are then incubated for one day in 0.1% BSA basal medium. After replacing the medium with fresh 0.1% BSA medium, the cells are incubated with the test proteins for 3 days. Alamar Blue (Alamar Biosciences, Sacramento, Calif.) is added to each well to a final concentration of 10%. The cells are incubated for 4 hr. Cell viability is measured by reading in a CytoFluor fluorescence reader. For the PGE₂ assays, the human lung fibroblasts are cultured at 5,000 cells/well in a 96-well plate for one day. After a medium change to 0.1% BSA basal medium, the cells are incubated with FGF-2 or agonists or antagonists of the invention with or without IL-1α for 24 hours. The supernatants are collected and assayed for PGE₂ by EIA kit (Cayman, Ann Arbor, Mich.). For the IL-6 assays, the human lung fibroblasts are cultured at 5,000 cells/well in a 96-well plate for one day. After a medium change to 0.1% BSA basal medium, the cells are incubated with FGF-2 or with or without agonists or antagonists of the invention IL-1α for 24 hours. The supernatants are collected and assayed for IL-6 by ELISA kit (Endogen, Cambridge, Mass.).

[1152] Human lung fibroblasts are cultured with FGF-2 or agonists or antagonists of the invention for 3 days in basal medium before the addition of Alamar Blue to assess effects on growth of the fibroblasts. FGF-2 should show a stimulation at 10-2500 ng/ml which can be used to compare stimulation with agonists or antagonists of the invention.

[1153] Parkinson Models.

[1154] The loss of motor function in Parkinson's disease is attributed to a deficiency of striatal dopamine resulting from the degeneration of the nigrostriatal dopaminergic projection neurons. An animal model for Parkinson's that has been extensively characterized involves the systemic administration of 1-methyl-4 phenyl 1,2,3,6-tetrahydropyridine (MPTP). In the CNS, MPTP is taken-up by astrocytes and catabolized by monoamine oxidase B to 1-methyl-4-phenyl pyridine (MPP⁺) and released. Subsequently, MPP⁺ is actively accumulated in dopaminergic neurons by the high-affinity reuptake transporter for dopamine. MPP⁺ is then concentrated in mitochondria by the electrochemical gradient and selectively inhibits nicotidamide adenine disphosphate: ubiquinone oxidoreductionase (complex I), thereby interfering with electron transport and eventually generating oxygen radicals.

[1155] It has been demonstrated in tissue culture paradigms that FGF-2 (basic FGF) has trophic activity towards nigral dopaminergic neurons (Ferrari et al., Dev. Biol. 1989). Recently, Dr. Unsicker's group has demonstrated that administering FGF-2 in gel foam implants in the striatum results in the near complete protection of nigral dopaminergic neurons from the toxicity associated with MPTP exposure (Otto and Unsicker, J. Neuroscience, 1990).

[1156] Based on the data with FGF-2, agonists or antagonists of the invention can be evaluated to determine whether it has an action similar to that of FGF-2 in enhancing dopaminergic neuronal survival in vitro and it can also be tested in vivo for protection of dopaminergic neurons in the striatum from the damage associated with MPTP treatment. The potential effect of an agonist or antagonist of the invention is first examined in vitro in a dopaminergic neuronal cell culture paradigm. The cultures are prepared by dissecting the midbrain floor plate from gestation day 14 Wistar rat embryos. The tissue is dissociated with trypsin and seeded at a density of 200,000 cells/cm² on polyorthinine-laminin coated glass coverslips. The cells are maintained in Dulbecco's Modified Eagle's medium and F12 medium containing hormonal supplements (N1). The cultures are fixed with paraformaldehyde after 8 days in vitro and are processed for tyrosine hydroxylase, a specific marker for dopaminergic neurons, immunohistochemical staining. Dissociated cell cultures are prepared from embryonic rats. The culture medium is changed every third day and the factors are also added at that time.

[1157] Since the dopaminergic neurons are isolated from animals at gestation day 14, a developmental time which is past the stage when the dopaminergic precursor cells are proliferating, an increase in the number of tyrosine hydroxylase immunopositive neurons would represent an increase in the number of dopaminergic neurons surviving in vitro. Therefore, if an agonist or antagonist of the invention acts to prolong the survival of dopaminergic neurons, it would suggest that the agonist or antagonist may be involved in Parkinson's Disease.

[1158] The studies described in this example tested activity of agonists or antagonists of the invention. However, one skilled in the art could easily modify the exemplified studies to test the activity of polynucleotides or polypeptides of the invention (e.g., gene therapy).

### Example 25

### The Effect of Agonists or Antagonists of the Invention on the Growth of Vascular Endothelial Cells

[1159] On day 1, human umbilical vein endothelial cells (HUVEC) are seeded at 2-5×10⁴ cells/35 mm dish density in M199 medium containing 4% fetal bovine serum (FBS), 16 units/ml heparin, and 50 units/ml endothelial cell growth supplements (ECGS, Biotechnique, Inc.). On day 2, the medium is replaced with M199 containing 10% FBS, 8 units/ml heparin. An agonist or antagonist of the invention, and positive controls, such as VEGF and basic FGF (bFGF) are added, at varying concentrations. On days 4 and 6, the medium is replaced. On day 8, cell number is determined with a Coulter Counter.

[1160] An increase in the number of HUVEC cells indicates that the compound of the invention may proliferate vascular endothelial cells, while a decrease in the number of HUVEC cells indicates that the compound of the invention inhibits vascular endothelial cells.

[1161] The studies described in this example tested activity of a polypeptide of the invention. However, one skilled in the art could easily modify the exemplified studies to test the activity of polynucleotides (e.g., gene therapy), agonists, and/or antagonists of the invention.

### Example 26

### Rat Corneal Wound Healing Model

[1162] This animal model shows the effect of an agonist or antagonist of the invention on neovascularization. The experimental protocol includes:

[1163] Making a 1-1.5 mm long incision from the center of cornea into the stromal layer. Inserting a spatula below the lip of the incision facing the outer corner of the eye. Making a pocket (its base is 1-1.5 mm form the edge of the eye). Positioning a pellet, containing 50 ng-5 ug of an agonist or antagonist of the invention, within the pocket.

[1164] Treatment with an agonist or antagonist of the invention can also be applied topically to the corneal wounds in a dosage range of 20mg -500mg (daily treatment for five days).

[1165] The studies described in this example tested activity of agonists or antagonists of the invention. However, one skilled in the art could easily modify the exemplified studies to test the activity of polynucleotides or polypeptides of the invention (e.g., gene therapy).

### Example 27

### Diabetic Mouse and Glucocorticoid-Impaired Wound Healing Models

[1166] Diabetic db+/db+ Mouse Model

[1167] To demonstrate that an agonist or antagonist of the invention accelerates the healing process, the genetically diabetic mouse model of wound healing is used. The full thickness wound healing model in the db+/db+ mouse is a well characterized, clinically relevant and reproducible model of impaired wound healing. Healing of the diabetic wound is dependent on formation of granulation tissue and re-epithelialization rather than contraction (Gartner, M. H. et al., J. Surg. Res. 52:389 (1992); Greenhalgh, D.G. et al., Am. J Pathol. 136:1235 (1990)).

[1168] The diabetic animals have many of the characteristic features observed in Type II diabetes mellitus. Homozygous (db+/db+) mice are obese in comparison to their normal heterozygous (db+/+m) littermates. Mutant diabetic (db+/db+) mice have a single autosomal recessive mutation on chromosome 4 (db+) (Coleman et al. Proc. Natl. Acad. Sci. USA 77:283-293 (1982)). Animals show polyphagia, polydipsia and polyuria. Mutant diabetic mice (db+/db+) have elevated blood glucose, increased or normal insulin levels, and suppressed cell-mediated immunity (Mandel et al., J. Immunol. 120:1375 (1978); Debray-Sachs, M. et al., Clin. Exp. Immunol. 51(1):1-7 (1983); Leiter et al., Am. J. of Pathol. 114:46-55 (1985)). Peripheral neuropathy, myocardial complications, and microvascular lesions, basement membrane thickening and glomerular filtration abnormalities have been described in these animals (Norido, F. et al., Exp. Neurol. 83(2):221-232 (1984); Robertson et al., Diabetes 29(1):60-67 (1980); Giacomelli et al., Lab Invest. 40(4):460-473 (1979); Coleman, D. L., Diabetes 31 (Suppl):1-6 (1982)). These homozygous diabetic mice develop hyperglycemia that is resistant to insulin analogous to human type II diabetes (Mandel et at., J. Immunol. 120:1375-1377 (1978)).

[1169] The characteristics observed in these animals suggests that healing in this model may be similar to the healing observed in human diabetes (Greenhalgh, et al., Am. J. of Pathol. 136:1235-1246 (1990)).

[1170] Genetically diabetic female C57BL/KsJ (db+/db+) mice and their non-diabetic (db+/+m) heterozygous littermates are used in this study (Jackson Laboratories). The animals are purchased at 6 weeks of age and are 8 weeks old at the beginning of the study. Animals are individually housed and received food and water ad libitum. All manipulations are performed using aseptic techniques. The experiments are conducted according to the rules and guidelines of Human Genome Sciences, Inc. Institutional Animal Care and Use Committee and the Guidelines for the Care and Use of Laboratory Animals.

[1171] Wounding protocol is performed according to previously reported methods (Tsuboi, R. and Rifkin, D. B., J. Exp. Med. 172:245-251 (1990)). Briefly, on the day of wounding, animals are anesthetized with an intraperitoneal injection of Avertin (0.01 mg/mL), 2,2,2-tribromoethanol and 2-methyl-2-butanol dissolved in deionized water. The dorsal region of the animal is shaved and the skin washed with 70% ethanol solution and iodine. The surgical area is dried with sterile gauze prior to wounding. An 8 mm full-thickness wound is then created using a Keyes tissue punch. Immediately following wounding, the surrounding skin is gently stretched to eliminate wound expansion. The wounds are left open for the duration of the experiment. Application of the treatment is given topically for 5 consecutive days commencing on the day of wounding. Prior to treatment, wounds are gently cleansed with sterile saline and gauze sponges.

[1172] Wounds are visually examined and photographed at a fixed distance at the day of surgery and at two day intervals thereafter. Wound closure is determined by daily measurement on days 1-5 and on day 8. Wounds are measured horizontally and vertically using a calibrated Jameson caliper. Wounds are considered healed if granulation tissue is no longer visible and the wound is covered by a continuous epithelium.

[1173] An agonist or antagonist of the invention is administered using at a range different doses, from 4 mg to 500 mg per wound per day for 8 days in vehicle. Vehicle control groups received 50 mL of vehicle solution.

[1174] Animals are euthanized on day 8 with an intraperitoneal injection of sodium pentobarbital (300 mg/kg). The wounds and surrounding skin are then harvested for histology and immunohistochemistry. Tissue specimens are placed in 10% neutral buffered formalin in tissue cassettes between biopsy sponges for further processing.

[1175] Three groups of 10 animals each (5 diabetic and 5 non-diabetic controls) are evaluated: 1) Vehicle placebo control, 2) untreated group, and 3) treated group.

[1176] Wound closure is analyzed by measuring the area in the vertical and horizontal axis and obtaining the total square area of the wound. Contraction is then estimated by establishing the differences between the initial wound area (day 0) and that of post treatment (day 8). The wound area on day 1 is 64 mm², the corresponding size of the dermal punch. Calculations are made using the following formula:

[Open area on day 8]−[Open area on day 1]/ [Open area on day 1]

[1177] Specimens are fixed in 10% buffered formalin and paraffin embedded blocks are sectioned perpendicular to the wound surface (5 mm) and cut using a Reichert-Jung microtome. Routine hematoxylin-eosin (H&E) staining is performed on cross-sections it of bisected wounds. Histologic examination of the wounds are used to assess whether the healing process and the morphologic appearance of the repaired skin is altered by treatment with an agonist or antagonist of the invention. This assessment included verification of the presence of cell accumulation, inflammatory cells, capillaries, fibroblasts, re-epithelialization and epidermal maturity (Greenhalgh, D. G. et al., Am. J. Pathol. 136:1235 (1990)). A calibrated lens micrometer is used by a blinded observer.

[1178] Tissue sections are also stained immunohistochemically with a polyclonal rabbit anti-human keratin antibody using ABC Elite detection system. Human skin is used as a positive tissue control while non-immune IgG is used as a negative control. Keratinocyte growth is determined by evaluating the extent of reepithelialization of the wound using a calibrated lens micrometer.

[1179] Proliferating cell nuclear antigen/cyclin (PCNA) in skin specimens is demonstrated by using anti-PCNA antibody (1:50) with an ABC Elite detection system. Human colon cancer served as a positive tissue control and human brain tissue is used as a negative tissue control. Each specimen included a section with omission of the primary antibody and substitution with non-immune mouse IgG. Ranking of these sections is based on the extent of proliferation on a scale of 0-8, the lower side of the scale reflecting slight proliferation to the higher side reflecting intense proliferation.

[1180] Experimental data are analyzed using an unpaired t test. A p value of <0.05 is considered significant.

[1181] Steroid Impaired Rat Model

[1182] The inhibition of wound healing by steroids has been well documented in various in vitro and in vivo systems (Wahl, Glucocorticoids and Wound healing. In: Anti-Inflammatory Steroid Action: Basic and Clinical Aspects. 280-302 (1989); Wahlet al., J. Immunol. 115: 476-481 (1975); Werb et al., J. Exp. Med. 147:1684-1694 (1978)). Glucocorticoids retard wound healing by inhibiting angiogenesis, decreasing vascular permeability (Ebert et al., An. Intern. Med. 37:701-705 (1952)), fibroblast proliferation, and collagen synthesis (Beck et al., Growth Factors. 5: 295-304 (1991); Haynes et al., J. Clin. Invest. 61: 703-797-(1978)) and producing a transient reduction of circulating monocytes (Haynes et al., J. Clin. Invest. 61: 703-797 (1978); Wahl, “Glucocorticoids and wound healing”, In: Antiinflammatory Steroid Action: Basic and Clinical Aspects, Academic Press, New York, pp. 280-302 (1989)). The systemic administration of steroids to impaired wound healing is a well establish phenomenon in rats (Beck et al., Growth Factors. 5: 295-304 (1991); Haynes et al., J. Clin. Invest. 61: 703-797 (1978); Wahl, “Glucocorticoids and wound healing”, In: Antiinflammatory Steroid Action: Basic and Clinical Aspects, Academic Press, New York, pp. 280-302 (1989); Pierce et al., Proc. Natl. Acad. Sci. USA 86: 2229-2233 (1989)).

[1183] To demonstrate that an agonist or antagonist of the invention can accelerate the healing process, the effects of multiple topical applications of the agonist or antagonist on full thickness excisional skin wounds in rats in which healing has been impaired by the systemic administration of methylprednisolone is assessed.

[1184] Young adult male Sprague Dawley rats weighing 250-300 g (Charles River Laboratories) are used in this example. The animals are purchased at 8 weeks of age and are 9 weeks old at the beginning of the study. The healing response of rats is impaired by the systemic administration of methylprednisolone (17 mg/kg/rat intramuscularly) at the time of wounding. Animals are individually housed and received food and water ad libitum. All manipulations are performed using aseptic techniques. This study is conducted according to the rules and guidelines of Human Genome Sciences, Inc. Institutional Animal Care and Use Committee and the Guidelines for the Care and Use of Laboratory Animals.

[1185] The wounding protocol is followed according to section A, above. On the day of wounding, animals are anesthetized with an intramuscular injection of ketamine (50 mg/kg) and xylazine (5 mg/kg). The dorsal region of the animal is shaved and the skin washed with 70% ethanol and iodine solutions. The surgical area is dried with sterile gauze prior to wounding. An 8 mm full-thickness wound is created using a Keyes tissue punch. The wounds are left open for the duration of the experiment. Applications of the testing materials are given topically once a day for 7 consecutive days commencing on the day of wounding and subsequent to methylprednisolone administration. Prior to treatment, wounds are gently cleansed with sterile saline and gauze sponges.

[1186] Wounds are visually examined and photographed at a fixed distance at the day of wounding and at the end of treatment. Wound closure is determined by daily measurement on days 1-5 and on day 8. Wounds are measured horizontally and vertically using a calibrated Jameson caliper. Wounds are considered healed if granulation tissue is no longer visible and the wound is covered by a continuous epithelium.

[1187] The agonist or antagonist of the invention is administered using at a range different doses, from 4 mg to 500 mag per wound per day for 8 days in vehicle. Vehicle control groups received 50 mL of vehicle solution.

[1188] Animals are euthanized on day 8 with an intraperitoneal injection of sodium pentobarbital (300 mg/kg). The wounds and surrounding skin are then harvested for histology. Tissue specimens are placed in 10% neutral buffered formalin in tissue cassettes between biopsy sponges for further processing.

[1189] Three groups of 10 animals each (5 with methylprednisolone and 5 without glucocorticoid) are evaluated: 1) Untreated group 2) Vehicle placebo control 3) treated groups.

[1190] Wound closure is analyzed by measuring the area in the vertical and horizontal axis and obtaining the total area of the wound. Closure is then estimated by establishing the differences between the initial wound area (day 0) and that of post treatment (day 8). The wound area on day 1 is 64 mm², the corresponding size of the dermal punch. Calculations are made using the following formula:

[Open area on day 8]−[Open area on day 1]/ [Open area on day 1]

[1191] Specimens are fixed in 10% buffered formalin and paraffin embedded blocks are sectioned perpendicular to the wound surface (5 mm) and cut using an Olympus microtome. Routine hematoxylin-eosin (H&E) staining is performed on cross-sections of bisected wounds. Histologic examination of the wounds allows assessment of whether the healing process and the morphologic appearance of the repaired skin is improved by treatment with an agonist or antagonist of the invention. A calibrated lens micrometer is used by a blinded observer to determine the distance of the wound gap.

[1192] Experimental data are analyzed using an unpaired t test. A p value of <0.05 is considered significant.

[1193] The studies described in this example tested activity of agonists or antagonists of the invention. However, one skilled in the art could easily modify the exemplified studies to test the activity of polynucleotides or polypeptides of the invention (e.g., gene therapy).

### Example 28

### Lymphadema Animal Model

[1194] The purpose of this experimental approach is to create an appropriate and consistent lymphedema model for testing the therapeutic effects of an agonist or antagonist of the invention in lymphangiogenesis and re-establishment of the lymphatic circulatory system in the rat hind limb. Effectiveness is measured by swelling volume of the affected limb, quantification of the amount of lymphatic vasculature, total blood plasma protein, and histopathology. Acute lymphedema is observed for 7-10 days. Perhaps more importantly, the chronic progress of the edema is followed for up to 3-4 weeks.

[1195] Prior to beginning surgery, blood sample is drawn for protein concentration analysis. Male rats weighing approximately ˜350g are dosed with Pentobarbital. Subsequently, the right legs are shaved from knee to hip. The shaved area is swabbed with gauze soaked in 70% EtOH. Blood is drawn for serum total protein testing. Circumference and volumetric measurements are made prior to injecting dye into paws after marking 2 measurement levels (0.5 cm above heel, at mid-pt of dorsal paw). The intradermal dorsum of both right and left paws are injected with 0.05 ml of 1% Evan's Blue. Circumference and volumetric measurements are then made following injection of dye into paws.

[1196] Using the knee joint as a landmark, a mid-leg inguinal incision is made circumferentially allowing the femoral vessels to be located. Forceps and hemostats are used to dissect and separate the skin flaps. After locating the femoral vessels, the lymphatic vessel that runs along side and underneath the vessel(s) is located. The main lymphatic vessels in this area are then electrically coagulated or suture ligated.

[1197] Using a microscope, muscles in back of the leg (near the semitendinosis and adductors) are bluntly dissected. The popliteal lymph node is then located. The 2 proximal and 2 distal lymphatic vessels and distal blood supply of the popliteal node are then ligated by suturing. The popliteal lymph node, and any accompanying adipose tissue, is then removed by cutting connective tissues.

[1198] Care is taken to control any mild bleeding resulting from this procedure. After lymphatics are occluded, the skin flaps are sealed by using liquid skin (Vetbond) (AJ Buck). The separated skin edges are sealed to the underlying muscle tissue while leaving a gap of ˜0.5 cm around the leg. Skin also may be anchored by suturing to underlying muscle when necessary.

[1199] To avoid infection, animals are housed individually with mesh (no bedding). Recovering animals are checked daily through the optimal edematous peak, which typically occurred by day 5-7. The plateau edematous peak are then observed. To evaluate the intensity of the lymphedema, the circumference and volumes of 2 designated places on each paw before operation and daily for 7 days are measured. The effect of plasma proteins on lymphedema is determined and whether protein analysis is a useful testing perimeter is also investigated. The weights of both control and edematous limbs are evaluated at 2 places. Analysis is performed in a blind manner.

[1200] Circumference Measurements: Under brief gas anesthetic to prevent limb movement, a cloth tape is used to measure limb circumference. Measurements are done at the ankle bone and dorsal paw by 2 different people and those 2 readings are averaged. Readings are taken from both control and edematous limbs.

[1201] Volumetric Measurements: On the day of surgery, animals are anesthetized with Pentobarbital and are tested prior to surgery. For daily volumetrics animals are under brief halothane anesthetic (rapid immobilization and quick recovery), and both legs are shaved and equally marked using waterproof marker on legs. Legs are first dipped in water, then dipped into instrument to each marked level, then measured by Buxco edema software(Chen/Victor). Data is recorded by one person, while the other is dipping the limb to marked area.

[1202] Blood-plasma protein measurements: Blood is drawn, spun, and serum separated prior to surgery and then at conclusion for total protein and Ca2⁺ comparison.

[1203] Limb Weight Comparison: After drawing blood, the animal is prepared for tissue collection. The limbs are amputated using a quillitine, then both experimental and control legs are cut at the ligature and weighed. A second weighing is done as the tibio-cacaneal joint is disarticulated and the foot is weighed.

[1204] Histological Preparations: The transverse muscle located behind the knee (popliteal) area is dissected and arranged in a metal mold, filled with freezeGel, dipped into cold methylbutane, placed into labeled sample bags at −80EC until sectioning. Upon sectioning, the muscle is observed under fluorescent microscopy for lymphatics.

[1205] The studies described in this example tested activity of agonists or antagonists of the invention. However, one skilled in the art could easily modify the exemplified studies to test the activity of polynucleotides or polypeptides of the invention (e.g., gene therapy).

### Example 29

### Suppression of TNF Alpha-induced Adhesion Molecule Expression by a Agonist or Antagonist of the Invention

[1206] The recruitment of lymphocytes to areas of inflammation and angiogenesis involves specific receptor-ligand interactions between cell surface adhesion molecules (CAMs) on lymphocytes and the vascular endothelium. The adhesion process, in both normal and pathological settings, follows a multi-step cascade that involves intercellular adhesion molecule-1 (ICAM-1), vascular cell adhesion molecule-1 (VCAM-1), and endothelial leukocyte adhesion molecule-1 (E-selectin) expression on endothelial cells (EC). The expression of these molecules and others on the vascular endothelium determines the efficiency with which leukocytes may adhere to the local vasculature and extravasate into the local tissue during the development of an inflammatory response. The local concentration of cytokines and growth factor participate in the modulation of the expression of these CAMs.

[1207] Tumor necrosis factor alpha (TNF-a), a potent proinflammatory cytokine, is a stimulator of all three CAMs on endothelial cells and may be involved in a wide variety of inflammatory responses, often resulting in a pathological outcome.

[1208] The potential of an agonist or antagonist of the invention to mediate a suppression of TNF-a induced CAM expression can be examined. A modified ELISA assay which uses ECs as a solid phase absorbent is employed to measure the amount of CAM expression on TNF-a treated ECs when co-stimulated with a member of the FGF family of proteins.

[1209] To perform the experiment, human umbilical vein endothelial cell (HUVEC) cultures are obtained from pooled cord harvests and maintained in growth medium (EGM-2; Clonetics, San Diego, Calif.) supplemented with 10% FCS and 1% penicillin/streptomycin in a 37 degree C. humidified incubator-containing 5% CO₂. HUVECs are seeded in 96-well plates at concentrations of 1×10⁴ cells/well in EGM medium at 37 degree C. for 18-24 hrs or until confluent. The monolayers are subsequently washed 3 times with a serum-free solution of RPMI-1640 supplemented with 100 U/ml penicillin and 100 mg/ml streptomycin, and treated with a given cytokine and/or growth factor(s) for 24 h at 37 degree C. Following incubation, the cells are then evaluated for CAM expression.

[1210] Human Umbilical Vein Endothelial cells (HUVECs) are grown in a standard 96 well plate to confluence. Growth medium is removed from the cells and replaced with 90 ul of 199 Medium (10% FBS). Samples for testing and positive or negative controls are added to the plate in triplicate (in 10 ul volumes). Plates are incubated at 37 degree C. for either 5 h (selectin and integrin expression) or 24 h (integrin expression only). Plates are aspirated to remove medium and 100 μl of 0.1% paraformaldehyde-PBS(with Ca++ and Mg++) is added to each well. Plates are held at 4° C. for 30 min.

[1211] Fixative is then removed from the wells and wells are washed 1× with PBS(+Ca,Mg)+0.5% BSA and drained. Do not allow the wells to dry. Add 10 μl of diluted primary antibody to the test and control wells. Anti-ICAM-1-Biotin, Anti-VCAM-1-Biotin and Anti-E-selectin-Biotin are used at a concentration of 10 μg/ml (1:10 dilution of 0.1 mg/ml stock antibody). Cells are incubated at 37° C. for 30 min. in a humidified environment. Wells are washed X3 with PBS(+Ca,Mg)+0.5% BSA.

[1212] Then add 20 μl of diluted ExtrAvidin-Alkaline Phosphotase (1:5,000 dilution) to each well and incubated at 37° C. for 30 min. Wells are washed X3 with PBS(+Ca,Mg)+0.5% BSA. 1 tablet of p-Nitrophenol Phosphate pNPP is dissolved in 5 ml of glycine buffer (pH 10.4). 100 μl of pNPP substrate in glycine buffer is added to each test well. Standard wells in triplicate are prepared from the working dilution of the ExtrAvidin-Alkaline Phosphotase in glycine buffer: 1:5,000 (10⁰)>10^{-0.5}>10⁻¹>10^{-1.5}. 5 μl of each dilution is added to triplicate wells and the resulting AP content in each well is 5.50 ng, 1.74 ng, 0.55 ng, 0.18 ng. 100 μof pNNP reagent must then be added to each of the standard wells. The plate must be incubated at 37° C. for 4h. A volume of 50 μl of 3M NaOH is added to all wells. The results are quantified on a plate reader at 405 nm. The background subtraction option is used on blank wells filled with glycine buffer only. The template is set up to indicate the concentration of AP-conjugate in each standard well [5.50 ng; 1.74 ng; 0.55 ng; 0.18 ng]. Results are indicated as amount of bound AP-conjugate in each sample.

[1213] The studies described in this example tested activity of agonists or antagonists of the invention. However, one skilled in the art could easily modify the exemplified studies to test the activity of polynucleotides or polypeptides of the invention (e.g., gene therapy).

### Example 30

### Production Of Polypeptide of the Invention For High-Throughput Screening Assays

[1214] The following protocol produces a supernatant containing polypeptide of the present invention to be tested. This supernatant can then be used in the Screening Assays described in Examples 32-41.

[1215] First, dilute Poly-D-Lysine (644 587 Boehringer-Mannheim) stock solution (1 mg/ml in PBS) 1:20 in PBS (w/o calcium or magnesium 17-516F Biowhittaker) for a working solution of 50 ug/ml. Add 200 ul of this solution to each well (24 well plates) and incubate at RT for 20 minutes. Be sure to distribute the solution over each well (note: a 12-channel pipetter may be used with tips on every other channel). Aspirate off the Poly-D-Lysine solution and rinse with 1 ml PBS (Phosphate Buffered Saline). The PBS should remain in the well until just prior to plating the cells and plates may be poly-lysine coated in advance for up to two weeks.

[1216] Plate 293T cells (do not carry cells past P+20) at 2×10⁵ cells/well in 0.5 ml DMEM(Dulbecco's Modified Eagle Medium)(with 4.5 G/L glucose and L-glutamine (12-604F Biowhittaker))/10% heat inactivated FBS(14-503F Biowhittaker)/1×Penstrep(17-602E Biowhittaker). Let the cells grow overnight.

[1217] The next day, mix together in a sterile solution basin: 300 ul Lipofectamine (18324-012 Gibco/BRL) and 5 ml Optimem I (31985070 Gibco/BRL)/96-well plate. With a small volume multi-channel pipetter, aliquot approximately 2 ug of an expression vector containing a polynucleotide insert, produced by the methods described in Examples 8-10, into an appropriately labeled 96-well round bottom plate. With a multi-channel pipetter, add 50 ul of the Lipofectamine/Optimem I mixture to each well. Pipette up and down gently to mix. Incubate at RT 15-45 minutes. After about 20 minutes, use a multi-channel pipetter to add 150 ul Optimem I to each well. As a control, one plate of vector DNA lacking an insert should be transfected with each set of transfections.

[1218] Preferably, the transfection should be performed by tag-teaming the following tasks. By tag-teaming, hands on time is cut in half, and the cells do not spend too much time on PBS. First, person A aspirates off the media from four 24-well plates of cells, and then person B rinses each well with 0.5-lml PBS. Person A then aspirates off PBS rinse, and person B, using a 12-channel pipetter with tips on every other channel, adds the 200 ul of DNA/Lipofectamine/Optimem I complex to the odd wells first, then to the even wells, to each row on the 24-well plates. Incubate at 37 degree C. for 6 hours.

[1219] While cells are incubating, prepare appropriate media, either 1%BSA in DMEM with 1×penstrep, or HGS CHO-5 media (116.6 mg/L of CaC12 (anhyd); 0.00130 mg/L CuSO₄-5H₂O; 0.050 mg/L of Fe(NO₃)₃-9H₂O; 0.417 mg/L of FeSO₄-7H₂O; 311.80 mg/L of Kcl; 28.64 mg/L of MgCl₂; 48.84 mg/L of MgSO₄; 6995.50 mg/L of NaCl; 2400.0 mg/L of NaHCO₃; 62.50 mg/L of NaH₂PO₄-H₂O; 71.02 mg/L of Na₂HPO4; 0.4320 mg/L of ZnSO₄-7H₂O; 0.002 mg/L of Arachidonic Acid ; 1.022 mg/L of Cholesterol; 0.070 mg/L of DL-alpha-Tocopherol-Acetate; 0.0520 mg/L of Linoleic Acid; 0.010 mg/L of Linolenic Acid; 0.010 mg/L of Myristic Acid; 0.010 mg/L of Oleic Acid; 0.010 mg/L of Palmitric Acid; 0.010 mg/L of Palmitic Acid; 100 mg/L of Pluronic F-68; 0.010 mg/L of Stearic Acid; 2.20 mg/L of Tween 80; 4551 mg/L of D-Glucose; 130.85 mg/ml of L-Alanine; 147.50 mg/ml of L-Arginine-HCL; 7.50 mg/ml of L-Asparagine-H₂O; 6.65 mg/mi of L-Aspartic Acid; 29.56 mg/ml of L-Cystine-2HCL-H₂O; 31.29 mg/ml of L-Cystine-2HCL; 7.35 mg/ml of L-Glutamic Acid; 365.0 mg/ml of L-Glutamine; 18.75 mg/ml of Glycine; 52.48 mg/ml of L-Histidine-HCL-H₂O; 106.97 mg/ml of L-Isoleucine; 111.45 mg/ml of L-Leucine; 163.75 mg/ml of L-Lysine HCL; 32.34 mg/ml of L-Methionine; 68.48 mg/ml of L-Phenylalainine; 40.0 mg/ml of L-Proline; 26.25 mg/ml of L-Serine; 101.05 mg/ml of L-Threonine; 19.22 mg/ml of L-Tryptophan; 91.79 mg/ml of L-Tryrosine-2Na-2H₂O; and 99.65 mg/ml of L-Valine; 0.0035 mg/L of Biotin; 3.24 mg/L of D-Ca Pantothenate; 11.78 mg/L of Choline Chloride; 4.65 mg/L of Folic Acid; 15.60 mg/L of i-Inositol; 3.02 mg/L of Niacinamide; 3.00 mg/L of Pyridoxal HCL; 0.031 mg/L of Pyridoxine HCL; 0.319 mg/L of Riboflavin; 3.17 mg/L of Thiamine HCL; 0.365 mg/L of Thymidine; 0.680 mg/L of Vitamin B₁₂; 25 mM of HEPES Buffer; 2.39 mg/L of Na Hypoxanthine; 0.105 mg/L of Lipoic Acid; 0.081 mg/L of Sodium Putrescine-2HCL; 55.0 mg/L of Sodium Pyruvate; 0.0067 mg/L of Sodium Selenite; 20 uM of Ethanolamine; 0.122 mg/L of Ferric Citrate; 41.70 mg/L of Methyl-B-Cyclodextrin complexed with Linoleic Acid; 33.33 mg/L of Methyl-B-Cyclodextrin complexed with Oleic Acid; 10 mg/L of Methyl-B-Cyclodextrin complexed with Retinal Acetate. Adjust osmolarity to 327 mOsm) with 2 mm glutamine and 1×penstrep. (BSA (81-068-3 Bayer) 100 gm dissolved in 1L DMEM for a 10% BSA stock solution). Filter the media and collect 50 ul for endotoxin assay in 15 ml polystyrene conical.

[1220] The transfection reaction is terminated, preferably by tag-teaming, at the end of the incubation period. Person A aspirates off the transfection media, while person B adds 1.5 ml appropriate media to each well. Incubate at 37 degree C. for 45 or 72 hours depending on the media used: 1%BSA for 45 hours or CHO-5 for 72 hours.

[1221] On day four, using a 300 ul multichannel pipetter, aliquot 600 ul in one 1 ml deep well plate and the remaining supernatant into a 2 ml deep well. The supernatants from each well can then be used in the assays described in Examples 32-39.

[1222] It is specifically understood that when activity is obtained in any of the assays described below using a supernatant, the activity originates from either the polypeptide of the present invention directly (e.g., as a secreted protein) or by polypeptide of the present invention inducing expression of other proteins, which are then secreted into the supernatant. Thus, the invention further provides a method of identifying the protein in the supernatant characterized by an activity in a particular assay.

### Example 31

### Construction of GAS Reporter Construct

[1223] One signal transduction pathway involved in the differentiation and proliferation of cells is called the Jaks-STATs pathway. Activated proteins in the Jaks-STATs pathway bind to gamma activation site “GAS” elements or interferon- sensitive responsive element (“ISRE”), located in the promoter of many genes. The binding of a protein to these elements alter the expression of the associated gene.

[1224] GAS and ISRE elements are recognized by a class of transcription factors called Signal Transducers and Activators of Transcription, or “STATs.” There are six members of the STATs family. Stat1 and Stat3 are present in many cell types, as is Stat2 (as response to IFN-alpha is widespread). Stat4 is more restricted and is not in many cell types though it has been found in T helper class I, cells after treatment with IL-12. Stat5 was originally called mammary growth factor, but has been found at higher concentrations in other cells including myeloid cells. It can be activated in tissue culture cells by many cytokines.

[1225] The STATs are activated to translocate from the cytoplasm to the nucleus upon tyrosine phosphorylation by a set of kinases known as the Janus Kinase (“Jaks”) family. Jaks represent a distinct family of soluble tyrosine kinases and include Tyk2, Jak1, Jak2, and Jak3. These kinases display significant sequence similarity and are generally catalytically inactive in resting cells.

[1226] The Jaks are activated by a wide range of receptors summarized in the Table below. (Adapted from review by Schidler and Damell, Ann. Rev. Biochem. 64:621-51 (1995).) A cytokine receptor family, capable of activating Jaks, is divided into two groups: (a) Class 1 includes receptors for IL-2, IL-3, IL-4, IL-6, IL-7, IL-9, IL-11, IL-12, IL-15, Epo, PRL, GH, G-CSF, GM-CSF, LIF, CNTF, and thrombopoietin; and (b) Class 2 includes IFN-a, IFN-g, and IL-10. The Class 1 receptors share a conserved cysteine motif (a set of four conserved cysteines and one tryptophan) and a WSXWS motif (a membrane proximal region encoding Trp-Ser-Xaa-Trp-Ser (SEQ ID NO:2)).

[1227] Thus, on binding of a ligand to a receptor, Jaks are activated, which in turn activate STATs, which then translocate and bind to GAS elements. This entire process is encompassed in the Jaks-STATs signal transduction pathway.

[1228] Therefore, activation of the Jaks-STATs pathway, reflected by the binding of the GAS or the ISRE element, can be used to indicate proteins involved in the proliferation and differentiation of cells. For example, growth factors and cytokines are known to activate the Jaks-STATs pathway. (See Table below.) Thus, by using GAS elements linked to reporter molecules, activators of the Jaks-STATs pathway can be identified.

| JAKs | STATS | GAS(elements) or ISRE | | |
|---|---|---|---|---|
| Ligand | tyk2 | Jak1 | Jak2 | Jak3 |

IFN family

| | | | | | | |
|---|---|---|---|---|---|---|
| IFN-a/B | + | + | − | − | 1,2,3 | ISRE |
| IFN-g | | + | + | − | 1 | GAS (IRF1 > Lys6 > IFP) |
| I1-10 | + | ? | ? | − | 1,3 | |
| gp13O family | | | | | | |
| IL-6 (Pleiotropic)+ | + | + | ? | 1,3 | | GAS (IRF1 > Lys6 > IFP) |
| I1-1 1(Pleiotropic)? | + | ? | ? | 1,3 | | |
| OnM(Pleiotropic)? | + | + | ? | 1,3 | | |
| LIF(Pleiotropic) ? | + | + | ? | 1,3 | | |
| CNTF(Pleiotropic) | −/+ | + | + | ? | 1,3 | |
| G-CSF(Pleiotropic) | ? | + | ? | ? | 1,3 | |
| IL-12(Pleiotropic) | + | − | + | + | 1,3 | |
| g-C family | | | | | | |
| IL-2 (lymphocytes) | − | + | − | + | 1,3,5 | GAS |
| IL-4 (lymph/myeloid) | − | + | − | + | 6 | GAS (IRF1 = IFP >> Ly6)(IgH) |
| IL-7 (lymphocytes) | − | + | − | + | 5 | GAS |
| IL-9 (lymphocytes) | − | + | − | + | 5 | GAS |
| IL-13 (lymphocyte) | − | + | ? | ? | 6 | GAS |
| IL-15 | ? | + | ? | + | 5 | GAS |
| gp14O family | | | | | | |
| IL-3 (myeloid) | − | − | + | − | 5 | GAS (IRF1 > IFP >> Ly6) |
| IL-5 (myeloid) | − | − | + | − | 5 | GAS |
| GM-CSF (myeloid) | − | − | + | − | 5 | GAS |
| Growth hormone family | | | | | | |
| GH | ? | − | + | − | 5 | |
| PRL | ? | +/− | + | − | 1,3,5 | |
| EPO | ? | − | + | − | 5 | GAS(B − CAS > IRF1 = IFP >> Ly6) |
| Receptor Tyrosine Kinases | | | | | | |
| EGF | ? | + | + | − | 1,3 | GAS(IRF1) |
| PDGF | ? | + | + | − | 1,3 | |
| CSF-1 | ? | + | + | − | 1,3 | GAS (not IRF1) |

[1229] To construct a synthetic GAS containing promoter element, which is used in the Biological Assays described in Examples 32-33, a PCR based strategy is employed to generate a GAS-SV40 promoter sequence. The 5′ primer contains four tandem copies of the GAS binding site found in the IRFI promoter and previously demonstrated to bind STATs upon induction with a range of cytokines (Rothman et al., Immunity 1:457-468 (1994).), although other GAS or ISRE elements can be used instead. The 5′ primer also contains 18bp of sequence complementary to the SV40 early promoter sequence and is flanked with an XhoI site. The sequence of the 5′ primer is:

| | |
|---|---|
| 5′:GCGCCTCGAGATTTCCCCGAAATCTAGATTTCCCCGAAATGATTTCCCC | (SEQ ID NO: 3) |
| GAAATGATTTCCCCGAAATATCTGCCATCTCAATTAG:3′ | |

[1230] The downstream primer is complementary to the SV40 promoter and is flanked with a Hind III site: 5′:GCGGCAAGCTTTTTGCAAAGCCTAGGC:3′ (SEQ ID NO: 4)

[1231] PCR amplification is performed using the SV40 promoter template present in the B-gal:promoter plasmid obtained from Clontech. The resulting PCR fragment is digested with XhoI/Hind III and subcloned into BLSK2-. (Stratagene.) Sequencing with forward and reverse primers confirms that the insert contains the following sequence:

| | |
|---|---|
| 5′:CTCGAGATTTCCCCGAAATCTAGATTTCCCCGAAATGATTTCCCCGAAA | (SEQ ID NO:5) |
| TGATTTCCCCGAAATATCTGCCATCTCAATTAGTCAGCAACCATAGTCCCG | |
| CCCCTAACTCCGCCCATCCCGCCCCTAACTCCGCCCAGTTCCGCCCATTCT | |
| CCGCCCCATGGCTGACTAATTTTTTTTATTTATGCAGAGGCCGAGGCCGCC | |
| TCGGCCTCTGAGCTATTCCAGAAGTAGTGAGGAGGCTTTTTTGGAGGCCTA | |
| GGCTTTTGCAAAAAGCTT:3′ | |

[1232] With this GAS promoter element linked to the SV40 promoter, a GAS:SEAP2 reporter construct is next engineered. Here, the reporter molecule is a secreted alkaline phosphatase, or “SEAP.” Clearly, however, any reporter molecule can be used instead of SEAP, in this or in any of the other Examples. Well known reporter molecules that can be used instead of SEAP include chloramphenicol acetyltransferase (CAT), luciferase, alkaline phosphatase, B-galactosidase, green fluorescent protein (GFP), or any protein detectable by an antibody.

[1233] The above sequence confirmed synthetic GAS-SV40 promoter element is subcloned into the pSEAP-Promoter vector obtained from Clontech using HindIll and XhoI, effectively replacing the SV40 promoter with the amplified GAS:SV40 promoter element, to create the GAS-SEAP vector. However, this vector does not contain a neomycin resistance gene, and therefore, is not preferred for mammalian expression systems.

[1234] Thus, in order to generate mammalian stable cell lines expressing the GAS-SEAP reporter, the GAS-SEAP cassette is removed from the GAS-SEAP vector using SalI and NotI, and inserted into a backbone vector containing the neomycin resistance gene, such as pGFP-1 (Clontech), using these restriction sites in the multiple cloning site, to create the GAS-SEAP/Neo vector. Once this vector is transfected into mammalian cells, this vector can then be used as a reporter molecule for GAS binding as described in Examples 32-33.

[1235] Other constructs can be made using the above description and replacing GAS with a different promoter sequence. For example, construction of reporter molecules containing NFK-B and EGR promoter sequences are described in Examples 34 and 35. However, many other promoters can be substituted using the protocols described in these Examples. For instance, SRE, IL-2, NFAT, or Osteocalcin promoters can be substituted, alone or in combination (e.g., GAS/NF-KB/EGR, GAS/NF-KB, I1-2/NFAT, or NF-KB/GAS). Similarly, other cell lines can be used to test reporter construct activity, such as HELA (epithelial), HUVEC (endothelial), Reh (B-cell), Saos-2 (osteoblast), HUVAC (aortic), or Cardiomyocyte.

### Example 32

### High-Throughput Screening Assay for T-cell Activity.

[1236] The following protocol is used to assess T-cell activity by identifying factors, and determining whether supernate containing a polypeptide of the invention proliferates and/or differentiates T-cells. T-cell activity is assessed using the GAS/SEAP/Neo construct produced in Example 31. Thus, factors that increase SEAP activity indicate the ability to activate the Jaks-STATS signal transduction pathway. The T-cell used in this assay is Jurkat T-cells (ATCC Accession No. TIB-152), although Molt-3 cells (ATCC Accession No. CRL-1552) and Molt-4 cells (ATCC Accession No. CRL-1582) cells can also be used.

[1237] Jurkat T-cells are lymphoblastic CD4+Th1 helper cells. In order to generate stable cell lines, approximately 2 million Jurkat cells are transfected with the GAS- SEAP/neo vector using DMRIE-C (Life Technologies)(transfection procedure described below). The transfected cells are seeded to a density of approximately 20,000 cells per well and transfectants resistant to 1 mg/ml genticin selected. Resistant colonies are expanded and then tested for their response to increasing concentrations of interferon gamma. The dose response of a selected clone is demonstrated.

[1238] Specifically, the following protocol will yield sufficient cells for 75 wells containing 200 ul of cells. Thus, it is either scaled up, or performed in multiple to generate sufficient cells for multiple 96 well plates. Jurkat cells are maintained in RPMI+10% serum with 1%Pen-Strep. Combine 2.5 mls of OPTI-MEM (Life Technologies) with 10 ug of plasmid DNA in a T25 flask. Add 2.5 ml OPTI-MEM containing 50 ul of DMRIE-C and incubate at room temperature for 15-45 mins.

[1239] During the incubation period, count cell concentration, spin down the required number of cells (10⁷ per transfection), and resuspend in OPTI-MEM to a final concentration of 10⁷ cells/ml. Then add 1 ml of 1×10⁷ cells in OPTI-MEM to T25 flask and incubate at 37 degree C. for 6 hrs. After the incubation, add 10 ml of RPMI+15% serum.

[1240] The Jurkat:GAS-SEAP stable reporter lines are maintained in RPMI+10% serum, 1 mg/ml Genticin, and 1% Pen-Strep. These cells are treated with supernatants containing polypeptide of the present invention or polypeptide of the present invention induced polypeptides as produced by the protocol described in Example 30.

[1241] On the day of treatment with the supernatant, the cells should be washed and resuspended in fresh RPMI+10% serum to a density of 500,000 cells per ml. The exact number of cells required will depend on the number of supernatants being screened. For one 96 well plate, approximately 10 million cells (for 10 plates, 100 million cells) are required.

[1242] Transfer the cells to a triangular reservoir boat, in order to dispense the cells into a 96 well dish, using a 12 channel pipette. Using a 12 channel pipette, transfer 200 ul of cells into each well (therefore adding 100,000 cells per well).

[1243] After all the plates have been seeded, 50 ul of the supernatants are transferred directly from the 96 well plate containing the supernatants into each well using a 12 channel pipette. In addition, a dose of exogenous interferon gamma (0.1, 1.0, 10 ng) is added to wells H9, H10, and H 11 to serve as additional positive controls for the assay.

[1244] The 96 well dishes containing Jurkat cells treated with supernatants are placed in an incubator for 48 hrs (note: this time is variable between 48-72 hrs). 35 ul samples from each well are then transferred to an opaque 96 well plate using a 12 channel pipette. The opaque plates should be covered (using sellophene covers) and stored at −20 degree C. until SEAP assays are performed according to Example 36. The plates containing the remaining treated cells are placed at 4 degree C. and serve as a source of material for repeating the assay on a specific well if desired.

[1245] As a positive control, 100 Unit/ml interferon gamma can be used which is known to activate Jurkat T cells. Over 30 fold induction is typically observed in the positive control wells.

[1246] The above protocol may be used in the generation of both transient, as well as stable, transfected cells, which would be apparent to those of skill in the art.

### Example 33

### High-Throughput Screening Assay Identifying Myeloid Activity

[1247] The following protocol is used to assess myeloid activity of polypeptide of the present invention by determining whether polypeptide of the present invention proliferates and/or differentiates myeloid cells. Myeloid cell activity is assessed using the GAS/SEAP/Neo construct produced in Example 31. Thus, factors that increase SEAP activity indicate the ability to activate the Jaks-STATS signal transduction pathway. The myeloid cell used in this assay is U937, a pre-monocyte cell line, although TF-1, HL60, or KG1 can be used.

[1248] To transiently transfect U937 cells with the GAS/SEAP/Neo construct produced in Example 31, a DEAE-Dextran method (Kharbanda et. al., 1994, Cell Growth & Differentiation, 5:259-265) is used. First, harvest 2×10⁷ U937 cells and wash with PBS. The U937 cells are usually grown in RPMI 1640 medium containing 10% heat-inactivated fetal bovine serum (FBS) supplemented with 100 units/ml penicillin and 100 mg/ml streptomycin.

[1249] Next, suspend the cells in 1 ml of 20 mM Tris-HCl (pH 7.4) buffer containing 0.5 mg/ml DEAE-Dextran, 8 ug GAS-SEAP2 plasmid DNA, 140 mM NaCl, 5 mM KCl, 375 uM Na₂HPO₄. 7H₂O, 1 mM MgCl₂, and 675 uM CaCl₂. Incubate at 37 degrees C. for 45 min.

[1250] Wash the cells with RPMI 1640 medium containing 10% FBS and then resuspend in 10 ml complete medium and incubate at 37 degree C. for 36 hr.

[1251] The GAS-SEAP/U937 stable cells are obtained by growing the cells in 400 ug/ml G418. The G418-free medium is used for routine growth but every one to two months, the cells should be re-grown in 400 ug/ml G41 8 for couple of passages.

[1252] These cells are tested by harvesting 1×10⁸ cells (this is enough for ten 96-well plates assay) and wash with PBS. Suspend the cells in 200 ml above described growth medium, with a final density of 5×10⁵ cells/ml. Plate 200 ul cells per well in the 96-well plate (or 1×10⁵ cells/well).

[1253] Add 50 ul of the supernatant prepared by the protocol described in Example 30. Incubate at 37 degree C. for 48 to 72 hr. As a positive control, 100 Unit/ml interferon gamma can be used which is known to activate U937 cells. Over 30 fold induction is typically observed in the positive control wells. SEAP assay the supernatant according to the protocol described in Example 36.

### Example 34

### High-Throughput Screening Assay Identifying Neuronal Activity

[1254] When cells undergo differentiation and proliferation, a group of genes are activated through many different signal transduction pathways. One of these genes, EGR1 (early growth response gene 1), is induced in various tissues and cell types upon activation. The promoter of EGR1 is responsible for such induction. Using the EGR1 promoter linked to reporter molecules, activation of cells can be assessed by polypeptide of the present invention.

[1255] Particularly, the following protocol is used to assess neuronal activity in PC12 cell lines. PC12 cells (rat phenochromocytoma cells) are known to proliferate and/or differentiate by activation with a number of mitogens, such as TPA (tetradecanoyl phorbol acetate), NGF (nerve growth factor), and EGF (epidermal growth factor). The EGR1 gene expression is activated during this treatment. Thus, by stably transfecting PC12 cells with a construct containing an EGR promoter linked to SEAP reporter, activation of PC12 cells by polypeptide of the present invention can be assessed.

[1256] The EGR/SEAP reporter construct can be assembled by the following protocol. The EGR-1 promoter sequence (−633 to +1)(Sakamoto K et al., Oncogene 6:867-871 (1991)) can be PCR amplified from human genomic DNA using the following primers:

| | |
|---|---|
| 5′GCGCTCGAGGGATGACAGCGATAGAACCCCGG- | (SEQ ID NO: 6) |
| 3′ | |
| 5′GCGAAGCTTCGCGACTCCCCGGATCCGCCTC-3′ | (SEQ ID NO: 7) |

[1257] Using the GAS:SEAP/Neo vector produced in Example 31, EGR1 amplified product can then be inserted into this vector. Linearize the GAS:SEAP/Neo vector using restriction enzymes XhoI/HindIII, removing the GAS/SV40 stuffer. Restrict the EGR1 amplified product with these same enzymes. Ligate the vector and the EGR1 promoter.

[1258] To prepare 96 well-plates for cell culture, two mls of a coating solution (1:30 dilution of collagen type I (Upstate Biotech Inc. Cat#08-115) in 30% ethanol (filter sterilized)) is added per one 10 cm plate or 50 ml per well of the 96-well plate, and allowed to air dry for 2 hr.

[1259] PC12 cells are routinely grown in RPMI-1640 medium (Bio Whittaker) containing 10% horse serum (JRH BIOSCIENCES, Cat. # 12449-78P), 5% heat-inactivated fetal bovine serum (FBS) supplemented with 100 units/ml penicillin and 100 ug/ml streptomycin on a precoated 10 cm tissue culture dish. One to four split is done every three to four days. Cells are removed from the plates by scraping and resuspended with pipetting up and down for more than 15 times.

[1260] Transfect the EGR/SEAP/Neo construct into PC12 using the Lipofectamine protocol described in Example 30. EGR-SEAP/PC12 stable cells are obtained by growing the cells in 300 ug/ml G418. The G418-free medium is used for routine growth but every one to two months, the cells should be re-grown in 300 ug/ml G418 for couple of passages.

[1261] To assay for neuronal activity, a 10 cm plate with cells around 70 to 80% confluent is screened by removing the old medium. Wash the cells once with PBS (Phosphate buffered saline). Then starve the cells in low serum medium (RPMI-1640 containing 1% horse serum and 0.5% FBS with antibiotics) overnight.

[1262] The next morning, remove the medium and wash the cells with PBS. Scrape off the cells from the plate, suspend the cells well in 2 ml low serum medium. Count the cell number and add more low serum medium to reach final cell density as 5×10⁵ cells/ml.

[1263] Add 200 ul of the cell suspension to each well of 96-well plate (equivalent to 1×10⁵ cells/well). Add 50 ul supernatant produced by Example 30, 37 degree C. for 48 to 72 hr. As a positive control, a growth factor known to activate PC12 cells through EGR can be used, such as 50 ng/ul of Neuronal Growth Factor (NGF). Over fifty-fold induction of SEAP is typically seen in the positive control wells. SEAP assay the supernatant according to Example 36.

### Example 35

### High-Throughput Screening Assay for T-cell Activity

[1264] NF-KB (Nuclear Factor KB) is a transcription factor activated by a wide variety of agents including the inflammatory cytokines IL-1 and TNF, CD30 and CD40, lymphotoxin-alpha and lymphotoxin-beta, by exposure to LPS or thrombin, and by expression of certain viral gene products. As a transcription factor, NF-KB regulates the expression of genes involved in immune cell activation, control of apoptosis (NF- KB appears to shield cells from apoptosis), B and T-cell development, anti-viral and antimicrobial responses, and multiple stress responses.

[1265] In non-stimulated conditions, NF-KB is retained in the cytoplasm with I-KB (Inhibitor KB). However, upon stimulation, I-KB is phosphorylated and degraded, causing NF-KB to shuttle to the nucleus, thereby activating transcription of target genes. Target genes activated by NF-KB include IL-2, IL-6, GM-CSF, ICAM-1 and class 1 MHC.

[1266] Due to its central role and ability to respond to a range of stimuli, reporter constructs utilizing the NF-KB promoter element are used to screen the supernatants produced in Example 30. Activators or inhibitors of NF-KB would be useful in treating, preventing, and/or diagnosing diseases. For example, inhibitors of NF-KB could be used to treat those diseases related to the acute or chronic activation of NF-KB, such as rheumatoid arthritis.

[1267] To construct a vector containing the NF-KB promoter element, a PCR based strategy is employed. The upstream primer contains four tandem copies of the NF-KB binding site (GGGGACTTTCCC) (SEQ ID NO: 8), 18 bp of sequence complementary to the 5′ end of the SV40 early promoter sequence, and is flanked with an XhoI site:

| | |
|---|---|
| 5′:GCGGCCTCGAGGGGACTTTCCCGGGGACTTTCCGGGGACTTTCCGGGAC | (SEQ ID NO: 9) |
| TTTCCATCCTGCCATCTCAATTAG:3′ | |

[1268] The downstream primer is complementary to the 3′ end of the SV40 promoter and is flanked with a Hind III site:

| | |
|---|---|
| 5′:GCGGCAAGCTTTTTGCAAAGCCTAGGC:3′ | (SEQ ID NO: 4) |

[1269] PCR amplification is performed using the SV40 promoter template present in the pB-gal:promoter plasmid obtained from Clontech. The resulting PCR fragment is digested with XhoI and Hind III and subcloned into BLSK2-. (Stratagene) Sequencing with the T7 and T3 primers confirms the insert contains the following sequence:

| | |
|---|---|
| 5′:CTCGAGGGGACTTTCCCGGGGACTTTCCGGGGACTTTCCGGGACTTTCC | (SEQ ID NO: 10) |
| ATCTGCCATCTCAATTAGTCAGCAACCATAGTCCCGCCCCTAACTCCGCCC | |
| ATCCCGCCCCTAACTCCGCCCAGTTCCGCCCATTCTCCGCCCCATGGCTGA | |
| CTAATTTTTTTTATTTATGCAGAGGCCGAGGCCGCCTCGGCCTCTGAGCTA | |
| TTCCAGAAGTAGTGAGGAGGCTTTTTTGGAGGCCTAGGCTTTTGCAAAAA | |
| GCTT:3′ | |

[1270] Next, replace the SV40 minimal promoter element present in the pSEAP2-promoter plasmid (Clontech) with this NF-KB/SV40 fragment using XhoI and HindIII. However, this vector does not contain a neomycin resistance gene, and therefore, is not preferred for mammalian expression systems.

[1271] In order to generate stable mammalian cell lines, the NF-KB/SV40/SEAP cassette is removed from the above NF-KB/SEAP vector using restriction enzymes SalI and NotI, and inserted into a vector containing neomycin resistance. Particularly, the NF-KB/SV40/SEAP cassette was inserted into pGFP-1 (Clontech), replacing the GFP gene, after restricting pGFP-1 with SalI and NotI.

[1272] Once NF-KB/SV40/SEAP/Neo vector is created, stable Jurkat T-cells are created and maintained according to the protocol described in Example 32. Similarly, the method for assaying supernatants with these stable Jurkat T-cells is also described in Example 32. As a positive control, exogenous TNF alpha (0.1, 1, 10 ng) is added to wells H9, H10, and H11, with a 5-10 fold activation typically observed.

### Example 36

### Assay for SEAP Activity

[1273] As a reporter molecule for the assays described in Examples 32-35, SEAP activity is assayed using the Tropix Phospho-light Kit (Cat. BP-400) according to the following general procedure. The Tropix Phospho-light Kit supplies the Dilution, Assay, and Reaction Buffers used below.

[1274] Prime a dispenser with the 2.5× Dilution Buffer and dispense 15 ul of 2.5× dilution buffer into Optiplates containing 35 ul of a supernatant. Seal the plates with a plastic sealer and incubate at 65 degree C. for 30 min. Separate the Optiplates to avoid uneven heating.

[1275] Cool the samples to room temperature for 15 minutes. Empty the dispenser and prime with the Assay Buffer. Add 50 ml Assay Buffer and incubate at room temperature 5 min. Empty the dispenser and prime with the Reaction Buffer (see the Table below). Add 50 ul Reaction Buffer and incubate at room temperature for 20 minutes. Since the intensity of the chemiluminescent signal is time dependent, and it takes about 10 minutes to read 5 plates on a luminometer, thus one should treat 5 plates at each time and start the second set 10 minutes later.

[1276] Read the relative light unit in the luminometer. Set H12 as blank, and print the results. An increase in chemiluminescence indicates reporter activity.

[001199] Reaction Buffer Formulation:

| # of plates | Rxn buffer diluent (ml) | CSPD (ml) |
|---|---|---|
| 10 | 60 | 3 |
| 11 | 65 | 3.25 |
| 12 | 70 | 3.5 |
| 13 | 75 | 3.75 |
| 14 | 80 | 4 |
| 15 | 85 | 4.25 |
| 16 | 90 | 4.5 |
| 17 | 95 | 4.75 |
| 18 | 100 | 5 |
| 19 | 105 | 5.25 |
| 20 | 110 | 5.5 |
| 21 | 115 | 5.75 |
| 22 | 120 | 6 |
| 23 | 125 | 6.25 |
| 24 | 130 | 6.5 |
| 25 | 135 | 6.75 |
| 26 | 140 | 7 |
| 27 | 145 | 7.25 |
| 28 | 150 | 7.5 |
| 29 | 155 | 7.75 |
| 30 | 160 | 8 |
| 31 | 165 | 8.25 |
| 32 | 170 | 8.5 |
| 33 | 175 | 8.75 |
| 34 | 180 | 9 |
| 35 | 185 | 9.25 |
| 36 | 190 | 9.5 |
| 37 | 195 | 9.75 |
| 38 | 200 | 10 |
| 39 | 205 | 10.25 |
| 40 | 210 | 10.5 |
| 41 | 215 | 10.75 |
| 42 | 220 | 11 |
| 43 | 225 | 11.25 |
| 44 | 230 | 11.5 |
| 45 | 235 | 11.75 |
| 46 | 240 | 12 |
| 47 | 245 | 12.25 |
| 48 | 250 | 12.5 |
| 49 | 255 | 12.75 |
| 50 | 260 | 13 |

### Example 37

### High-Throughput Screening Assay Identifying Changes in Small Molecule Concentration and Membrane Permeability

[1277] Binding of a ligand to a receptor is known to alter intracellular levels of small molecules, such as calcium, potassium, sodium, and pH, as well as alter membrane potential. These alterations can be measured in an assay to identify supernatants which bind to receptors of a particular cell. Although the following protocol describes an assay for calcium, this protocol can easily be modified to detect changes in potassium, sodium, pH, membrane potential, or any other small molecule which is detectable by a fluorescent probe.

[1278] The following assay uses Fluorometric Imaging Plate Reader (“FLIPR”) to measure changes in fluorescent molecules (Molecular Probes) that bind small molecules. Clearly, any fluorescent molecule detecting a small molecule can be used instead of the calcium fluorescent molecule, fluo-4 (Molecular Probes, Inc.; catalog no. F-14202), used here.

[1279] For adherent cells, seed the cells at 10,000-20,000 cells/well in a Co-star black 96-well plate with clear bottom. The plate is incubated in a CO₂ incubator for 20 hours. The adherent cells are washed two times in Biotek washer with 200 ul of HBSS (Hank's Balanced Salt Solution) leaving 100 ul of buffer after the final wash.

[1280] A stock solution of 1 mg/ml fluo-4 is made in 10% pluronic acid DMSO. To load the cells with fluo-4, 50 ul of 12 ug/ml fluo-4 is added to each well. The plate is incubated at 37 degrees C. in a CO₂ incubator for 60 min. The plate is washed four times in the Biotek washer with HBSS leaving 100 ul of buffer.

[1281] For non-adherent cells, the cells are spun down from culture media. Cells are re-suspended to 2-5×10⁶ cells/ml with HBSS in a 50-ml conical tube. 4 ul of 1 mg/ml fluo-4 solution in 10% pluronic acid DMSO is added to each ml of cell suspension. The tube is then placed in a 37 degrees C. water bath for 30-60 min. The cells are washed twice with HBSS, resuspended to 1×10⁶ cells/ml, and dispensed into a microplate, 100 ul/well. The plate is centrifuged at 1000 rpm for 5 min. The plate is then washed once in Denley Cell Wash with 200 ul, followed by an aspiration step to 100 ul final volume.

[1282] For a non-cell based assay, each well contains a fluorescent molecule, such as fluo-4. The supernatant is added to the well, and a change in fluorescence is detected.

[1283] To measure the fluorescence of intracellular calcium, the FLIPR is set for the following parameters: (1) System gain is 300-800 mW; (2) Exposure time is 0.4 second; (3) Camera F/stop is F/2; (4) Excitation is 488 nm; (5) Emission is 530 nm; is and (6) Sample addition is 50 ul. Increased emission at 530 nm indicates an extracellular signaling event caused by the a molecule, either polypeptide of the present invention or a molecule induced by polypeptide of the present invention, which has resulted in an increase in the intracellular Ca⁺⁺ concentration.

### Example 38

### High-Throughput Screening Assay Identifying Tyrosine Kinase Activity

[1284] The Protein Tyrosine Kinases (PTK) represent a diverse group of transmembrane and cytoplasmic kinases. Within the Receptor Protein Tyrosine Kinase RPTK) group are receptors for a range of mitogenic and metabolic growth factors including the PDGF, FGF, EGF, NGF, HGF and Insulin receptor subfamilies. In addition there are a large family of RPTKs for which the corresponding ligand is unknown. Ligands for RPTKs include mainly secreted small proteins, but also membrane-bound and extracellular matrix proteins.

[1285] Activation of RPTK by ligands involves ligand-mediated receptor dimerization, resulting in transphosphorylation of the receptor subunits and activation of the cytoplasmic tyrosine kinases. The cytoplasmic tyrosine kinases include receptor associated tyrosine kinases of the src-family (e.g., src, yes, Ick, lyn, fyn) and non-receptor linked and cytosolic protein tyrosine kinases, such as the Jak family, members of which mediate signal transduction triggered by the cytokine superfamily of receptors (e.g., the Interleukins, Interferons, GM-CSF, and Leptin).

[1286] Because of the wide range of known factors capable of stimulating tyrosine kinase activity, identifying whether polypeptide of the present invention or a molecule induced by polypeptide of the present invention is capable of activating tyrosine kinase signal transduction pathways is of interest. Therefore, the following protocol is designed to identify such molecules capable of activating the tyrosine kinase signal transduction pathways.

[1287] Seed target cells (e.g., primary keratinocytes) at a density of approximately 25,000 cells per well in a 96 well Loprodyne Silent Screen Plates purchased from Nalge Nunc (Naperville, Ill.). The plates are sterilized with two 30 minute rinses with 100% ethanol, rinsed with water and dried overnight. Some plates are coated for 2 hr with 100 ml of cell culture grade type I collagen (50 mg/ml), gelatin (2%) or polylysine (50 mg/ml), all of which can be purchased from Sigma Chemicals (St. Louis, Mo.) or 10% Matrigel purchased from Becton Dickinson (Bedford, Mass.), or calf serum, rinsed with PBS and stored at 4 degree C. Cell growth on these plates is assayed by seeding 5,000 cells/well in growth medium and indirect quantitation of cell number through use of alamarBlue as described by the manufacturer Alamar Biosciences, Inc. (Sacramento, Calif.) after 48 hr. Falcon plate covers #3071 from Becton Dickinson (Bedford, Mass.) are used to cover the Loprodyne Silent Screen Plates. Falcon Microtest III cell culture plates can also be used in some proliferation experiments.

[1288] To prepare extracts, A431 cells are seeded onto the nylon membranes of Loprodyne plates (20,000/200 ml/well) and cultured overnight in complete medium. Cells are quiesced by incubation in serum-free basal medium for 24 hr. After 5-20 minutes treatment with EGF (60ng/ml) or 50 ul of the supernatant produced in Example 30, the medium was removed and 100 ml of extraction buffer ((20 mM HEPES pH 7.5, 0.15 M NaCl, 1% Triton X-100, 0.1% SDS, 2 mM Na3VO4, 2 mM Na4P2O7 and a cocktail of protease inhibitors (#1836170) obtained from Boeheringer Mannheim (Indianapolis, Ind.)) is added to each well and the plate is shaken on a rotating shaker for 5 minutes at 4° C. The plate is then placed in a vacuum transfer manifold and the extract filtered through the 0.45 mm membrane bottoms of each well using house vacuum. Extracts are collected in a 96-well catch/assay plate in the bottom of the vacuum manifold and immediately placed on ice, To obtain extracts clarified by centrifugation, the content of each well, after detergent solubilization for 5 minutes, is removed and centrifuged for 15 minutes at 4 degree C. at 16,000×g.

[1289] Test the filtered extracts for levels of tyrosine kinase activity. Although many methods of detecting tyrosine kinase activity are known, one method is described here.

[1290] Generally, the tyrosine kinase activity of a supernatant is evaluated by determining its ability to phosphorylate a tyrosine residue on a specific substrate (a biotinylated peptide). Biotinylated peptides that can be used for this purpose include PSK1 (corresponding to amino acids 6-20 of the cell division kinase cdc2-p34) and PSK2 (corresponding to amino acids 1-17 of gastrin). Both peptides are substrates for a range of tyrosine kinases and are available from Boehringer Mannheim.

[1291] The tyrosine kinase reaction is set up by adding the following components in order. First, add 10 ul of 5 uM Biotinylated Peptide, then 10 ul ATP/Mg₂₊ (5 mM ATP/50 mM MgCl₂), then 10 ul of 5× Assay Buffer (40 mM imidazole hydrochloride, pH7.3, 40 mM beta-glycerophosphate, 1 mM EGTA, 100 mM MgCl₂, 5 mM MnCl₂, 0.5 mg/ml BSA), then 5 ul of Sodium Vanadate (1 mM), and then 5 ul of water. Mix the components gently and preincubate the reaction mix at 30 degree C. for 2 min. Initial the reaction by adding 10ul of the control enzyme or the filtered supernatant.

[1292] The tyrosine kinase assay reaction is then terminated by adding 10 ul of 120 mm EDTA and place the reactions on ice.

[1293] Tyrosine kinase activity is determined by transferring 50 ul aliquot of reaction mixture to a microtiter plate (MTP) module and incubating at 37 degree C. for 20 min. This allows the streptavidin coated 96 well plate to associate with the biotinylated peptide. Wash the MTP module with 300 ul/well of PBS four times. Next add 75 ul of anti-phospotyrosine antibody conjugated to horse radish peroxidase (anti-P-Tyr-POD(0.5 u/ml)) to each well and incubate at 37 degree C. for one hour. Wash the well as above.

[1294] Next add 100 ul of peroxidase substrate solution (Boehringer Mannheim) and incubate at room temperature for at least 5 mins (up to 30 min). Measure the absorbance of the sample at 405 nm by using ELISA reader. The level of bound peroxidase activity is quantitated using an ELISA reader and reflects the level of tyrosine kinase activity.

### Example 39

### High-Throughput Screening Assay Identifying Phosphorylation Activity

[1295] As a potential alternative and/or complement to the assay of protein tyrosine kinase activity described in Example 38, an assay which detects activation (phosphorylation) of major intracellular signal transduction intermediates can also be used. For example, as described below one particular assay can detect tyrosine phosphorylation of the Erk-1 and Erk-2 kinases. However, phosphorylation of other molecules, such as Raf, JNK, p38 MAP, Map kinase kinase (MEK), MEK kinase, Src, Muscle specific kinase (MuSK), IRAK, Tec, and Janus, as well as any other phosphoserine, phosphotyrosine, or phosphothreonine molecule, can be detected by substituting these molecules for Erk-1 or Erk-2 in the following assay.

[1296] Specifically, assay plates are made by coating the wells of a 96-well ELISA plate with 0.1 ml of protein G (1 ug/ml) for 2 hr at room temp, (RT). The plates are then rinsed with PBS and blocked with 3% BSA/PBS for 1 hr at RT. The protein G plates are then treated with 2 commercial monoclonal antibodies (100 ng/well) against Erk-1 and Erk-2 (1 hr at RT) (Santa Cruz Biotechnology). (To detect other molecules, this step can easily be modified by substituting a monoclonal antibody detecting any of the above described molecules.) After 3-5 rinses with PBS, the plates are stored at 4 degree C. until use.

[1297] A431 cells are seeded at 20,000/well in a 96-well Loprodyne filterplate and cultured overnight in growth medium. The cells are then starved for 48 hr in basal medium (DMEM) and then treated with EGF (6ng/well) or 50 ul of the supernatants obtained in Example 30 for 5-20 minutes. The cells are then solubilized and extracts filtered directly into the assay plate.

[1298] After incubation with the extract for 1 hr at RT, the wells are again rinsed. As a positive control, a commercial preparation of MAP kinase (10 ng/well) is used in place of A431 extract. Plates are then treated with a commercial polyclonal (rabbit) antibody (1 ug/ml) which specifically recognizes the phosphorylated epitope of the Erk-1 and Erk-2 kinases (1 hr at RT). This antibody is biotinylated by standard procedures. The bound polyclonal antibody is then quantitated by successive incubations with Europium-streptavidin and Europium fluorescence enhancing reagent in the Wallac DELFIA instrument (time-resolved fluorescence). An increased fluorescent signal over background indicates a phosphorylation by polypeptide of the present invention or a molecule induced by polypeptide of the present invention.

### Example 40

### Assay for the Stimulation of Bone Marrow CD34+ Cell Proliferation

[1299] This assay is based on the ability of human CD34+ to proliferate in the presence of hematopoietic growth factors and evaluates the ability of isolated polypeptides expressed in mammalian cells to stimulate proliferation of CD34+ cells.

[1300] It has been previously shown that most mature precursors will respond to only a single signal. More immature precursors require at least two signals to respond. Therefore, to test the effect of polypeptides on hematopoietic activity of a wide range of progenitor cells, the assay contains a given polypeptide in the presence or absence of other hematopoietic growth factors. Isolated cells are cultured for 5 days in the presence of Stem Cell Factor (SCF) in combination with tested sample. SCF alone has a very limited effect on the proliferation of bone marrow (BM) cells, acting in such conditions only as a “survival” factor. However, combined with any factor exhibiting stimulatory effect on these cells (e.g., IL-3), SCF will cause a synergistic effect. Therefore, if the tested polypeptide has a stimulatory effect on hematopoietic progenitors, such activity can be easily detected. Since normal BM cells have a low level of cycling cells, it is likely that any inhibitory effect of a given polypeptide, or agonists or antagonists thereof, might not be detected. Accordingly, assays for an inhibitory effect on progenitors is preferably tested in cells that are first subjected to in vitro stimulation with SCF+IL+3, and then contacted with the compound that is being evaluated for inhibition of such induced proliferation.

[1301] Briefly, CD34+ cells are isolated using methods known in the art. The cells are thawed and resuspended in medium (QBSF 60 serum-free medium with 1% L-glutamine (500 ml) Quality Biological, Inc., Gaithersburg, Md. Cat# 160-204-101). After several gentle centrifugation steps at 200×g, cells are allowed to rest for one hour. The cell count is adjusted to 2.5×10⁵ cells/ml. During this time, 100 μl of sterile water is added to the peripheral wells of a 96-well plate. The cytokines that can be tested with a given polypeptide in this assay is rhSCF (R&D Systems, Minneapolis, Minn., Cat# 255-SC) at 50 ng/ml alone and in combination with rhSCF and rhIL-3 (R&D Systems, Minneapolis, Minn., Cat# 203-ML) at 30 ng/ml. After one hour, 10 μl of prepared cytokines, 50 μl of the supernatants prepared in Example 30 (supernatants at 1:2 dilution=50 p1) and 20 μl of diluted cells are added to the media which is already present in the wells to allow for a final total volume of 100 μl. The plates are then placed in a 37° C./5% CO₂ incubator for five days.

[1302] Eighteen hours before the assay is harvested, 0.5 μCi/well of [3H] Thymidine is added in a 10 μl volume to each well to determine the proliferation rate. The experiment is terminated by harvesting the cells from each 96-well plate to a filtermat using the Tomtec Harvester 96. After harvesting, the filtermats are dried, trimmed and placed into OmniFilter assemblies consisting of one OmniFilter plate and one OmniFilter Tray. 60 μl Microscint is added to each well and the plate sealed with TopSeal-A press-on sealing film A bar code 15 sticker is affixed to the first plate for counting. The sealed plates are then loaded and the level of radioactivity determined via the Packard Top Count and the printed data collected for analysis. The level of radioactivity reflects the amount of cell proliferation.

[1303] The studies described in this example test the activity of a given polypeptide to stimulate bone marrow CD34+ cell proliferation. One skilled in the art could easily modify the exemplified studies to test the activity of polynucleotides (e.g., gene therapy), antibodies, agonists, and/or antagonists and fragments and variants thereof. As a nonlimiting example, potential antagonists tested in this assay would be expected to inhibit cell proliferation in the presence of cytokines and/or to increase the inhibition of cell proliferation in the presence of cytokines and a given polypeptide. In contrast, potential agonists tested in this assay would be expected to enhance cell proliferation and/or to decrease the inhibition of cell proliferation in the presence of cytokines and a given polypeptide.

[1304] The ability of a gene to stimulate the proliferation of bone marrow CD34+ cells indicates that polynucleotides and polypeptides corresponding to the gene are useful for the diagnosis and treatment of disorders affecting the immune system and hematopoiesis. Representative uses are described in the “Immune Activity” and “Infectious Disease” sections above, and elsewhere herein.

### Example 41

### Assay for Extracellular Matrix Enhanced Cell Response (EMECR)

[1305] The objective of the Extracellular Matrix Enhanced Cell Response (EMECR) assay is to identify gene products (e.g., isolated polypeptides) that act on the hematopoietic stem cells in the context of the extracellular matrix (ECM) induced signal.

[1306] Cells respond to the regulatory factors in the context of signal(s) received from the surrounding microenvironment. For example, fibroblasts, and endothelial and epithelial stem cells fail to replicate in the absence of signals from the ECM. Hematopoietic stem cells can undergo self-renewal in the bone marrow, but not in in vitro suspension culture. The ability of stem cells to undergo self-renewal in vitro is dependent upon their interaction with the stromal cells and the ECM protein fibronectin (fn). Adhesion of cells to fn is mediated by the α₅.β₁ and α₄.β₁ integrin receptors, which are expressed by human and mouse hematopoietic stem cells. The factor(s) which integrate with the ECM environment and are responsible for stimulating stem cell self-renewal have not yet been identified. Discovery of such factors should be of great interest in gene therapy and bone marrow transplant applications

[1307] Briefly, polystyrene, non tissue culture treated, 96-well plates are coated with fn fragment at a coating concentration of 0.2 μg/cm . Mouse bone marrow cells are plated (1,000 cells/well ) in 0.2 ml of serum-free medium. Cells cultured in the presence of IL-3 (5 ng/ml )+SCF (50 ng/ml ) would serve as the positive control, conditions under which little self-renewal but pronounced differentiation of the stem cells is to be expected. Gene products of the invention (e.g., including, but not limited to, polynucleotides and polypeptides of the present invention, and supernatants produced in Example 30), are tested with appropriate negative controls in the presence and absence of SCF(5.0 ng/ml), where test factor supernatants represent 10% of the total assay volume. The plated cells are then allowed to grow by incubating in a low oxygen environment (5% CO₂, 7% O₂, and 88% N₂ ) tissue culture incubator for 7 days. The number of proliferating cells within the wells is then quantitated by measuring thymidine incorporation into cellular DNA. Verification of the positive hits in the assay will require phenotypic characterization of the cells, which can be accomplished by scaling up of the culture system and using appropriate antibody reagents against cell surface antigens and FACScan.

[1308] One skilled in the art could easily modify the exemplified studies to test the activity of polynucleotides (e.g., gene therapy), antibodies, agonists, and/or antagonists and fragments and variants thereof.

[1309] If a particular polypeptide of the present invention is found to be a stimulator of hematopoietic progenitors, polynucleotides and polypeptides corresponding to the gene encoding said polypeptide may be useful for the diagnosis and treatment of disorders affecting the immune system and hematopoiesis. Representative uses are described in the “Immune Activity” and “Infectious Disease” sections above, and elsewhere herein. The gene product may also be useful in the expansion of stem cells and committed progenitors of various blood lineages, and in the differentiation and/or proliferation of various cell types.

[1310] Additionally, the polynucleotides and/or polypeptides of the gene of interest and/or agonists and/or antagonists thereof, may also be employed to inhibit the proliferation and differentiation of hematopoietic cells and therefore may be employed to protect bone marrow stem cells from chemotherapeutic agents during chemotherapy. This antiproliferative effect may allow administration of higher doses of chemotherapeutic agents and, therefore, more effective chemotherapeutic treatment.

[1311] Moreover, polynucleotides and polypeptides corresponding to the gene of interest may also be useful for the treatment and diagnosis of hematopoietic related disorders such as, for example, anemia, pancytopenia, leukopenia, thrombocytopenia or leukemia since stromal cells are important in the production of cells of hematopoietic lineages. The uses include bone marrow cell ex-vivo culture, bone marrow transplantation, bone marrow reconstitution, radiotherapy or chemotherapy of neoplasia.

### Example 42

### Human Dermal Fibroblast and Aortic Smooth Muscle Cell Proliferation

[1312] The polypeptide of interest is added to cultures of normal human dermal fibroblasts (NHDF) and human aortic smooth muscle cells (AoSMC) and two co-assays are performed with each sample. The first assay examines the effect of the polypeptide of interest on the proliferation of normal human dermal fibroblasts (NHDF) or aortic smooth muscle cells (AoSMC). Aberrant growth of fibroblasts or smooth muscle cells is a part of several pathological processes, including fibrosis, and restenosis. The second assay examines IL6 production by both NHDF and SMC. IL6 production is an indication of functional activation. Activated cells will have increased production of a number of cytokines and other factors, which can result in a proinflammatory or immunomodulatory outcome. Assays are run with and without co-TNFa stimulation, in order to check for costimulatory or inhibitory activity.

[1313] Briefly, on day 1, 96-well black plates are set up with 1000 cells/well (NHDF) or 2000 cells/well (AOSMC) in 100 μl culture media. NHDF culture media contains: Clonetics FB basal media, 1 mg/ml hFGF, 5 mg/ml insulin, 50 mg/ml gentamycin, 2%FBS, while AoSMC culture media contains Clonetics SM basal media, 0.5 μg/ml hEGF, 5 mg/ml insulin, 1 μg/ml hFGF, 50 mg/ml gentamycin, 50 μg/ml Amphotericin B, 5%FBS. After incubation at 37° C. for at least 4-5 hours culture media is aspirated and replaced with growth arrest media. Growth arrest media for NHDF contains fibroblast basal media, 50 mg/ml gentamycin, 2% FBS, while growth arrest media for AoSMC contains SM basal media, 50 mg/ml gentamycin, 50μg/ml Amphotericin B, 0.4% FBS. Incubate at 37° C. until day 2.

[1314] On day 2, serial dilutions and templates of the polypeptide of interest are designed such that they always include media controls and known-protein controls. For both stimulation and inhibition experiments, proteins are diluted in growth arrest media. For inhibition experiments, TNFa is added to a final concentration of 2 ng/ml (NHDF) or 5 ng/ml (AoSMC). Add ⅓ vol media containing controls or polypeptides of the present invention and incubate at 37 degrees C./5% CO₂ until day 5.

[1315] Transfer 60 μl from each well to another labeled 96-well plate, cover with a plate-sealer, and store at 4 degrees C. until Day 6 (for IL6 ELISA). To the remaining 100 μl in the cell culture plate, aseptically add Alamar Blue in an amount equal to 10% of the culture volume (10 μl). Return plates to incubator for 3 to 4 hours. Then measure fluorescence with excitation at 530 nm and emission at 590 nm using the CytoFluor. This yields the growth stimulation/inhibition data.

[1316] On day 5, the IL6 ELISA is performed by coating a 96 well plate with 50-100 ul/well of Anti-Human IL6 Monoclonal antibody diluted in PBS, pH 7.4, incubate ON at room temperature.

[1317] On day 6, empty the plates into the sink and blot on paper towels. Prepare Assay Buffer containing PBS with 4% BSA. Block the plates with 200 μl/well of Pierce Super Block blocking buffer in PBS for 1-2 hr and then wash plates with wash buffer (PBS, 0.05% Tween-20). Blot plates on paper towels. Then add 50 μl/well of diluted Anti-Human IL-6 Monoclonal, Biotin-labeled antibody at 0.50 mg/ml. Make dilutions of IL-6 stock in media (30, 10, 3, 1, 0.3, 0 ng/ml). Add duplicate samples to top row of plate. Cover the plates and incubate for 2 hours at RT on shaker.

[1318] Plates are washed with wash buffer and blotted on paper towels. Dilute EU-labeled Streptavidin 1:1000 in Assay buffer, and add 100 μl/well. Cover the plate and incubate 1 h at RT. Plates are again washed with wash buffer and blotted on paper towels.

[1319] Add 100 μl/well of Enhancement Solution. Shake for 5 minutes. Read the plate on the Wallac DELFIA Fluorometer. Readings from triplicate samples in each assay were tabulated and averaged.

[1320] A positive result in this assay suggests AoSMC cell proliferation and that the polypeptide of the present invention may be involved in dermal fibroblast proliferation and/or smooth muscle cell proliferation. A positive result also suggests many potential uses of polypeptides, polynucleotides, agonists and/or antagonists of the polynucleotide/polypeptide of the present invention which gives a positive result. For example, inflammation and immune responses, wound healing, and angiogenesis, as detailed throughout this specification. Particularly, polypeptides of the present invention and polynucleotides of the present invention may be used in wound healing and dermal regeneration, as well as the promotion of vasculogenesis, both of the blood vessels and lymphatics. The growth of vessels can be used in the treatment of, for example, cardiovascular diseases. Additionally, antagonists of polypeptides and polynucleotides of the invention may be useful in treating diseases, disorders, and/or conditions which involve angiogenesis by acting as an anti-vascular agent (e.g., anti-angiogenesis). These diseases, disorders, and/or conditions are known in the art and/or are described herein, such as, for example, malignancies, solid tumors, benign tumors, for example hemangiomas, acoustic neuromas, neurofibromas, trachomas, and pyogenic granulomas; artheroscleric plaques; ocular angiogenic diseases, for example, diabetic retinopathy, retinopathy of prematurity, macular degeneration, corneal graft rejection, neovascular glaucoma, retrolental fibroplasia, rubeosis, retinoblastoma, uvietis and Pterygia (abnormal blood vessel growth) of the eye; rheumatoid arthritis; psoriasis; delayed wound healing; endometriosis; vasculogenesis; granulations; hypertrophic scars (keloids); nonunion fractures; scleroderma; trachoma; vascular adhesions; myocardial angiogenesis; coronary collaterals; cerebral collaterals; arteriovenous malformations; ischemic limb angiogenesis; Osler-Webber Syndrome; plaque neovascularization; telangiectasia; hemophiliac joints; angiofibroma; fibromuscular dysplasia; wound granulation; Crohn's disease; and atherosclerosis. Moreover, antagonists of polypeptides and polynucleotides of the invention may be useful in treating anti-hyperproliferative diseases and/or anti-inflammatory known in the art and/or described herein.

[1321] One skilled in the art could easily modify the exemplified studies to test the activity of polynucleotides (e.g., gene therapy), antibodies, agonists, and/or antagonists and fragments and variants thereof.

### Example 43

### Cellular Adhesion Molecule (CAM) Expression on Endothelial Cells

[1322] The recruitment of lymphocytes to areas of inflammation and angiogenesis involves specific receptor-ligand interactions between cell surface adhesion molecules (CAMs) on lymphocytes and the vascular endothelium. The adhesion process, in both normal and pathological settings, follows a multi-step cascade that involves intercellular adhesion molecule-1 (ICAM-1), vascular cell adhesion molecule-1 (VCAM-1), and endothelial leukocyte adhesion molecule-1 (E-selectin) expression on endothelial cells (EC). The expression of these molecules and others on the vascular endothelium determines the efficiency with which leukocytes may adhere to the local vasculature and extravasate into the local tissue during the development of an inflammatory response. The local concentration of cytokines and growth factor participate in the modulation of the expression of these CAMs.

[1323] Briefly, endothelial cells (e.g., Human Umbilical Vein Endothelial cells (HUVECs)) are grown in a standard 96 well plate to confluence, growth medium is removed from the cells and replaced with 100 μl of 199 Medium (10% fetal bovine serum (FBS)). Samples for testing and positive or negative controls are added to the plate in triplicate (in 10 μl volumes). Plates are then incubated at 37° C. for either 5 h (selectin and integrin expression) or 24 h (integrin expression only). Plates are aspirated to remove medium and 100 μl of 0.1% paraformaldehyde-PBS(with Ca++ and Mg++) is added to each well. Plates are held at 4° C. for 30 min. Fixative is removed from the wells and wells are washed 1× with PBS(+Ca,Mg)+0.5% BSA and drained. 10 μl of diluted primary antibody is added to the test and control wells. Anti-ICAM-1-Biotin, Anti-VCAM-1-Biotin and Anti-E-selectin-Biotin are used at a concentration of 10 μg/ml (1:10 dilution of 0.1 mg/ml stock antibody). Cells are incubated at 37° C. for 30 min. in a humidified environment. Wells are washed three times with PBS(+Ca,Mg)+0.5% BSA. 20 μl of diluted ExtrAvidin-Alkaline Phosphatase (1:5,000 dilution, referred to herein as the working dilution) are added to each well and incubated at 37° C. for 30 min. Wells are washed three times with PBS(+Ca,Mg)+0.5% BSA. Dissolve 1 tablet of p-Nitrophenol Phosphate pNPP per 5 ml of glycine buffer (pH 10.4). 100 μl of pNPP substrate in glycine buffer is added to each test well. Standard wells in triplicate are prepared from the working dilution of the ExtrAvidin-Alkaline Phosphotase in glycine buffer: 1:5,000 (10⁰)>10^{-0.5}>10⁻¹>10^{-1.5}.5 μl of each dilution is added to triplicate wells and the resulting AP content in each well is 5.50 ng, 1.74 ng, 0.55 ng, 0.18 ng. 100 μl of pNNP reagent is then added to each of the standard wells. The plate is incubated at 37° C. for 4h. A volume of 50 μl of 3M NaOH is added to all wells. The plate is read on a plate reader at 405 nm using the background subtraction option on blank wells filled with glycine buffer only. Additionally, the template is set up to indicate the concentration of AP-conjugate in each standard well [5.50 ng; 1.74 ng; 0.55 ng; 0.18 ng]. Results are indicated as amount of bound AP-conjugate in each sample.

### Example 44

### Alamar Blue Endothelial Cells Proliferation Assay

[1324] This assay may be used to quantitatively determine protein mediated inhibition of bFGF-induced proliferation of Bovine Lymphatic Endothelial Cells (LECs), Bovine Aortic Endothelial Cells (BAECs) or Human Microvascular Uterine Myometrial Cells (UTMECs). This assay incorporates a fluorometric growth indicator based on detection of metabolic activity. A standard Alamar Blue Proliferation Assay is prepared in EGM-2MV with 10 ng /ml of bFGF added as a source of endothelial cell stimulation. This assay may be used with a variety of endothelial cells with slight changes in growth medium and cell concentration. Dilutions of the protein batches to be tested are diluted as appropriate. Serum-free medium (GIBCO SFM) without bFGF is used as a non-stimulated control and Angiostatin or TSP-1 are included as a known inhibitory controls.

[1325] Briefly, LEC, BAECs or UTMECs are seeded in growth media at a density of 5000 to 2000 cells/well in a 96 well plate and placed at 37degrees C. overnight. After the overnight incubation of the cells, the growth media is removed and replaced with GIBCO EC-SFM. The cells are treated with the appropriate dilutions of the protein of interest or control protein sample(s) (prepared in SFM) in triplicate wells with additional bFGF to a concentration of 10 ng/ ml. Once the cells have been treated with the samples, the plate(s) is/are placed back in the 37° C. incubator for three days. After three days 10 ml of stock alamar blue (Biosource Cat# DAL I100) is added to each well and the plate(s) is/are placed back in the 37° C. incubator for four hours. The plate(s) are then read at 530 nm excitation and 590 nm emission using the CytoFluor fluorescence reader. Direct output is recorded in relative fluorescence units.

[1326] Alamar blue is an oxidation-reduction indicator that both fluoresces and changes color in response to chemical reduction of growth medium resulting from cell growth. As cells grow in culture, innate metabolic activity results in a chemical reduction of the immediate surrounding environment. Reduction related to growth causes the indicator to change from oxidized (non-fluorescent blue) form to reduced (fluorescent red) form (i.e., stimulated proliferation will produce a stronger signal and inhibited proliferation will produce a weaker signal and the total signal is proportional to the total number of cells as well as their metabolic activity). The background level of activity is observed with the starvation medium alone. This is compared to the output observed from the positive control samples (bFGF in growth medium) and protein dilutions.

### Example 45

### Detection of Inhibition of a Mixed Lymphocyte Reaction

[1327] This assay can be used to detect and evaluate inhibition of a Mixed Lymphocyte Reaction (MLR) by gene products (e.g., isolated polypeptides). Inhibition of a MLR may be due to a direct effect on cell proliferation and viability, modulation of costimulatory molecules on interacting cells, modulation of adhesiveness between lymphocytes and accessory cells, or modulation of cytokine production by accessory cells. Multiple cells may be targeted by these polypeptides since the peripheral blood mononuclear fraction used in this assay includes T, B and natural killer lymphocytes, as well as monocytes and dendritic cells.

[1328] Polypeptides of interest found to inhibit the MLR may find application in diseases associated with lymphocyte and monocyte activation or proliferation. These include, but are not limited to, diseases such as asthma, arthritis, diabetes, inflammatory skin conditions, psoriasis, eczema, systemic lupus erythematosus, multiple sclerosis, glomerulonephritis, inflammatory bowel disease, crohn's disease, ulcerative colitis, arteriosclerosis, cirrhosis, graft vs. host disease, host vs. graft disease, hepatitis, leukemia and lymphoma.

[1329] Briefly, PBMCs from human donors are purified by density gradient centrifugation using Lymphocyte Separation Medium (LSM®, density 1.0770 g/ml, Organon Teknika Corporation, West Chester, Pa. ). PBMCs from two donors are adjusted to 2×10⁶ cells/ml in RPMI-1640 (Life Technologies, Grand Island, N.Y.) supplemented with 10% FCS and 2 mM glutamine. PBMCs from a third donor is adjusted to 2×10⁵ cells/ml. Fifty microliters of PBMCs from each donor is added to wells of a 96-well round bottom microtiter plate. Dilutions of test materials (50 μl) is added in triplicate to microtiter wells. Test samples (of the protein of interest) are added for final dilution of 1:4; rhuIL-2 (R&D Systems, Minneapolis, Minn., catalog number 202-IL) is added to a final concentration of 1 μg/ml; anti-CD4 mAb (R&D Systems, clone 34930.11, catalog number MAB379) is added to a final concentration of 10 μg/ml. Cells are cultured for 7-8 days at 37° C. in 5% CO₂, and 1 μC of [³H] thymidine is added to wells for the last 16 hrs of culture. Cells are harvested and thymidine incorporation determined using a Packard TopCount. Data is expressed as the mean and standard deviation of triplicate determinations.

[1330] Samples of the protein of interest are screened in separate experiments and compared to the negative control treatment, anti-CD4 mAb, which inhibits proliferation of lymphocytes and the positive control treatment, IL-2 (either as recombinant material or supernatant), which enhances proliferation of lymphocytes.

[1331] One skilled in the art could easily modify the exemplified studies to test the activity of polynucleotides (e.g., gene therapy), antibodies, agonists, and/or antagonists and fragments and variants thereof.

### Example 46

### Assays for Protease Activity

[1332] The following assay may be used to assess protease activity of the polypeptides of the invention.

[1333] Gelatin and casein zymography are performed essentially as described (Heusen et al., Anal. Biochem., 102:196-202 (1980); Wilson et al., Journal of Urology, 149:653-658 (1993)). Samples are run on 10% polyacryamide/0.1% SDS gels containing 1% gelain orcasein, soaked in 2.5% triton at room temperature for 1 hour, and in 0.1 M glycine, pH 8.3 at 37° C. 5 to 16 hours. After staining in amido black areas of proteolysis apear as clear areas agains the blue-black background. Trypsin (Sigma T8642) is used as a positive control.

[1334] Protease activity is also determined by monitoring the cleavage of n-a-benzoyl-L-arginine ethyl ester (BAEE) (Sigma B-4500. Reactions are set up in (25 mMNaPO₄, 1 mM EDTA, and 1 mM BAEE), pH 7.5. Samples are added and the change in adsorbance at 260 nm is monitored on the Beckman DU-6 spectrophotometer in the time-drive mode. Trypsin is used as a positive control.

[1335] Additional assays based upon the release of acid-soluble peptides from casein or hemoglobin measured as adsorbance at 280 nm or calorimetrically using the Folin method are performed as described in Bergmeyer, et al., Methods of Enzymatic Analysis, 5 (1984). Other assays involve the solubilization of chromogenic substrates (Ward, Applied Science, 251-317 (1983).

### Example 47

### Identifying Serine Protease Substrate Specificity

[1336] Methods known in the art or described herein may be used to determine the substrate specificity of the polypeptides of the present invention having serine protease activity. A preferred method of determining substrate specificity is by the use of positional scanning synthetic combinatorial libraries as described in GB 2 324 529 (incorporated herein in its entirety).

### Example 48

### Ligand Binding Assays

[1337] The following assay may be used to assess ligand binding activity of the polypeptides of the invention.

[1338] Ligand binding assays provide a direct method for ascertaining receptor pharmacology and are adaptable to a high throughput format. The purified ligand for a polypeptide is radiolabeled to high specific activity (50-2000 Ci/mmol) for binding studies. A determination is then made that the process of radiolabeling does not diminish the activity of the ligand towards its polypeptide. Assay conditions for buffers, ions, pH and other modulators such as nucleotides are optimized to establish a workable signal to noise ratio for both membrane and whole cell polypeptide sources. For these assays, specific polypeptide binding is defined as total associated radioactivity minus the radioactivity measured in the presence of an excess of unlabeled competing ligand. Where possible, more than one competing ligand is used to define residual nonspecific binding.

### Example 49

### Functional Assay in Xenopus Oocytes

[1339] Capped RNA transcripts from linearized plasmid templates encoding the polypeptides of the invention are synthesized in vitro with RNA polymerases in accordance with standard procedures. In vitro transcripts are suspended in water at a final concentration of 0.2 mg/mi. Ovarian lobes are removed from adult female toads, Stage V defolliculated oocytes are obtained, and RNA transcripts (10 ng/oocytc) are injected in a 50 nl bolus using a microinjection apparatus. Two electrode voltage clamps are used to measure the currents from individual Xenopus oocytes in response polypeptides and polypeptide agonist exposure. Recordings are made in Ca2+ free Barth's medium at room temperature. The Xenopus system can be used to screen known ligands and tissue/cell extracts for activating ligands.

### Example 50

### Microphysiometric Assays

[1340] Activation of a wide variety of secondary messenger systems results in extrusion of small amounts of acid from a cell. The acid formed is largely as a result of the increased metabolic activity required to fuel the intracellular signaling process. The pH changes in the media surrounding the cell are very small but are detectable by the CYTOSENSOR microphysiometer (Molecular Devices Ltd., Menlo Park, Calif.). The CYTOSENSOR is thus capable of detecting the activation of polypeptide which is coupled to an energy utilizing intracellular signaling pathway.

### Example51

### Extract/Cell Supernatant Screening

[1341] A large number of mammalian receptors exist for which there remains, as yet, no cognate activating ligand (agonist). Thus, active ligands for these receptors may not be included within the ligands banks as identified to date. Accordingly, the polypeptides of the invention can also be functionally screened (using calcium, cAMP, microphysiometer, oocyte electrophysiology, etc., functional screens) against tissue extracts to identify its natural ligands. Extracts that produce positive functional responses can be sequentially subfractionated until an activating ligand is isolated and identified.

### Example 52

### Calcium and cAMP Functional Assays

[1342] Seven transmembrane receptors which are expressed in HEK 293 cells have been shown to be coupled functionally to activation of PLC and calcium mobilization and/or cAMP stimulation or inhibition. Basal calcium levels in the HEK 293 cells in receptor-transfected or vector control cells were observed to be in the normal, 100 nM to 200 nM, range. HEK 293 cells expressing recombinant receptors are loaded with fura 2 and in a single day>150 selected ligands or tissue/cell extracts are evaluated for agonist induced calcium mobilization. Similarly, HEK 293 cells expressing recombinant receptors are evaluated for the stimulation or inhibition of cAMP production using standard cAMP quantitation assays. Agonists presenting a calcium transient or cAMP fluctuation are tested in vector control cells to determine if the response is unique to the transfected cells expressing receptor.

### Example 53

### ATP-binding assay

[1343] The following assay may be used to assess ATP-binding activity of polypeptides of the invention.

[1344] ATP-binding activity of the polypeptides of the invention may be detected using the ATP-binding assay described in U.S. Pat. No. 5,858,719, which is herein incorporated by reference in its entirety. Briefly, ATP-binding to polypeptides of the invention is measured via photoaffinity labeling with 8-azido-ATP in a competition assay. Reaction mixtures containing 1 mg/ml of the ABC, transport protein of the present invention are incubated with varying concentrations of ATP, or the non-hydrolyzable ATP analog adenyl-5′-imidodiphosphate for 10 minutes at 4° C. A mixture of 8-azido-ATP (Sigma Chem. Corp., St. Louis, Mo.) plus 8-azido-ATP (³²P-ATP) (5 mCi/μmol, ICN, Irvine Calif.) is added to a final concentration of 100 μM and 0.5 ml aliquots are placed in the wells of a porcelain spot plate on ice. The plate is irradiated using a short wave 254 nm UV lamp at a distance of 2.5 cm from the plate for two one-minute intervals with a one-minute cooling interval in between. The reaction is stopped by addition of dithiothreitol to a final concentration of 2 mM. The incubations are subjected to SDS-PAGE electrophoresis, dried, and autoradiographed. Protein bands corresponding to the particular polypeptides of the invention are excised, and the radioactivity quantified. A decrease in radioactivity with increasing ATP or adenly-5′-imidodiphosphate provides a measure of ATP affinity to the polypeptides.

### Example 54

### Small Molecule Screening

[1345] This invention is particularly useful for screening therapeutic compounds by using the polypeptides of the invention, or binding fragments thereof, in any of a variety of drug screening techniques. The polypeptide or fragment employed in such a test may be affixed to a solid support, expressed on a cell surface, free in solution, or located intracellularly. One method of drug screening utilizes eukaryotic or prokaryotic host cells which are stably transformed with recombinant nucleic acids expressing the polypeptide or fragment. Drugs are screened against such transformed cells in competitive binding assays. One may measure, for example, the formulation of complexes between the agent being tested and polypeptide of the invention.

[1346] Thus, the present invention provides methods of screening for drugs or any other agents which affect activities mediated by the polypeptides of the invention. These methods comprise contacting such an agent with a polypeptide of the invention or fragment thereof and assaying for the presence of a complex between the agent and the polypeptide or fragment thereof, by methods well known in the art. In such a competitive binding assay, the agents to screen are typically labeled. Following incubation, free agent is separated from that present in bound form, and the amount of free or uncomplexed label is a measure of the ability of a particular agent to bind to the polypeptides of the invention.

[1347] Another technique for drug screening provides high throughput screening for compounds having suitable binding affinity to the polypeptides of the invention, and is described in great detail in European Patent Application 84/03564, published on Sep. 13, 1984, which is herein incorporated by reference in its entirety. Briefly stated, large numbers of different small molecule test compounds are synthesized on a solid substrate, such as plastic pins or some other surface. The test compounds are reacted with polypeptides of the invention and washed. Bound polypeptides are then detected by methods well known in the art. Purified polypeptides are coated directly onto plates for use in the aforementioned drug screening techniques. In addition, non- neutralizing antibodies may be used to capture the peptide and immobilize it on the solid support.

[1348] This invention also contemplates the use of competitive drug screening assays in which neutralizing antibodies capable of binding polypeptides of the invention specifically compete with a test compound for binding to the polypeptides or fragments thereof. In this manner, the antibodies are used to detect the presence of any peptide which shares one or more antigenic epitopes with a polypeptide of the invention.

### Example 55

### Phosphorylation Assay

[1349] In order to assay for phosphorylation activity of the polypeptides of the invention, a phosphorylation assay as described in U.S. Pat. No. 5,958,405 (which is herein incorporated by reference) is utilized. Briefly, phosphorylation activity may be measured by phosphorylation of a protein substrate using gamma-labeled ³²P-ATP and quantitation of the incorporated radioactivity using a gamma radioisotope counter. The polypeptides of the invention are incubated with the protein substrate, ³²P-ATP, and a kinase buffer. The ³²P incorporated into the substrate is then separated from free ³²P-ATP by electrophoresis, and the incorporated ³²P is counted and compared to a negative control. Radioactivity counts above the negative control are indicative of phosphorylation activity of the polypeptides of the invention.

### Example 56

### Detection of Phosphorylation Activity (Activation) of the Polypeptides of the Invention in the Presence of Polypeptide Ligands

[1350] Methods known in the art or described herein may be used to determine the phosphorylation activity of the polypeptides of the invention. A preferred method of determining phosphorylation activity is by the use of the tyrosine phosphorylation assay as described in U.S. Pat. No. 5,817,471 (incorporated herein by reference).

### Example 57

### Identification of Signal Transduction Proteins that Interact with Polypeptides of the Present Invention

[1351] The purified polypeptides of the invention are research tools for the identification, characterization and purification of additional signal transduction pathway proteins or receptor proteins. Briefly, labeled receptor PTK polypeptide is useful as a reagent for the purification of molecules with which it interacts. In one embodiment of affinity purification, receptor PTK polypeptide is covalently coupled to a chromatography column. Cell-free extract derived from putative target cells, such as carcinoma tissues, is passed over the column, and molecules with appropriate affinity bind to the receptor PTK polypeptides, or specific phosphotyrosine-recognition domains thereof. The receptor PTK polypeptide interacting protein-complex is recovered from the column, dissociated, and the recovered molecule subjected to N-terminal protein sequencing. This amino acid sequence is then used to identify the captured molecule or to design degenerate oligonucleotide probes for cloning the relevant gene from an appropriate cDNA library.

### Example 58

### IL-6 Bioassay

[1352] To test the proliferative effects of the polypeptides of the invention, the IL-6 Bioassay as described by Marz et al. is utilized (Proc. Natl. Acad. Sci., U.S.A., 95:3251-56 (1998), which is herein incorporated by reference). Briefly, IL-6 dependent B9 murine cells are washed three times in IL-6 free medium and plated at a concentration of 5,000 cells per well in 50 μl, and 50 μl of the IL-6-like polypeptide is added. After 68 hrs. at 37° C., the number of viable cells is measured by adding the tetrazolium salt thiazolyl blue (MTT) and incubating for a further 4 hrs. at 37° C. B9 cells are lysed by SDS and optical density is measured at 570 nm. Controls containing IL-6 (positive) and no cytokine (negative) are utilized. Enhanced proliferation in the test sample(s) relative to the negative control is indicative of proliferative effects mediated by polypeptides of the invention.

### Example 59

### Support of Chicken Embryo Neuron Survival

[1353] To test whether sympathetic neuronal cell viability is supported by polypeptides of the invention, the chicken embryo neuronal survival assay of Senaldi et al is utilized (Proc. Natl. Acad. Sci., U.S.A., 96:11458-63 (1998), which is herein incorporated by reference). Briefly, motor and sympathetic neurons are isolated from chicken embryos, resuspended in L15 medium (with 10% FCS, glucose, sodium selenite, progesterone, conalbumin, putrescine, and insulin; Life Technologies, Rockville, Md.) and Dulbecco's modified Eagles medium [with 10% FCS, glutamine, penicillin, and 25 mM Hepes buffer (pH 7.2); Life Technologies, Rockville, Md.], respectively, and incubated at 37° C. in 5% CO₂ in the presence of different concentrations of the purified IL-6-like polypeptide, as well as a negative control lacking any cytokine. After 3 days, neuron survival is determined by evaluation of cellular morphology, and through the use of the colorimetric assay of Mosmann (Mossman, T., J. Immunol. Methods, 65:55-63 (1983)). Enhanced neuronal cell viability as compared to the controls lacking cytokine is indicative of the ability of the inventive purified IL-6-like polypeptide(s) to enhance the survival of neuronal cells.

### Example 60

### Assay for Phosphatase Activity

[1354] The following assay may be used to assess serine/threonine phosphatase (PTPase) activity of the polypeptides of the invention.

[1355] In order to assay for serine/threonine phosphatase (PTPase) activity, assays can be utilized which are widely known to those skilled in the art. For example, the serine/threonine phosphatase (PSPase) activity is measured using a PSPase assay kit from New England Biolabs, Inc. Myelin basic protein (MyBP), a substrate for PSPase, is phosphorylated on serine and threonine residues with cAMP-dependent Protein Kinase in the presence of [³²P]ATP. Protein serine/threonine phosphatase activity is then determined by measuring the release of inorganic phosphate from 32P-labeled MyBP.

### Example 61

### Interaction of Serine/Threonine Phosphatases with Other Proteins

[1356] The polypeptides of the invention with serine/threonine phosphatase activity as determined in Example 60 are research tools for the identification, characterization and purification of additional interacting proteins or receptor proteins, or other signal transduction pathway proteins. Briefly, labeled polypeptide(s) of the invention is useful as a reagent for the purification of molecules with which it interacts. In one embodiment of affinity purification, polypeptide of the invention is covalently coupled to a chromatography column. Cell-free extract derived from putative target cells, such as neural or liver cells, is passed over the column, and molecules with appropriate affinity bind to the polypeptides of the invention. The polypeptides of the invention-complex is recovered from the column, dissociated, and the recovered molecule subjected to N-terminal protein sequencing. This amino acid sequence is then used to identify the captured molecule or to design degenerate oligonucleotide probes for cloning the relevant gene from an appropriate cDNA library.

### Example 62

### Assaying for Heparanase Activity

[1357] In order to assay for heparanase activity of the polypeptides of the invention, the heparanase assay described by Vlodavsky et al is utilized (Vlodavsky, I., et al., Nat. Med., 5:793-802 (1999)). Briefly, cell lysates, conditioned media or intact cells (1×10⁶ cells per 35-mm dish) are incubated for 18 hrs at 37° C., pH 6.2-6.6, with ³⁵S-labeled ECM or soluble ECM derived peak I proteoglycans. The incubation medium is centrifuged and the supernatant is analyzed by gel filtration on a Sepharose CL-6B column (0.9×30 cm). Fractions are eluted with PBS and their radioactivity is measured. Degradation fragments of heparan sulfate side chains are eluted from Sepharose 6B at 0.5<Kₐᵥ<0.8 (peak II). Each experiment is done at least three times. Degradation fragments corresponding to “peak II,” as described by Vlodavsky et al., is indicative of the activity of the polypeptides of the invention in cleaving heparan sulfate.

### Example 63

### Immobilization of Biomolecules

[1358] This example provides a method for the stabilization of polypeptides of the invention in non-host cell lipid bilayer constucts (see, e.g., Bieri et al., Nature Biotech 17:1105-1108 (1999), hereby incorporated by reference in its entirety herein) which can be adapted for the study of polypeptides of the invention in the various functional assays described above. Briefly, carbohydrate-specific chemistry for biotinylation is used to confine a biotin tag to the extracellular domain of the polypeptides of the invention, thus allowing uniform orientation upon immobilization. A 50 uM solution of polypeptides of the invention in washed membranes is incubated with 20 mM NaIO4 and 1.5 mg/ml (4 mM) BACH or 2 mg/ml (7.5 mM) biotin-hydrazide for 1 hr at room temperature (reaction volume, 150 ul). Then the sample is dialyzed (Pierce Slidealizer Cassett, 10 kDa cutoff; Pierce Chemical Co., Rockford Ill.) at 4C first for 5 h, exchanging the buffer after each hour, and finally for 12 h against 500 ml buffer R (0.15 M NaCl, 1 mM MgCl2, 10 mM sodium phosphate, pH7). Just before addition into a cuvette, the sample is diluted 1:5 in buffer ROG50 (Buffer R supplemented with 50 mM octylglucoside).

### Example 64

### TAQMAN

[1359] Quantitative PCR (QPCR). Total RNA from cells in culture are extracted by Trizol separation as recommended by the supplier (Life Technologies). (Total RNA is treated with DNase I (Life Technologies) to remove any contaminating genomic DNA before reverse transcription.) Total RNA (50 ng) is used in a one-step, 50 ul, RT-QPCR, consisting of Taqman Buffer A (Perkin-Elmer; 50 mM KCl/10 mM Tris, pH 8.3), 5.5 mM MgCl₂, 240 μM each dNTP, 0.4 units RNase inhibitor(Promega), 8% glycerol, 0.012% Tween-20, 0.05% gelatin, 0.3 uM primers, 0.1 uM probe, 0.025 units Amplitaq Gold (Perkin-Elmer) and 2.5 units Superscript II reverse transcriptase (Life Technologies). As a control for genomic contamination, parallel reactions are setup without reverse transcriptase. The relative abundance of (unknown) and 18S RNAs are assessed by using the Applied Biosystems Prism 7700 Sequence Detection System (Livak, K. J., Flood, S. J., Marmaro, J., Giusti, W. & Deetz, K. (1995) PCR Methods Appl. 4, 357-362). Reactions are carried out at 48° C. for 30 min, 95° C. for 10 min, followed by 40 cycles of 95° C. for 15 s, 60° C. for 1 min. Reactions are performed in triplicate.

[1360] Primers (f & r) and FRET probes sets are designed using Primer Express Software (Perkin-Elmer). Probes are labeled at the 5′-end with the reporter dye 6-FAM and on the 3′-end with the quencher dye TAMRA (Biosource International, Camarillo, Calif. or Perkin-Elmer).

### Example 65

### Assays for Metalloproteinase Activity

[1361] Metalloproteinases (EC 3.4.24.-) are peptide hydrolases which use metal ions, such as Zn²⁺, as the catalytic mechanism. Metalloproteinase activity of polypeptides of the present invention can be assayed according to the following methods.

[1362] Proteolysis of Alpha-2-macroglobulin

[1363] To confirm protease activity, purified polypeptides of the invention are mixed with the substrate alpha-2-macroglobulin (0.2 unit/ml; Boehringer Mannheim, Germany) in 1× assay buffer (50 mM HEPES, pH 7.5, 0.2 M NaCl, 10 mM CaCl₂, 25 μM ZnCl₂ and 0.05% Brij-35) and incubated at 37° C. for 1-5 days. Trypsin is used as positive control. Negative controls contain only alpha-2-macroglobulin in assay buffer. The samples are collected and boiled in SDS-PAGE sample buffer containing 5% 2-mercaptoethanol for 5-min, then loaded onto 8% SDS-polyacrylamide gel. After electrophoresis the proteins are visualized by silver staining. Proteolysis is evident by the appearance of lower molecular weight bands as compared to the negative control.

[1364] Inhibition of Alpha-2-macroglobulin Proteolysis by Inhibitors of Metalloproteinases

[1365] Known metalloproteinase inhibitors (metal chelators (EDTA, EGTA, AND HgCl₂), peptide metalloproteinase inhibitors (TIMP-1 and TIMP-2), and commercial small molecule MMP inhibitors) are used to characterize the proteolytic activity of polypeptides of the invention. The three synthetic MMP inhibitors used are: MMP inhibitor I, [IC₅₀-1.0 μM against MMP-1 and MMP-8; IC₅₀=30 μM against MMP-9; IC₅₀=150 μM against MMP-3]; MMP-3 (stromelysin-1) inhibitor I [IC₅₀=5 μM against MMP-3], and MMP-3 inhibitor II [Kᵢ=130 nM against MMP-3]; inhibitors available through Calbiochem, catalog # 444250, 444218, and 444225, respectively). Briefly, different concentrations of the small molecule MMP inhibitors are mixed with purified polypeptides of the invention (50 μg/ml) in 22.9 μl of 1× HEPES buffer (50 mM HEPES, pH 7.5, 0.2 M NaCl, 10 mM CaCl₂, 25 μM ZnCl₂ and 0.05% Brij-35) and incubated at room temperature (24° C.) for 2-hr, then 7.1 μl of substrate alpha-2-macroglobulin (0.2 unit/ml) is added and incubated at 37° C. for 20-hr. The reactions are stopped by adding 4× sample buffer and boiled immediately for 5 minutes. After SDS-PAGE, the protein bands are visualized by silver stain.

[1366] Synthetic Fluorogenic Peptide Substrates Cleavage Assay

[1367] The substrate specificity for polypeptides of the invention with demonstrated metalloproteinase activity can be determined using synthetic fluorogenic peptide substrates (purchased from BACHEM Bioscience Inc). Test substrates include, M-1985, M-2225, M-2105, M-2110, and M-2255. The first four are MMP substrates and the last one is a substrate of tumor necrosis factor-α (TNF-α) converting enzyme (TACE). All the substrates are prepared in 1:1 dimethyl sulfoxide (DMSO) and water. The stock solutions are 50-500 μM. Fluorescent assays are performed by using a Perkin Elmer LS 50B luminescence spectrometer equipped with a constant temperature water bath. The excitation λ is 328 nm and the emission λ is 393 nm. Briefly, the assay is carried out by incubating 176 μl 1× HEPES buffer (0.2 M NaCl, 10 mM CaCl₂, 0.05% Brij-35 and 50 mM HEPES, pH 7.5) with 4 μl of substrate solution (50 μM) at 25° C. for 15 minutes, and then adding 20 μl of a purified polypeptide of the invention into the assay cuvett. The final concentration of substrate is 1 μM. Initial hydrolysis rates are monitored for 30-min.

### Example 66

### Characterization of the cDNA Contained in a Deposited Plasmid

[1368] The size of the cDNA insert contained in a deposited plasmid may be routinely determined using techniques known in the art, such as PCR amplification using synthetic primers hybridizable to the 3′ and 5′ ends of the cDNA sequence. For example, two primers of 17-30 nucleotides derived from each end of the cDNA (i.e., hybridizable to the absolute 5′ nucleotide or the 3′ nucleotide end of the sequence of SEQ ID NO:X, respectively) are synthesized and used to amplify the cDNA using the deposited cDNA plasmid as a template. The polymerase chain reaction is carried out under routine conditions, for instance, in 25 ul of reaction mixture with 0.5 ug of the above cDNA template. A convenient reaction mixture is 1.5-5 mM MgCl₂, 0.01% (w/v) gelatin, 20 uM each of dATP, dCTP, dGTP, dTTP, 25 pmol of each primer and 0.25 Unit of Taq polymerase. Thirty five cycles of PCR (denaturation at 94 degree C. for 1 min; annealing at 55 degree C. for 1 min; elongation at 72 degree C. for 1 min) are performed with a Perkin-Elmer Cetus automated thermal cycler. The amplified product is analyzed by agarose gel electrophoresis. The PCR product is verified to be the selected sequence by subcloning and sequencing the DNA product.

[1369] Use of the above methodologies and/or other methodologies known in the art generates fragments from the clone corresponding to the approximate fragments described in Table 8, below. Accordingly, Table 8 provides a physical characterization of certain clones encompassed by the invention. The first column provides the unique clone identifier, “Clone ID NO:Z,” for cDNA clones of the invention, as described in Table 1A. The second column provides the approximate size of the cDNA insert contained in the corresponding cDNA clone.

TABLE 8

| | cDNA |
|---|---|
| Clone ID | Insert |
| NO: Z | Size: |
| HELGH89 | 300 |
| HEMEF34 | 1200 |
| HELGW31 | 1700 |
| HELFN75 | 700 |
| HELDK22 | 1000 |

[1370] It will be clear that the invention may be practiced otherwise than as particularly described in the foregoing description and examples. Numerous modifications and variations of the present invention are possible in light of the above teachings and, therefore, are within the scope of the appended claims.

[1371] The entire disclosure of each document cited (including patents, patent applications, journal articles, abstracts, laboratory manuals, books, or other disclosures) in the Background of the Invention, Detailed Description, and Examples is hereby incorporated herein by reference. In addition, the CD-R copy of the sequence listing submitted herewith and the corresponding computer readable form are both incorporated herein by reference in their entireties. The specification and Sequence Listing of each of the following U.S. applications are herein incorporated by reference in their entirety: Application No. 60/179,065, filed on Jan. 31, 2000; Application No. 60/180,628, filed on Feb. 4, 2000; Application No. 60/214,886, filed on Jun. 28, 2000; Application No. 60/217,487, filed on Jul. 11, 2000; Application No. 60/225,758, filed on Aug. 14, 2000; Application No. 60/220,963, filed on Jul. 26, 2000; Application No. 60/217,496, filed on Jul. 11, 2000; Application No. 60/225,447, filed on Aug. 14, 2000; Application No. 60/218,290, filed on Jul. 14, 2000; Application No. 60/225,757 , filed on Aug. 14, 2000; Application No. 60/226,868, filed on Aug. 22, 2000; Application No. 60/216,647, filed on Jul. 7, 2000; Application No. 60/225,267, filed on Aug. 14, 2000; Application No. 60/216,880, filed on Jul. 7, 2000; Application No. 60/225,270, filed on Aug. 14, 2000; Application No. 60/251,869, filed on Dec. 8, 2000; Application No. 60/235,834, filed on Sep. 27, 2000; Application No. 60/234,274, filed on Sep. 21, 2000; Application No. 60/234,223, filed on Sep. 21, 2000; Application No. 60/228,924, filed on Aug. 30, 2000; Application No. 60/224,518, filed on Aug. 14, 2000; Application No. 60/236,369, filed on Sep. 29, 2000; Application No. 60/224,519, filed on Aug. 14, 2000; Application No. 60/220,964, filed on Jul. 26, 2000; Application No. 60/241,809, filed on Oct. 20, 2000; Application No. 60/249,299, filed on Nov. 17, 2000; Application No. 60/236,327, filed on Sep. 29, 2000; Application No. 60/241,785, filed on Oct. 20, 2000; Application No. 60/244,617, filed on Nov. 1, 2000; Application No. 60/225,268, filed on Aug. 14, 2000; Application No. 60/236,368, filed on Sep. 29, 2000; Application No. 60/251,856, filed on Dec. 8, 2000; Application No. 60/251,868, filed on Dec. 8, 2000; Application No. 60/229,344, filed on Sep. 1, 2000; Application No. 60/234,997, filed on Sep. 25, 2000; Application No. 60/229,343, filed on Sep. 1, 2000; Application No. 60/229,345, filed on Sep. 1, 2000; Application No. 60/229,287, filed on Sep. 1, 2000; Application No. 60/229,513, filed on Sep. 5, 2000; Application No. 60/231,413, filed on Sep. 8, 2000; Application No. 60/229,509, filed on Sep. 5, 2000; Application No. 60/236,367, filed on Sep. 29, 2000; Application No. 60/237,039, filed on Oct. 2, 2000; Application No. 60/237,038, filed on Oct. 2, 2000; Application No. 60/236,370, filed on Sep. 29, 2000; Application No. 60/236,802, filed on Oct. 2, 2000; Application No. 60/237,037, filed on Oct. 2, 2000; Application No. 60/237,040, filed on Oct. 2, 2000; Application No. 60/240,960, filed on Oct. 20, 2000; Application No. 60/239,935, filed on Oct. 13, 2000; Application No. 60/239,937, filed on Oct. 13, 2000; Application No. 60/241,787, filed on Oct. 20, 2000; Application No. 60/246,474, filed on Nov. 8, 2000; Application No. 60/246,532, filed on Nov. 8, 2000; Application No. 60/249,216, filed on Nov. 17, 2000; Application No. 60/249,210, filed on Nov. 17, 2000; Application No. 60/226,681, filed on Aug. 22, 2000; Application No. 60/225,759, filed on Aug. 14, 2000; Application No. 60/225,213, filed on Aug. 14, 2000; Application No. 60/227,182, filed on Aug. 22, 2000; Application No. 60/225,214, filed on Aug. 14, 2000; Application No. 60/235,836, filed on Sep. 27, 2000; Application No. 60/230,438, filed on Sep. 6, 2000; Application No. 60/215,135, filed on Jun. 30, 2000; Application No. 60/225,266, filed on Aug. 14, 2000; Application No. 60/249,218, filed on Nov. 17, 2000; Application No. 60/249,208, filed on Nov. 17, 2000; Application No. 60/249,213, filed on Nov. 17, 2000; Application No. 60/249,212, filed on Nov. 17, 2000; Application No. 60/249,207, filed on Nov. 17, 2000; Application No. 60/249,245, filed on Nov. 17, 2000; Application No. 60/249,244, filed on Nov. 17, 2000; Application No. 60/249,217, filed on Nov. 17, 2000; Application No. 60/249,211, filed on Nov. 17, 2000; Application No. 60/249,215, filed on Nov. 17, 2000; Application No. 60/249,264, filed on Nov. 17, 2000; Application No. 60/249,214, filed on Nov. 17, 2000; Application No. 60/249,297, filed on Nov. 17, 2000; Application No. 60/232,400, filed on Sep. 14, 2000; Application No. 60/231,242, filed on Sep. 8, 2000; Application No. 60/232,081, filed on Sep. 8, 2000; Application No. 60/232,080, filed on Sep. 8, 2000; Application No. 60/231,414, filed on Sep. 8, 2000; Application No. 60/231,244, filed on Sep. 8, 2000; Application No. 60/233,064, filed on Sep. 14, 2000; Application No. 60/233,063, filed on Sep. 14, 2000; Application No. 60/232,397, filed on Sep. 14, 2000; Application No. 60/232,399, filed on Sep. 14, 2000; Application No. 60/232,401, filed on Sep. 14, 2000; Application No. 60/241,808, filed on Oct. 20, 2000; Application No. 60/241,826, filed on Oct. 20, 2000; Application No. 60/241,786, filed on Oct. 20, 2000; Application No. 60/241,221, filed on Oct. 20, 2000; Application No. 60/246,475, filed on Nov. 8, 2000; Application No. 60/231,243, filed on Sep. 8, 2000; Application No. 60/233,065, filed on Sep. 14, 2000; Application No. 60/232,398, filed on Sep. 14, 2000; Application No. 60/234,998, filed on Sep. 25, 2000; Application No. 60/246,477, filed on Nov. 8, 2000; Application No. 60/246,528, filed on Nov. 8, 2000; Application No. 60/246,525, filed on Nov. 8, 2000; Application No. 60/246,476, filed on Nov. 8, 2000; Application No. 60/246,526, filed on Nov. 8, 2000; Application No. PT172, filed on Nov. 17, 2000; Application No. 60/246,527, filed on Nov. 8, 2000; Application No. 60/246,523, filed on Nov. 8, 2000; Application No. 60/246,524, filed on Nov. 8, 2000; Application No. 60/246,478, filed on Nov. 8, 2000; Application No. 60/246,609, filed on Nov. 8, 2000; Application No. 60/246,613, filed on Nov. 8, 2000; Application No. 60/249,300, filed on Nov. 17, 2000; Application No. 60/249,265, filed on Nov. 17, 2000; Application No. 60/246,610, filed on Nov. 8, 2000; Application No. 60/246,611, filed on Nov. 8, 2000; Application No. 60/230,437, filed on Sep. 6, 2000; Application No. 60/251,990, filed on Dec. 8, 2000; Application No. 60/251,988, filed on Dec. 5, 2000; Application No. 60/251,030, filed on Dec. 5, 2000; Application No. 60/251,479, filed on Dec. 6, 2000; Application No. PJ005, filed on Dec. 5, 2000; Application No. PJ006, filed on Dec. 1, 2000; Application No. 60/251,989, filed on Dec. 8, 2000; Application No. 60/250,391, filed on Dec. 1, 2000; and Application No. 60/254,097, filed on Dec. 11, 2000.

[1372] Moreover, the microfiche copy and the corresponding computer readable form of the Sequence Listing of U.S. application Ser. No. 60/179,065, and the hard copy of and the corresponding computer readable form of the Sequence Listing of U.S. application Ser. No. 60/180,628 are also incorporated herein by reference in their entireties.

What is claimed is:

1. An isolated nucleic acid molecule comprising a polynucleotide having a nucleotide sequence at least 95% identical to a sequence selected from the group consisting of:
(a) a polynucleotide fragment of SEQ ID NO:X or a polynucleotide fragment of the cDNA sequence contained in Clone ID NO:Z, which is hybridizable to SEQ ID NO:X;
(b) a polynucleotide encoding a polypeptide fragment of SEQ ID NO:Y or a polypeptide fragment encoded by the cDNA sequence contained in cDNA Clone ID NO:Z, which is hybridizable to SEQ ID NO:X;
(c) a polynucleotide encoding a polypeptide fragment of a polypeptide encoded by SEQ ID NO:X or a polypeptide fragment encoded by the cDNA sequence contained in cDNA Clone ID NO:Z, which is hybridizable to SEQ ID NO:X;
(d) a polynucleotide encoding a polypeptide domain of SEQ ID NO:Y or a polypeptide domain encoded by the cDNA sequence contained in cDNA Clone ID NO:Z, which is hybridizable to SEQ ID NO:X;
(e) a polynucleotide encoding a polypeptide epitope of SEQ ID NO:Y or a polypeptide epitope encoded by the cDNA sequence contained in cDNA Clone ID NO:Z, which is hybridizable to SEQ ID NO:X;
(f) a polynucleotide encoding a polypeptide of SEQ ID NO:Y or the cDNA sequence contained in cDNA Clone ID NO:Z, which is hybridizable to SEQ ID NO:X, having biological activity;
(g) a polynucleotide which is a variant of SEQ ID NO:X;
(h) a polynucleotide which is an allelic variant of SEQ ID NO:X;
(i) a polynucleotide which encodes a species homologue of the SEQ ID NO:Y;
(j) a polynucleotide capable of hybridizing under stringent conditions to any one of the polynucleotides specified in (a)-(i), wherein said polynucleotide does not hybridize under stringent conditions to a nucleic acid molecule having a nucleotide sequence of only A residues or of only T residues.

2. The isolated nucleic acid molecule of claim 1, wherein the polynucleotide fragment comprises a nucleotide sequence encoding a protein.

3. The isolated nucleic acid molecule of claim 1, wherein the polynucleotide fragment comprises a nucleotide sequence encoding the sequence identified as SEQ ID NO:Y or the polypeptide encoded by the cDNA sequence contained in cDNA Clone ID NO:Z, which is hybridizable to SEQ ID NO:X.

4. The isolated nucleic acid molecule of claim 1, wherein the polynucleotide fragment comprises the entire nucleotide sequence of SEQ ID NO:X or the cDNA sequence contained in cDNA Clone ID NO:Z, which is hybridizable to SEQ ID NO:X.

5. The isolated nucleic acid molecule of claim 2, wherein the nucleotide sequence comprises sequential nucleotide deletions from either the C-terminus or the N-terminus.

6. The isolated nucleic acid molecule of claim 3, wherein the nucleotide sequence comprises sequential nucleotide deletions from either the C-terminus or the N-terminus.

7. A recombinant vector comprising the isolated nucleic acid molecule of claim 1.

8. A method of making a recombinant host cell comprising the isolated nucleic acid molecule of claim 1.

9. A recombinant host cell produced by the method of claim 8.

10. The recombinant host cell of claim 9 comprising vector sequences.

11. An isolated polypeptide comprising an amino acid sequence at least 90% identical to a sequence selected from the group consisting of:
(a) a polypeptide fragment of SEQ ID NO:Y or the encoded sequence contained in cDNA Clone ID NO:Z;
(b) a polypeptide fragment of SEQ ID NO:Y or the encoded sequence contained in cDNA Clone ID NO:Z, having biological activity;
(c) a polypeptide domain of SEQ ID NO:Y or the encoded sequence contained in cDNA Clone ID NO:Z;
(d) a polypeptide epitope of SEQ ID NO:Y or the encoded sequence contained in cDNA Clone ID NO:Z;
(e) a full length protein of SEQ ID NO:Y or the encoded sequence contained in cDNA Clone ID NO:Z;
(f) a variant of SEQ ID NO:Y;
(g) an allelic variant of SEQ ID NO:Y; or
(h) a species homologue of the SEQ ID NO:Y.

12. The isolated polypeptide of claim 11, wherein the full length protein comprises sequential amino acid deletions from either the C-terminus or the N-terminus.

13. An isolated antibody that binds specifically to the isolated polypeptide of claim 11.

14. A recombinant host cell that expresses the isolated polypeptide of claim 11.

15. A method of making an isolated polypeptide comprising:
(a) culturing the recombinant host cell of claim 14 under conditions such that said polypeptide is expressed; and
(b) recovering said polypeptide.

16. The polypeptide produced by claim 15.

17. A method for preventing, treating, or ameliorating a medical condition, comprising administering to a mammalian subject a therapeutically effective amount of the polynucleotide of claim 1.

18. A method of diagnosing a pathological condition or a susceptibility to a pathological condition in a subject comprising:
(a) determining the presence or absence of a mutation in the polynucleotide of claim 1; and
(b) diagnosing a pathological condition or a susceptibility to a pathological condition based on the presence or absence of said mutation.

19. A method of diagnosing a pathological condition or a susceptibility to a pathological condition in a subject comprising:
(a) determining the presence or amount of expression of the polypeptide of claim 11 in a biological sample; and
(b) diagnosing a pathological condition or a susceptibility to a pathological condition based on the presence or amount of expression of the polypeptide.

20. A method for identifying a binding partner to the polypeptide of claim 11 comprising:
(a) contacting the polypeptide of claim 11 with a binding partner; and
(b) determining whether the binding partner effects an activity of the polypeptide.

21. The gene corresponding to the cDNA sequence of SEQ ID NO:Y.

22. A method of identifying an activity in a biological assay, wherein the method comprises:
(a) expressing SEQ ID NO:X in a cell;
(b) isolating the supernatant; a) (c) detecting an activity in a biological assay; and
(d) identifying the protein in the supernatant having the activity.

23. The product produced by the method of claim 20.

24. A method for preventing, treating, or ameliorating a medical condition, comprising administering to a mammalian subject a therapeutically effective amount of the polypeptide of claim 11.

The application's sequence listing, which the Patent Office published only in electronic form, follows.

SEQUENCE LISTING (2442 sequences)

SEQ ID NO: 1 - DNA, 733 bp, Homo sapiens
gggatccggagcccaaatcttctgacaaaactcacacatgcccaccgtgcccagcacctgaattcgagggtgcaccgtcagtcttcctcttccccccaaaacccaaggacaccctcatgatctcccggactcctgaggtcacatgcgtggtggtggacgtaagccacgaagaccctgaggtcaagttcaactggtacgtggacggcgtggaggtgcataatgccaagacaaagccgcgggaggagcagtacaacagcacgtaccgtgtggtcagcgtcctcaccgtcctgcaccaggactggctgaatggcaaggagtacaagtgcaaggtctccaacaaagccctcccaacccccatcgagaaaaccatctccaaagccaaagggcagccccgagaaccacaggtgtacaccctgcccccatcccgggatgagctgaccaagaaccaggtcagcctgacctgcctggtcaaaggcttctatccaagcgacatcgccgtggagtgggagagcaatgggcagccggagaacaactacaagaccacgcctcccgtgctggactccgacggctccttcttcctctacagcaagctcaccgtggacaagagcaggtggcagcaggggaacgtcttctcatgctccgtgatgcatgaggctctgcacaaccactacacgcagaagagcctctccctgtctccgggtaaatgagtgcgacggccgcgactctagaggat

SEQ ID NO: 2 - protein, 5 aa, Homo sapiens
  Site (3): Xaa equals any of the twenty naturally ocurring L-amino acids
WSXWS

SEQ ID NO: 3 - DNA, 86 bp, Artificial Sequence
  Primer_Bind: Synthetic sequence with 4 tandem copies of the GAS binding site found in the IRF1 promoter (Rothman et al., Immunity 1:457-468 (1994)), 18 nucleotides complementary to the SV40 early promoter, and a Xho I restriction site.
gcgcctcgagatttccccgaaatctagatttccccgaaatgatttccccgaaatgatttccccgaaatatctgccatctcaattag

SEQ ID NO: 4 - DNA, 27 bp, Artificial Sequence
  Primer_Bind: Synthetic sequence complementary to the SV40 promter; includes a Hind III restriction site.
gcggcaagctttttgcaaagcctaggc

SEQ ID NO: 5 - DNA, 271 bp, Artificial Sequence
  Protein_Bind: Synthetic promoter for use in biological assays; includes GAS binding sites found in the IRF1 promoter (Rothman et al., Immunity 1:457-468 (1994)).
ctcgagatttccccgaaatctagatttccccgaaatgatttccccgaaatgatttccccgaaatatctgccatctcaattagtcagcaaccatagtcccgcccctaactccgcccatcccgcccctaactccgcccagttccgcccattctccgccccatggctgactaattttttttatttatgcagaggccgaggccgcctcggcctctgagctattccagaagtagtgaggaggcttttttggaggcctaggcttttgcaaaaagctt

SEQ ID NO: 6 - DNA, 32 bp, Artificial Sequence
  Primer_Bind: Synthetic primer complementary to human genomic EGR-1 promoter sequence (Sakamoto et al., Oncogene 6:867-871 (1991)); includes a Xho I restriction site.
gcgctcgagggatgacagcgatagaaccccgg

SEQ ID NO: 7 - DNA, 31 bp, Artificial Sequence
  Primer_Bind: Synthetic primer complementary to human genomic EGR-1 promoter sequence (Sakamoto et al., Oncogene 6:867-871 (1991)); includes a Hind III restriction site.
gcgaagcttcgcgactccccggatccgcctc

SEQ ID NO: 8 - DNA, 12 bp, Homo sapiens
ggggactttccc

SEQ ID NO: 9 - DNA, 73 bp, Artificial Sequence
  Primer_Bind: Synthetic primer with 4 tandem copies of the NF-KB binding site (GGGGACTTTCCC), 18 nucleotides complementary to the 5' end of the SV40 early promoter sequence, and a XhoI restriction site.
gcggcctcgaggggactttcccggggactttccggggactttccgggactttccatcctgccatctcaattag

SEQ ID NO: 10 - DNA, 256 bp, Artificial Sequence
  Protein_Bind: Synthetic promoter for use in biological assays; includes NF-KB binding sites.
ctcgaggggactttcccggggactttccggggactttccgggactttccatctgccatctcaattagtcagcaaccatagtcccgcccctaactccgcccatcccgcccctaactccgcccagttccgcccattctccgccccatggctgactaattttttttatttatgcagaggccgaggccgcctcggcctctgagctattccagaagtagtgaggaggcttttttggaggcctaggcttttgcaaaaagctt

SEQ ID NO: 11 - DNA, 1266 bp, Homo sapiens
  SITE (664): n equals a,t,g, or c
  SITE (1200): n equals a,t,g, or c
  SITE (1205): n equals a,t,g, or c
  SITE (1251): n equals a,t,g, or c
  SITE (1252): n equals a,t,g, or c
ttgtgagtcttctcctttgtcctgacagagtttggatgtttcactctctctcttgcttccgtgtctccttatatttgtcatgtttcagaaattcccagaataattttcacccatgattagaaataggttggatcattctttctgtacccattctgaaggccaggataataggttgaagttctttatattttggaaaatggattttgtggtaaggtaggaactaacgggtgtgtgcatataaaggttaatgctgttgtatttggatgctgatctgtgctgtttwcatgacctctctcccacactatttgratcagtctgttcagaactgtgtgtttcacctgcagtgctctgtcccagtcccatgcccattcccatcacttcactgtgatggaaatagagtttatgttcaacagtggggcatgacctctgcaatttgcttgggaaagtcttccaagcaagatggacatgatgaatacaaataagatctactcaaagtacttcaaacaaaaaataaataattcattggctcatgtatcttggccacccagggaaggtctgacattgttagttagatccagagtttcaaatgtcatcaccatggatgtgtctttttctctctctcatttcccctccccatatctwgtcttttattwattataggttngtctcattccctggcaggctctctccctgtgataggaagagagtccccarcarccccagggtsacatagttgttatagtycattatggaatagaagagagaagagcattctcaataacccggcaaagttcccagggatgactctgatatgtctatgtctcaggtcacatttccatctatgaaccaatcatattcagaggtggaatgctaattggccaggcctgggtcatatatacaagtctagggaagaaatgagcttyatccctgtccaattgacatggactgattaggggtattaatggaagaggtgtgccaccacaaaagaatgtaccmtgggcagatcaaagaacatattctgtatgtcaggcttggcacaaaagaatgacacaagtaatatgctgtagatcagaacctctctgctaatattgcctttttagcatggttaaagatactaagatctagtactgtcactccagtatgtyccaattctacctacgtttattgaagggtcaacagttcctgatctcaacattggtnaggtngggggacttccaatttacgggccttgataaaacatttacactccgnnggtgtataatttaa

SEQ ID NO: 12 - DNA, 403 bp, Homo sapiens
  SITE (331): n equals a,t,g, or c
  SITE (402): n equals a,t,g, or c
gttgttcgagacttgcccaatgagtgagttggccgaaaagcaggggtcagaggtcacagatcccacagccaaggctgaggcacagtcctgcacctggatgttcaagccccaacctgtggacaggccagtgggctccagggagcagcacctgcaggttagccaggtcccggctggggaaagacagacagacagacacgtctttgagaccgagctcttcaggctcaagccgccctgtkgaaaaacggctgtgaratactgcascggttggaatccytccaggcagtttctcgtcmaaaaaagttttccaggcctggagcagcaaaagaaaaanagaccccggtatcgtggtcatcccgggttctgtcaaattccattggttttgaaattgtccatggtccctgna

SEQ ID NO: 13 - DNA, 240 bp, Homo sapiens
  SITE (189): n equals a,t,g, or c
  SITE (194): n equals a,t,g, or c
gttttggcagaaattaagcatctgtatttagataaaggtagtggtgggttggattttcatagcataagcatagttgctgaagatcaataatatcaaataatgggttcttggtgagggggaaaggaaatggggaagggggtcttttcactcaacagtttggaaatgctaatgattatttgtggttttcancccanaattcttcatatttgcttgcaagcttctatggcactgccgaattct

SEQ ID NO: 14 - DNA, 256 bp, Homo sapiens
  SITE (247): n equals a,t,g, or c
gaaaaggaacacagctgggtactttccacagaggtggcgcctgagaccagcttggcattcctgaggtgctaccacgggagatgccgggaagaacacgaaacctgcctgaacacaaaactgaccagggacatccctaaaaatactgcaccgcacttggaggcaccaagcaggaggaaakttttaactcctctccgtggtcatgtggctgtgaaaaccatggactgttctctcccatgaaargcctgtnatttggaaa

SEQ ID NO: 15 - DNA, 304 bp, Homo sapiens
  SITE (250): n equals a,t,g, or c
  SITE (296): n equals a,t,g, or c
  SITE (299): n equals a,t,g, or c
gcaactgccttaggacccctgtaagagttggggtcttgcctgagttggtttgccttcctaatccgagctacaagcatgttgggccacacttgaacgctcagggcacaagctgatgaggaggatgcagaccttgctgccctcagaaatcttcacctgtgtgttggacagagccttgcagcgtgggtcccamaagtggccctggtgtcttataacactccctaagctaggacccgtctccacaagttgccantgaattgagctgctttccaggacaggcaggattgggaacggggganccnaataa

SEQ ID NO: 16 - DNA, 264 bp, Homo sapiens
  SITE (172): n equals a,t,g, or c
  SITE (182): n equals a,t,g, or c
agcaggccccatactcgtctctgtccactctgcccactcatcccccaccatgtttcttgttcttatagccacggaagagctgaaggaattctttgccaaggcacgggctggctctgtgcggctcatcaaggttgtgattgaggacgagcagctcgtgctgggtgcctcgcangagccagtangccgctgggatcaggactatgacagggccgtgctgccactgctggacgcccagcagccctgctacctgctctaccgcctcga

SEQ ID NO: 17 - DNA, 288 bp, Homo sapiens
  SITE (279): n equals a,t,g, or c
ctccaatgtaaaacatctaaaggtgaggtcttgacgcatcccaacttgtttaaccccttgtcttccctttctcagtaaagggcgacacctacctgcctagttgcttgagcttggcattggctgcttatttctcatgttttattgatgactaattcctgctgattctatcatctaaacatacctcctcagttctcctcacctcctctccactctatctctactgactctacctttctctgggccaagtcaccatcatcttttccccagaagaatgcaatncccgggtct

SEQ ID NO: 18 - DNA, 488 bp, Homo sapiens
  SITE (432): n equals a,t,g, or c
gggacgccagcgcctgcagaggctgagcagggaaaaagccagtgccccagcggaagcacagctcagagctggkctgccatggacatcctggtcccactcctgcagctgctggtgctgcttcttaccctgcccctgcacctcatggctctgctgggctgctggcagcccctgtgcaaaagctacttcccctacctgatggccgtgctgactcccaagagcaaccgcaagatggagagcaagaaacgggagctcttcagccagataaaggggcttacaggagcctccgggaaagtggccctactggagctgggctgcrgaaccggagccaactttcagttctacccaccgggctgcagggtcacctgccttagacccaaatccccactttgagaagttcctgacaaagagcatggctgagaacaggcactccantatgagcggtttgtggtggttctggagaggacatgagacagttggttgatggttcc

SEQ ID NO: 19 - DNA, 346 bp, Homo sapiens
  SITE (2): n equals a,t,g, or c
cngtctgcatagaattcggcacgagcccagccatgccagtgtggtcctggagaaaagtgccacccagagactggggcctgtgtatgtcccccagggcacagtggtgcaccttgcaggattggtgagttctttgccctctccttcccacccattgtccccagggaactgggacctaggcccctcatacagtccctacttcctcctgagcacctctcccatgcagcagagccaagatgccattctgagtgagcaccccattccacacaggaatcaggarccctttactgtgatgccgaccactycartaacgtataactcgctkggtgcaagtgattggcattgcaag

SEQ ID NO: 20 - DNA, 422 bp, Homo sapiens
cggacaaagaggaggaacagaaacacgcccccaccagcactgtctccaagcaaagaaaaaacgtcatcagctgtgtcacagtccacgactccccctactccgactcctccagcaacaccagcccctactccgtgcagcagcgtgctgggcacaacaatgccaatgcctttgacaccaaggggagcctggagaatcactgcacggggaacccccgaaccatcatcgtgccacccctgaaaacccaggccagcgaagtattggtggagtgtgatagcctggtgccagtcaacaccagtcaccactcgtcctcctacaagtccaagtcctccagcaacgtgacctccaccagcggkcactcttcagggagctcatctggagccatcacctaccggcagcagcggccgggcccccacttccagcag

SEQ ID NO: 21 - DNA, 226 bp, Homo sapiens
cctcaggagctgggcacggcttgacggatcacgtggtggcaagcacagcttttgtgcagggaggaaagtggcagattttgatagagagcgtgccagcagttattaggaagaaatcgggaagtgtttggaaacagggctgctagcattcccaacaaagctggagaagtctctccaaagaacaaaaggcaagcacacgttcagggtgaggactttcttctctgttgac

SEQ ID NO: 22 - DNA, 331 bp, Homo sapiens
  SITE (272): n equals a,t,g, or c
  SITE (299): n equals a,t,g, or c
  SITE (314): n equals a,t,g, or c
gggaagacaggagggaaagaaaagtcctacaactgtcaggaatggggcacctttccctgtccctaagcaaagctccctcttcccactgccctccccagccccagctccctgtcctccccaacacctagtgagaaagacggtgcgtggaagggagtcccatgggcagatgcttacacgacctctttgtgaagcctcttctgggtttaacttcattcatcaatttattcttatgtcaaagcaatgaaacttttctttctggagccagataccantccaacaggttaaccgggtttttgccnaaattttacatttgncgggggatgctttgaac

SEQ ID NO: 23 - DNA, 139 bp, Homo sapiens
gagagtgagtttttgtagaggaataggagctttgaaaagctattgaggatgagaaactagaaagccaagtgcacagctcagggcagcatgkgtgctcagaaaagacctgagaaggccattagctttcacctctggcttg

SEQ ID NO: 24 - DNA, 806 bp, Homo sapiens
  SITE (36): n equals a,t,g, or c
  SITE (46): n equals a,t,g, or c
  SITE (78): n equals a,t,g, or c
  SITE (115): n equals a,t,g, or c
  SITE (804): n equals a,t,g, or c
aaggaacttcctatggaaagctcctaaccctctttnaagggaaccnaagctggagctccaccgcggtggcggccgctntagaactagtggatcccccgggctgcaggaattcggnacgagaactttgtgagtcaccagaaaaagccgtactgtcacgcccataaccctaagaacaacactttcaccagtgtctatcacactccattaaatctaaatgtgaggacatttccagaggccatcagtgggatccatgaccaagaagatggtgaacagtgtaaatcagtttttcattgggacatgaaatccaaggataaggaaggtgcacctaacaggcagccactggcaaatgagagagcctattggactggatatggggaagggaatgcttggtgcccaggagctctgccagaccccgaaattgtaaggatggttgaggctcgaaagtctcttggtgaggaatatacagaagactatgagcaacccaggggcaaggggagctttccagccatgatcacacctgcttatcaaagggccaagaaagccaaccagctggccagccaagtggagtataagagagggcatgatgaacgcatctccaggttctccacggtggcggatactcctgagctgctacggagcaaggctggggcacagcttcaaagtgatgtgagatacacagaggactatgaacaacaaagagggaaaggcagtttccctgcgatgatcacacccgyctrtcagatagccmaaagagccaatgactggcaagtgatgttaggtaccatcaacaatatcaaaatgaantg

SEQ ID NO: 25 - DNA, 313 bp, Homo sapiens
  SITE (285): n equals a,t,g, or c
  SITE (308): n equals a,t,g, or c
gacatcctgggaggtgggggtgtgtttattcctttgatgacactgggtctctgaggtactccaggccctccttgccccgggcttatcccttgacacacaggatcacccagactcaggggtcctycaggaattcactgcacgacctgcatcccaccatctcaccagcatctccagcaaccctacctgccccagagcgtcagcaccacctgtccccactgggccactcaccttaaggcatccagggtggatgatttcattgcagatggagcactccatgagcatgangttaaacttgccttctcctcttncaccg

SEQ ID NO: 26 - DNA, 181 bp, Homo sapiens
  SITE (153): n equals a,t,g, or c
gtatttaaggaagtattggtgttatgtgaaacttttgttttaagtgtccacatatggcattgtgatgtggaatatacttcttcctgtgggtcacagtccaaataatgtggaaaacacttacaagctgtggccccagtatctgcattctatctncccatggctgaggccaactcaccaccct

SEQ ID NO: 27 - DNA, 172 bp, Homo sapiens
agaaggcccctgacttccaagcagctgtttctcctctcctcctccaaacctttgagtcctggcacagtcatcctgaccctgggctccccagagaccctccctgattgggacagttgctcccgaggtggaaacccaggtctgggccagcactgcggatgtggacaggtagggt

SEQ ID NO: 28 - DNA, 378 bp, Homo sapiens
ctccccagaaattaatgcttttcatacaactttaggggcttcaaaaatactccccaccccacatgcctgtcccaaaccacaggcttccaaattgctcttcctatagatacggaaaccccgacagaggcctccaaggctctgcatgctgggcccccacctccatctccagtctcacctttctcccctgtgctcttcccaccccgccacgtcagtctcttcgtgcttgctggaaataccacctcaggtcctttgtccaggttgwttcctctgcctggaatgctctcctcctgccatctctactttttgctcagttgaattgcattagttggtgaatgtctgtctcttctcacttggatataagctccatgagagcaggac

SEQ ID NO: 29 - DNA, 463 bp, Homo sapiens
  SITE (224): n equals a,t,g, or c
  SITE (410): n equals a,t,g, or c
  SITE (420): n equals a,t,g, or c
  SITE (437): n equals a,t,g, or c
cccaggcggcccgaactctccctaaggcccaatcccaggggcctcgggcaacacccaagcagggcatcaaggctctarattttatgcggcatcagccctatcaacttaaaactrccatgttctgttttgatgaggttcccccgactcctggccctatcgcctcagggtcccccaaaactgcccgagtccaggagattcgccggttttccactccggcaccccancccactgcaaaacccctggctcccactgtgcttgccccccgagcaccactacactggatgaacccatctggaaaaacaaaatgggctcagcccctgttcctaacccacccctcctcccaaaagctcccagggcttgggggcttctcccactcctgcggtttccaggtaccaggccccgattttcanccaccagaanaagattgcaaactcatnttttgaagcctgggcaaggcaccatt

SEQ ID NO: 30 - DNA, 346 bp, Homo sapiens
  SITE (325): n equals a,t,g, or c
aattcggcacgagaaataatccaaaactctgtatagtcaagcagctttccagtaatgtttcagagcagttacggggacttagacttcctctattcctgccttaccccttactctgtggtagagattctaatgaatagataaaagaacattgcagcaaaaaccaaaataatgcagaccagctagtcagtgcacataatagtgttgactgtttgaggacagttcttttcctttttgctcctaagctcctgtsatatcttcatctttatcaccaggactccctgggagttgcttgctgaccctcctgttcagagcactgcatagcaanggtagtgggtaaccatgcaag

SEQ ID NO: 31 - DNA, 124 bp, Homo sapiens
  SITE (83): n equals a,t,g, or c
aattcggcacgagatcttaggaattaaatagaaagtaattagcccattgtccatatgtagaactgagctaaaaaaaaaaaagnttaaataatgtgagttagttgaaacttacattatgtaattg

SEQ ID NO: 32 - DNA, 370 bp, Homo sapiens
  SITE (318): n equals a,t,g, or c
  SITE (345): n equals a,t,g, or c
aattcggcagagctttgaccaccaccaccaccaaaataaacttgtataaacactgctttcaacatttgactcattcccaccaaatgttccttggctttccatcatagattctacctagtgtaaagtcttcccagtcatctggtcctttggtaatcgcttccattgtcagcatcacatgccacttctcctcaaaacacaaaccctactccagtgcagacgggcttctccactctacatttgcacaattsttccttcagccaagctttacgcrgatcttctcctttgttgraaaggttattctgccttattaagcctggncttttctggatcccctgatggggtgtnatccagttggtactgaggcaaaacc

SEQ ID NO: 33 - DNA, 311 bp, Homo sapiens
  SITE (294): n equals a,t,g, or c
  SITE (304): n equals a,t,g, or c
aggaaaaaaagaaaagttcctaaaatggcctgcaaagtcctgtgtgatctggtctttgttaccccagtcctgtgtgatctggtcttttttacccctctgactttatcctccactaaactcttgcccttgctcaatccactttggcgatggtggcctccttgcctttccttgccacagggtcttggccctgactcttcacctgcagcgaacttccactgacatttacatggctttctccctgctgtagtcaggttctccagagagacagagccaataggagrttatgatctgtgnttttcatatntcttgga

SEQ ID NO: 34 - DNA, 175 bp, Homo sapiens
aattcggcagagsaacaaacagagtttcacgcagagtttgaagaggagaatatccctgaaaaatatattttattcctgtggtgtacctatgaaatagtatccaatataccawaggcaactgaggagatagaggaccgggaaacgctggctctcctggcagcaaggagtgaaaacg

SEQ ID NO: 35 - DNA, 496 bp, Homo sapiens
  SITE (267): n equals a,t,g, or c
  SITE (299): n equals a,t,g, or c
  SITE (433): n equals a,t,g, or c
  SITE (466): n equals a,t,g, or c
agcccagagaaaaagctcattaccagaaacattgcagaagtcatcaaacaacaggagagtgcccaacggatgtatcaaaatggacaaaaaaagaaaaaagggaaaaaggtcaagaaacagccaaacagtattctaaaggaaataaaaaattctctgaggtcagtgcaagagaagaaaatggaagacagttcccgaccttytaccccacagagatcagctcatgagaatctcatggaagcaattcggggaagcagcataaaacagctnaagcgggtggaagttccagaagccctgcgatnaaaacatgatctttagaagaagatgcagaactgttcagtggtattacatgaaatgcattgtgagatgtttcttaaatactccttccattccaaatgatccctgattttaaattatctcaccattatcccaaganatcttaagaacatcagatgttcctcctgtaatntgaaataattcctttttatttctgaaaaaa

SEQ ID NO: 36 - DNA, 376 bp, Homo sapiens
  SITE (311): n equals a,t,g, or c
  SITE (336): n equals a,t,g, or c
  SITE (364): n equals a,t,g, or c
aattcggcagagctttagtgagttgggtcttatttctggacaggattatcaattgtggtaaggaagttatgttgacaatcacaaaagttatcaaagttacgccttcgggggtgctcactgtcattcagcgtgtagtgctaagtgctgaggacttaccaaacatcaatttagtttaaggtatctcatgtattttttcagtaaccagatcgttgccatcatgacattgaatgatttttacacacaaactgaatagcatctgtgctttatgattcaatcattctttcgcaccttcaaaacatatctagtaaggncctacttaagttcaaggcacactgntacgtgctgggggatgcaaagatggatnatttggggttcc

SEQ ID NO: 37 - DNA, 323 bp, Homo sapiens
  SITE (31): n equals a,t,g, or c
  SITE (294): n equals a,t,g, or c
  SITE (321): n equals a,t,g, or c
tccttctgtggtggctgcagattaagtctgnaccgtgccagaaatctcgttgcattttttratgtagcagaaatgaacctggttcattccatcttaacagctttasccaaatggctcagaagggatctacccgatttcataaagaagagttaatgtgccagtctggtttaatacaggtgcccttaaaatacatttttgttttgttttgttttctcacttccaagtttaacatgtccatgggacattgggctttrgtttccccaagatgagtccakgaaggaccttgttccagtntcccttgctggtttgggttccccagtnat

SEQ ID NO: 38 - DNA, 217 bp, Homo sapiens
  SITE (170): n equals a,t,g, or c
ggcagagtgcaaacttcacatagagaatgtccttccacaggggtcacctaggcagtacacttggaaaagacatgttaattgcatagcattctttcacttctagcctctctttatctcgccatttctctttgtggattttggtgtgcctttgtctatctctctttgttttnctgtctcctcctcccctcccctcttttctctctctctctctctctgg

SEQ ID NO: 39 - DNA, 210 bp, Homo sapiens
  SITE (137): n equals a,t,g, or c
acaatgaatttgccccggacgcgtgacataaagcagaacgccaaccggcagaccaatcacaaagccaaaaaaaccggatacgaaggtkcattgccagcttttcccattacggccacggaaccagcagccacatgctncggcttcagaacattaacccagttacctctgatttttaacatggtgtttcctggcagcccaggcaatgggggg

SEQ ID NO: 40 - DNA, 341 bp, Homo sapiens
  SITE (289): n equals a,t,g, or c
  SITE (335): n equals a,t,g, or c
  SITE (339): n equals a,t,g, or c
aggggaatgccagagacaactattgtggaaatcttcttttgggtaatatcaggctgttttgtacatacattatttcacatgggtgaaactttatacgtcatcacaaatcaagaactttgacaagttctccttttttctttttttttattattcccaccacctcatcatatataactttttttttcttttttagaggaacagggtctcactctgttgtccaggctggagcgcatggtcgtgatcctaactcactgcagcctcaaactcctaggctcaagtggatcctccngcctcagtctccggaatagctgggactacattgtgcacacaacccnggcngg

SEQ ID NO: 41 - DNA, 235 bp, Homo sapiens
aagatgatgggattggaagccacaagacagtggtgcgactggttagcatctgccccttagctccttaagtcttggtgcccatragggtggaggatgcaagaawgagagggttagactggagtcatggttaccaaccttactcttcttccatggctttcttttttgaaagatattaccttaggaacaaagtgcattcagtratttaaaaagaaacaaattaccagtatatgccaca

SEQ ID NO: 42 - DNA, 237 bp, Homo sapiens
  SITE (187): n equals a,t,g, or c
ctgactgctatcacctacccaggacgaaaattgtcacttactgagtacctgttttctgttaagtataccaacaggactttcctgcaaatcatcccatttatttttcgtaggcatccctttgtgggatgggatatcattatccccacttgaaaaagatgtgggaaagtaaggctaaagggaggataantaatttgccaatgttttaggacgggtggggaaaactcggggttcattctg

SEQ ID NO: 43 - DNA, 294 bp, Homo sapiens
  SITE (66): n equals a,t,g, or c
  SITE (230): n equals a,t,g, or c
acaggaggttaaagaaaagtcccctcccgcctaatttttcacgtccatgactctttttagttccgnccattattcagattggagagcctctaacctgggccccttcagattaggaaagtttgtggagtcttccagtggctgccttaatgatgtttttgcaacatagtgctgcttcattagaaaggggtttgcaatttggttctttaaaatgcccctatctactagaatgnagttccaactgaaatctcatgaaatctaaggtttgtggttgagactattcccttactctgaatg

SEQ ID NO: 44 - DNA, 258 bp, Homo sapiens
  SITE (254): n equals a,t,g, or c
  SITE (255): n equals a,t,g, or c
agttcatattttatttcatattctagagacagttatatggaggcatatacttgggaattctcaaaagtcttttatcctctagaatatcagatgttttcagtagaattgacaagcgtatggtctatgaattttcaagtcaatacttttcttatgtttttgaaagatggtaacaacaaatttgaaagttatctaatgtaggttctataaagccaattacaggaataaagagcttggcttgagaatagttaaatctnngtg

SEQ ID NO: 45 - DNA, 335 bp, Homo sapiens
  SITE (41): n equals a,t,g, or c
  SITE (298): n equals a,t,g, or c
ggcagagggtaaaagtcatatggaaggcgcattcgctcgtnctcctccacggctggccaggctcaaatctgggggataaagccttccccggactgattkgagagtggttggagtgcgcttrgttttcggtgccagatgctggaaaattggagcccccaatgcgttaatcccagaatttgaataaaaagggacgctggcaatgttgtgggactgcagcagttgcagagctgaggattacttcttccgtagttagatattctgtcatgagttaccgtaggatcttcgagatgggagatgntggagaggttcagcgtggtgctaagaagtgttcactg

SEQ ID NO: 46 - DNA, 223 bp, Homo sapiens
  SITE (144): n equals a,t,g, or c
ggcagagcttaatcacccctttaaagaccctgtctccaattgcatgccttttttttttctgagacagagtcttgctctgtcaccaagatgtgtgtcacctacatcacatttttaagtagtgagggttaggacctcaacatatgnaattgggattgggggagcggggagggtgcacaattcagtccataactgtgaagctccattgctcctaaagatgctagga

SEQ ID NO: 47 - DNA, 233 bp, Homo sapiens
  SITE (114): n equals a,t,g, or c
  SITE (230): n equals a,t,g, or c
cttctaaaggaactatgtctggaaggctgtggtcaaggcatttttgctggctataagcggggctcsgaccaaagggagacacagtcttcttaaattgaaggtgtttacgccganatgaacagattctatttgggcaagagatgcgttatgtattaaagcaagaacacacgtcatcctggcggcaaccaacaaaccagagtcatctggggaaagtactcgggcctggaacntgg

SEQ ID NO: 48 - DNA, 264 bp, Homo sapiens
  SITE (25): n equals a,t,g, or c
  SITE (91): n equals a,t,g, or c
ggcagagctttgagcatgtttcttnctaaaatgcgcggataccgggagatcaagatgagggatgtcatgtgccttgtgaactgtcacccgncgtggtaaagtgcaatgacgttttgacctcacaggactgttttggggcataaatgaaacagtgtatgttaaaccaggttttcggctgtatgagaggagaaataaaattagaagtttgtgtctgccaccacgcagattgtgaaccataaaaaaaaaaaaaaaaaattggggggg

SEQ ID NO: 49 - DNA, 171 bp, Homo sapiens
caaattacgggcscagttggcgatttatgactacatcaaatcactcgaacaacctgaataaccctatgccaatacacgataaatcccctcgtccgcagagtttgctgcggtcgatcttggttcaaacagttttcacatggtcatagcccgtgtggtagatggtgccatgca

SEQ ID NO: 50 - DNA, 312 bp, Homo sapiens
ggcacgagtgggaggtgtgtctgtcttcctgacaacactatgagtactttgggrtcaaggttgtrtctgtgcattctgtgaacttaatgtctrcacagrctgtrttgtaggtgtttaatacatatttattaataataactatcagctatcagcaaggtacagggcttagcattttctaacccatgccatccttcatgtctaagaggcggtatggtgtaaaagttgagaacatgggctctgtagccagcctgcctgagtgcgagtcccagctgtataacttactgaatacatgactttaaacaactttcactg

SEQ ID NO: 51 - DNA, 314 bp, Homo sapiens
  SITE (107): n equals a,t,g, or c
  SITE (109): n equals a,t,g, or c
  SITE (205): n equals a,t,g, or c
ccccatcagctgaggaggtcagagaaggctggagaggctgcagcgtgtatcgagttttgaatagtaggtaggatttgtaataagtagaaggaagctaccatatttgnancatcttctatgggctgaacctttcatacctatcatctcttttattccttaccacaaccttgggtggtgggtatatatatatatgctttacaaatgnaaaccgaggcttgatccagagagtttatgtcccttgcttcagctagtagatggcaggcagagttgagatccaaccttaagccaccagatgggtgtgtgttctttctgcc

SEQ ID NO: 52 - DNA, 416 bp, Homo sapiens
  SITE (43): n equals a,t,g, or c
  SITE (367): n equals a,t,g, or c
  SITE (385): n equals a,t,g, or c
cgtgtctccagacgctatataaaaacctgaagacatgaatgcnttatttactcaggtaatttcaatgcgttaaaagaaagctggcaatccaattgccagcttaagtcgaaacaaggagactcgatatttaaatcggattacattttaactttagtaatattcttcagagatcacaaactggttattgataacttattcttgggcagtaatccgcaaacgttaactttttgtttgctatttacaagctgataacaaccaggaatcttacttagggtccaatatatggagtgcgtgatgggataatcttgaagtattggattagtgttaataggacgtattagttcacgaggggttaaaggttcttatnggcgttaccatattgganccacgttccggaccagggtgttaattaatgg

SEQ ID NO: 53 - DNA, 291 bp, Homo sapiens
  SITE (155): n equals a,t,g, or c
agggaagctggataagggagcaccccaaagcctctagtcctgcccaagtggctttgcccttccaaagacaacagccccagccttcatttggaggtgggagaggaggacacagagagggttggaggaggctgtgggcatcgggaatcctgtttgtncttgctggcactgcctggcccggyttcctggaggagtgaatcagcccatccaaggcttggcatgcagtagtggagccaagggttgccatggagatgggcgaggcccakagcccacaggtttgggtgggcctgactt

SEQ ID NO: 54 - DNA, 717 bp, Homo sapiens
  SITE (589): n equals a,t,g, or c
  SITE (613): n equals a,t,g, or c
  SITE (658): n equals a,t,g, or c
cagacaccaagtaagggatcaatcagttgttgcttttattaacagtaggcatccatctgcccatttgcacgtaagaaggaaacacccaagaatgaaaagtagcttgttgtaggtcacccagccaactagcacatagtggaaattagaatccaggcactcccagcagggcactttccaccaccctgcacttttgtattcatcaggcacagtatccttactgttgtctgtaactgtctatgttcccagtgtctgactctgcagggccctagtggtataaaggtactgagacttgcctgtgttcagggcttcctgaagattaaatggctgccgaagttcttgagtttagctttagctcaaaagatactgcgtcagactctgcgttctgagtagagtctcagagaatgaaaaaagaaatacaatgaaaaaggggaaaacttcaatccagaacctcttaccacagtttctggtagaatgctggcaatttccaggaagatacgtggagaacggaaaggttgctacacccaaatagtgaagcaaaggctatgattatgggaggattggacctgcaaactccagaacagagttcttnccctctgagggaccctgccctttncccaaaaggggtatctttaggaagggaaatttggctgctctttgnccggacagcagaattcccagagcaggcacagagacacgtggtctttcagcagagccttt

SEQ ID NO: 55 - DNA, 196 bp, Homo sapiens
  SITE (188): n equals a,t,g, or c
ggcacgagggctgaggcaggagatagcctgaacctgagaggcggaggttgcagtgcaagattgcgccactgcactccagcctggccaaagtttttctttctttaataataaattagccttagcttactgtaactgttttactttataaactttttaattttttacagctgttaggctaaaactcgtgnccgaattc

SEQ ID NO: 56 - DNA, 405 bp, Homo sapiens
  SITE (352): n equals a,t,g, or c
  SITE (375): n equals a,t,g, or c
  SITE (376): n equals a,t,g, or c
ggcagagttgaaattccagtgatgtttaaaacatagatgattatacacttttttctatgtgtactatttttatagaatattttatgtaagaaagggaaagtaagtataaactctcaatttgtctaaaagcaaatgaagtctttaaaaacttgtttaaaattagcaatatcataatatttcaaatgctaaaatatgaattaaaattctgtctttttaaataagcatttggagtgatacaaagtcaggattgatggtatagtatattatttatactgctataggggtaggttgcatatttgtatcctacatttatgtgctgaaataaatcccgcacccgattkgtcyacaggcncttcaatcccgggagggtttcgnnactaatatttgggtaggtttatcgcgtgg

SEQ ID NO: 57 - DNA, 337 bp, Homo sapiens
  SITE (326): n equals a,t,g, or c
  SITE (327): n equals a,t,g, or c
agcatctcacacctagactgtagtttcttccctggactctgttcccagtctaatctctccagtccattcttcccactgctgtcaaagtcaccttttctaaaatctaaaactgaatcctgattctcctgttgcttataagacaaaggagctagccccagcctacctccctcttctgtcccttgccattctatccttatgcaatgatacttccaagttctgcccacacagaactctttataatttctcttcttgtacttttactcaaattgrtccattctcccatttaccgmcaaytcatctttcargactcaggcttctagtcaccnnctgtactgga

SEQ ID NO: 58 - DNA, 306 bp, Homo sapiens
aaatcattacctacgatttatttaaaaagcattgaaaaaagttgtgtgtcacagtgtagtggggaaaatccaaattttagttatttggtatagatttaagcttacccttgacatttaatggttcaggggcctcatgacaccttatttattcttatatttgcaaaatgataatgtgcttcacacacgtatrataagttgagtcaatatcatgagcatgaaaggcttttgcaatggtgraacactgrargargacattgtcttgcatagttattttatagcacagtacttttgtaaaatgccttatca

SEQ ID NO: 59 - DNA, 202 bp, Homo sapiens
  SITE (100): n equals a,t,g, or c
  SITE (195): n equals a,t,g, or c
ctaggagtccaaaataggcagctcttgccattcatcaaagtacatagttgtaggatcttcattagcctcatatcaataatttaggtgaaaatggctctancaaaattaaaaactcatactattttccctatctagtttcagggagcccagcttgaattatagctagtctcttttggtaccttctgaggaacacangaattag

SEQ ID NO: 60 - DNA, 254 bp, Homo sapiens
  SITE (4): n equals a,t,g, or c
gatntcacgcacgatcatcgccagctcatggctactggtggtcgccacttcgccatacactttgtcgatcgcttcggcgtaccagcgaatggcgcgcgcgccrgraatatcatcacgcagactgtgacgaatcggtttgccggtgtcgagagtttccagcagtgccagctcttcggcgtgggcttccattaaatcggcgagtttattcagtaccgctttacgtttagccggagaagagagtgaccagtcgaggg

SEQ ID NO: 61 - DNA, 433 bp, Homo sapiens
ggcacgaggtggagataaaatacaaaaaggcagagaaataagatttgaagacgtcctacccctttcgaaggcctcactgccaactgcctcctcctggcagatcccgggaagcctttaggatgatctacaacataccatttgaacagggccatgaggtgcccaacctgaaacttctttacagccacccccattttacgtcctcacccctgttcccacagctgttctctggatccatccccttcaacctttccaggagttctgatccattactgtgtctctttacatcatttcagctattctcctgggttaacttttcaaagtaaggttgtcttcccccacctacctacaacagaattgtctgctagaaatgaaggatgggggccgggtgcggtggctcagcctggaatcccagcactttgggaagccaaggaag

SEQ ID NO: 62 - DNA, 503 bp, Homo sapiens
  SITE (258): n equals a,t,g, or c
  SITE (483): n equals a,t,g, or c
ggcacaggggaggctctatggaaactgtgagcaagtggtgggaattcctgggtagatggcaatggggctcgagggacagggatctagatgcaggcaaatcagatggtgtgcagggggagagagactgttattcattatctctggcctcagatgctgtatctgcacaggcctgtactggacattgcacaagtaccctgcctggctgcctcttccccagcaccatctcatctccacacactgcctgccaccaccagccangcttgtcttgggggtggcactcagcttccctgcatggactgcagcttcacgagatcggcctgcatgccttttccctcactgcacccaaggataccctgcaccacttgggattccattgtcagggctcagtctggkrtcagraggcctctactctaagcctcctgacagatgtggacagatgttaaagaggagccccagagtgccagaatagaagccagctggggntgaaatgggaaggaatttac

SEQ ID NO: 63 - DNA, 373 bp, Homo sapiens
tagaactaggtggatcccccggggctgctttgggatgaggctgtcggaaaagttttgccgacaccgaatcttcacacgctgatacaggcacgggatcaactggcgaaatctggtattgcacttgagcaactgaacgcgccttcagcgaccagctgcacttcgctgccattactggcgcaatacggtgtgactcatgccgaacyggtcatgcgctgacgggcactattccggcaaaccagcagggcgatcagctggaacgtatcgcgatgctctggttaagtgaaatctcccatcatttccgtggcgacactactgctaacggcggcggttactatcgttcgtggtcatgcgcaacatgcgttggtgttttacg

SEQ ID NO: 64 - DNA, 440 bp, Homo sapiens
  SITE (431): n equals a,t,g, or c
acgaccgataaagtcacgatctgccggttcccaggcgatggtccagcccatgttggcggctaaaggagagatggtttcgtccatctcctgaccataaagattcatgcccgcttccagacgcagcgtgtcacgcgcgccaagccacatggcttaacacccgcttccaccagcgcacgccagaaatcggccgctttttcattgggcagcgcaatttcatagcccgcttcaccggtataaccagtggtggcaataaacagatcgcccgcctgcacgccaaagaacggtttcatcccttccamcgcctgamgctgggcgtcattaaacagtgtggcagcttttgcctgcgcattcggccctttcacggcaatcatggaaaggtcatcacgaacggtaatttcgatgccgaaaggttaacgtgttgggtaatccangagaagtct

SEQ ID NO: 65 - DNA, 383 bp, Homo sapiens
  SITE (363): n equals a,t,g, or c
  SITE (372): n equals a,t,g, or c
ttgagcaataaagtggcctgagggctggggttctgagtggctcatggctttctaggggggaaggctgaaggccctcctctcctctctgggagctgctcggcctcagggatgggaaagactgcgccgtgttgcatcttgttgcatctttgcactgctggcctctggctccagctgtggcaggaagcatgagagggtgactgaatttggagccctggaggggctgggaagacccccctgcttgtgcttctgaggtgctgagaatgctccaacacagagacatctctccccagctgggaagggagtggaagcacagggagcttgtggggctggccggtggggttgtccaagccgcccttggcgagnagtccccgnggcggaagctg

SEQ ID NO: 66 - DNA, 331 bp, Homo sapiens
  SITE (305): n equals a,t,g, or c
  SITE (318): n equals a,t,g, or c
  SITE (326): n equals a,t,g, or c
ggcacgagctctgggacacccactgggtccagatttccaggactctttctcctctcggttggctgggcgccgtgacacatggctaaggtcagcccttgaagtccccactagatgggcatttagtctgtctgagcctcagtttcttcatcccttcttgaattcaactctccctaaaccccctttctactcctccccttgcagaaggaggcccaagttgcagcccgggtttggagggagttgagatgaaacgaatggtgatcttgcatcccamagttggtcttgcamccctgaracttctgtgaagntggggtgctgtgnccagttcnttttt

SEQ ID NO: 67 - DNA, 244 bp, Homo sapiens
  SITE (13): n equals a,t,g, or c
gtcaggcactggncatgctgggaatgcacggtacctacgaaccaatatgacgatgcataacgcggatgtgattttcgccgccgcaccgtctgtgtcattggcgatggcgcgattrccgcagcatggcgtttgaagcgatgaatcacgcgggcgatatccgtcctgatatgctggtgattctcaacgacaatgaaattcgatttccgaaaatgtcggcgcgctcaacaaccatctggcacactgc

SEQ ID NO: 68 - DNA, 931 bp, Homo sapiens
  SITE (885): n equals a,t,g, or c
  SITE (903): n equals a,t,g, or c
  SITE (919): n equals a,t,g, or c
  SITE (923): n equals a,t,g, or c
gcttctgaagattcacagagtccataaatgtccttgtcctccctttggcttaaattagttcatctatgttttggtcactttcagcaagatgagttacaagaacccagtcaggccaggtgtggtggctcacgcctgtwatcccagcactttgggaggccaaggcaggtggatcacgaggtcaagagattgagaccttcctggtcaacatggtgaaaccctgtgtctactaaaaatacaaaaattagctggacgtgstggcatgcmcctgtagtcccagctactcaggaggctgaggcaggagaatcgtttgaacctgggaggtgaaggttgcagtgagccgagatcacaccactgcactccagcctggtgacacagcgagactccatttcaaaaacgaaacaaaacagaacaacaacaacaacaacaacaaaaaacccaaaaagaacccagtcatcacagaatctgtacatggcctgtgggtggtagatgctggccctacacatgaacggttccatggtcctcatccatgacagagtaggacctatgacccagatcctttggcagtgagttcagtgctctttcttcttatgccatgctcggccatgaggagaaatcctgaagttctgcacattctttgaaaaaacacagtgatggaagtgagacagattgtgggcacagggccatagccctgttgaatctgcacttgttccacaaggtttgagttgttccctcagactttcagaaaatcattgttgtgctaatgtttcttcttgctttcttttaaggaaaagtgtttgagaagagtacaacacagccaccaccattttttcctaggtcaacaagcacgcctgtgttctgataattaagagtcctaatgatcacatntaatggtaaaaagttcanggttactgctttagtntggntggatcca

SEQ ID NO: 69 - DNA, 649 bp, Homo sapiens
agcaggccggaagtacgaatgctcagcgaactggtatctggaatgtggttataacgttgttcaatttccagcgttacgcgcggcagataggttttcgggtccagcgtaatatccgccacccgacccacaacaacgccaccaatactgaccggagagcgcgctttcaggccgccaatgttatcgaacgtcgcataaagcgtgtaggtcggttcagtacgtatggacgtcacgttcgccgccttcaggcaaacaaacagcgccgccagcagtgctgctaataaaaagatacccacccaaatttcattttttttcgtttgcatgaactcaattcccaaacatcaatgcggtcagcacaaattccagcccccagaacagcccagagacgagtggacaacggtgcgagtggttgcccggctaatcccggcagacgtcgggatggcgtcgtagccgttaaacaacgaaatcccacgtcaccgtgatggcgaacaccacgctcttaatcagacagttgaccagatccatacgccagtcgacggcattttgcattgccgaccagaagaacccgctatcaatgcctttccaactgacgccgaccagagatccgccccagatccccacggcgacgaaaataaccgtcaacagtggtaat

SEQ ID NO: 70 - DNA, 370 bp, Homo sapiens
  SITE (288): n equals a,t,g, or c
  SITE (326): n equals a,t,g, or c
  SITE (344): n equals a,t,g, or c
ggcacgagaaaccagggaggcgtggtgtctggagtccagtgaagaaagtggtttgggaagcagactccataataagcatgtaatgttcatcacgccctgggtccttgagtcaatgccattaggcagaggctgtcattattcctgatttacagatackaaatgcaggctcagagaggtgaagggacttgcctaggggtgcacagctgggaaatggagggagccaggccagctggatgaagtggccccctcctggcctttcagggttggatcctggctggggggtccctnaaggggccaagttgctggcccccagggccagggcaggnccaagtaggaccgggcancttggggggaagcccaaagcaagggc

SEQ ID NO: 71 - DNA, 365 bp, Homo sapiens
  SITE (341): n equals a,t,g, or c
  SITE (357): n equals a,t,g, or c
ctcatgtaccaggatcttattcgtaacgaactgaacgaagcggcggaaacctggctaactttttaaaagatgacgccaatattcacgccattcagcgcgcggcggtcctgttagcagacagctttaaagccggtggcaaagtgctttcctgcggcaaggcggttcccattgcgacgctatgcactttgccgaagagttgaccggtcgctaccgtgaaaaccgtccgggctacccggcgattgctatttctgacgttatcatatttcctgcgtcggtaatgattcggtttcaatgatatttctcccgctacgttgaagcggtaagtcgcgaagcgattgtantgctggggactccacntccggtaa

SEQ ID NO: 72 - DNA, 346 bp, Homo sapiens
ggtctccttgtgatccttaaaaaaagatttgagccctgtttgaggttgatcttttatatgaattaaaagtaattatatctcaaagaatcagtgtaaaatgtatgtattgtttggtttcatgaccctttgttattacttaccactctaccactgcagttcctaggtactttaattcagttgccatccttcccactctctctgagctccataatagtgctgatttaacaaatactcactaaatagacaaaaccctacttaccattaattatgaactgaaatggaagcatwaaatgtgggaataaataaagaatataatggrgaaaatgtacaaaatgctttcaaatgg

SEQ ID NO: 73 - DNA, 649 bp, Homo sapiens
attaccactgttgacggttattttcgtcgccgtggggatctggggcggatctctggtcggcgtcagttggaaaggcattgatagcgggttcttctggtcggcaatgcaaaatgccgtcgactggcgtatggatctggtcaactgtctgattaagagcgtggtgttcgccatcacggtgacgtgggatttcgttgtttaacggctacgacgccatcccgacgtctgccgggattagccgggcaaccactcgcaccgttgtccactcgtctctgggctgttctgggggctggaatttgtgctgaccgcattgatgtttgggaattgagttcatgcaaacgaaaaaaaatgaaatttgggtgggtatctttttattagcagcactgctggcggcgctgtttgtttgcctgaaggcggcgaacgtgacgtccatacgtactgaaccgacctacacgctttatgcgacgttcgataacattggcggcctgaaagcgcgctctccggtcagtattggtggcgttgttgtgggtcgggtggcggatattacgctggacccgaaaacctatctgccgcgcgtaacgctggaaattgaacaacgttataaccacattccagataccagttcgctgagcattcgtacttccggcctgct

SEQ ID NO: 74 - DNA, 408 bp, Homo sapiens
  SITE (45): n equals a,t,g, or c
  SITE (396): n equals a,t,g, or c
  SITE (400): n equals a,t,g, or c
ccggcaagcacgccgagcacggtaatcaactggcggaaatttgcngccagcccaagccccgccggaccaaatgacaccgccagcaacttaccgaccagtaacccggcaccaatcttgaccagtgtactggccgccgtccacaaggacgcttttgccaacgacatatcaggaaaagtagttcaacaaagtcgcaattaccgtacgctgattgacgggcgacaggttgtagaacagcggcaggcgcagcaggsgctcgctctctttggtggtgtagcgatcttcacctggaactcaccaaagtgttcccccgcaggcaaccgtgcagcggaatgtaatgaaacaccgccatgatttccgcttctttcagaaagttaatcaacgcgctccggtcatcantatnccgcattt

SEQ ID NO: 75 - DNA, 406 bp, Homo sapiens
  SITE (363): n equals a,t,g, or c
  SITE (374): n equals a,t,g, or c
ggcacgagctcgtgccgaattcggcacgagcagaatgttcttttccaagtttgtgggtttttttctttttctctttgaccaataaacatgtaagttagctgctgtgaaaatggcaggttggtgtacctawgtaaaaaacatatatgcatgwgatcaaagcctagaaaggaatctgaatgaaggttaagagatataggaggaagaactatgtctaattttctttttcattttgatatattggttttaacgttaaaaacttgaaaataaaaataatgaatctgtttcctgggaatataacaggctagtttatttggactagccctctgtttttgaaaaggatttcaaatactgggattttaaaancccaacttctncaaagtatccaaggttatggaaatattaaggt

SEQ ID NO: 76 - DNA, 382 bp, Homo sapiens
  SITE (281): n equals a,t,g, or c
  SITE (309): n equals a,t,g, or c
ttatctccatccggggatcacatcataaataagatgtgagtaaacaggtgctgtaacgtttggcacgccggatttgagatcggaaacaaacttcaccaggcgatgcatatcatacgattccgggaagcctttcttcttcatcagaccacgttctttcagaacctgattagggtgaaggaagccatctgtagtgatcagttcaacacgacgatgttccggccaacggcttaatagcgcctgcaatacacgggcggttgtacttttccccaccgcgacactgncagcaatactgataatgtaaggaatgcnttgcccgttggtaacaagaaactgttccagaactggcctgacggcggagattcgagcttatatagaagttcag

SEQ ID NO: 77 - DNA, 280 bp, Homo sapiens
  SITE (66): n equals a,t,g, or c
gtgcatgcccacgctgtggggcctttctcggtgtatgtggattatgtgcggaaccagcagtatcangaggagacctacagccgcctcatggacaccaacgtgcgcttctccgccgagctgcgccggctgcagagcctccctaagtgtgagcggctcccgctgccgtccttcctgctactgcccttccagcgcatcacccggctgcgcatgctgctgcagggccacagagcagggggcccagtcacccttcctccttgtccccagaatatcctgcgccaga

SEQ ID NO: 78 - DNA, 341 bp, Homo sapiens
  SITE (20): n equals a,t,g, or c
  SITE (338): n equals a,t,g, or c
ggggttggcgtgatgtgtanttcttcgcccagtcggctgaaaacgccacgctgaaggatgttgagggcaacgagtacatcgatttcgccgcagatttgcggtgctgaataccggacatcgccaccctgatctggtcgcggcggtggagcagcaactgcaacagtttacccacaccgcgtatcagattgtgccgtatgaaagctacgtcaccctggcggagaaaatcaacgcccttgccccggtgagcgggcargccaaaamcgcgtttcttcamcaccgtgcggaarcggtggaaaaacgcggtgaaaattggttcgcgcccataaccggaacgcccnggg

SEQ ID NO: 79 - DNA, 313 bp, Homo sapiens
  SITE (58): n equals a,t,g, or c
  SITE (75): n equals a,t,g, or c
  SITE (78): n equals a,t,g, or c
gtgcgtctgatggcagaaaagcataagatgcacgccacttttatggcgaacgtagtgnaagagcacgcgggcagnganatgcatatccatatcagtatgcaaaataatcgtggcgagaacgtgctttctracgcggaaggcgaagattcgcccaggccgggcagaatatcgctgccatcacctactacttcggttcgaaagaagatttgtacctcgcctgcgcccagtggattgccgatttattggcgagcagttccgtccgcatgccgaggaagccgaacgcttgttcgcgcaaccacagcctgatcgggtt

SEQ ID NO: 80 - DNA, 418 bp, Homo sapiens
  SITE (320): n equals a,t,g, or c
  SITE (341): n equals a,t,g, or c
  SITE (347): n equals a,t,g, or c
  SITE (401): n equals a,t,g, or c
ggcacgagctcatgaccactctgttttcttctatatccaccaccacccaccctctactgtattattttaacgctaaatagttgagtatctgcaagataaggattctttaaagacataatgagaagaccattttaatcatgacaataattaacattaattgcttacatcatctggtatccgcacagtgttaacatctcagatcatctcataaatatctttctaggaattggtttgttccaatcaggaccccaacagggctcaccattggagttggttcatctgcgtgtggaagcctcatttaatctatgggcttctccctncctccagctcactgcaacctncgtctnccgagttcaggcgatttttccacctcagcctccctagtaggttggggtttatangggcatgtaccaccagg

SEQ ID NO: 81 - DNA, 221 bp, Homo sapiens
  SITE (91): n equals a,t,g, or c
cttgtttctgaagttagtataaataatgtcacactttgtatactttttaaaaaattcatccctactagtgtatctccctgtatatacttgnatttattttattgtttttagttttctattatatgactatactgcagcttgtctcckttctttttgcttgacatttgggtagtttcctgttttttttggttttgttttgtttttgttttttaaatgctatt

SEQ ID NO: 82 - DNA, 230 bp, Homo sapiens
  SITE (215): n equals a,t,g, or c
  SITE (228): n equals a,t,g, or c
tttagggtatctaaacaaggaaccatgagtracaaattcttttagtygatatccttttgtctgctatacttagttttgttttaaatgagacttccttaacttattctgttaaatcattttatgtttaaagacattcaaattggtctttaggtaagaataataacaataggatcctgagaaaggtaatacaatacaattattcattctttttagtntagtgtgtttttncc

SEQ ID NO: 83 - DNA, 257 bp, Homo sapiens
  SITE (225): n equals a,t,g, or c
agcattagagacatctggcgatttcagtgcaatctgcagtgacagaaaaaactgcccactgccattctccactgtcccatcttctagtcctttcacttacacagagtattgagataaactctgaaaaattttaaattggttattattggctagcaacataagcttttcgtttgggtggaagaagtaaatgcataaaaaggaagttattaaaagttccatttgagnactccagtgggagttatttacacggtccagag

SEQ ID NO: 84 - DNA, 497 bp, Homo sapiens
  SITE (421): n equals a,t,g, or c
  SITE (436): n equals a,t,g, or c
ggcacgagctttcattttacagcgaatcatgcaagctacaatctgatcacccaaattgagccaatagaatgaatgcctggtgatcaatcagctggtgtgtcacctatgawctctgctttcaggaattaggggttctycttaacacagttgaaaagcttccactcacaatggccccagccacagtgtcagataaaagtgccaccttcattagctagcaacatgaaagatgacggtggttaggtggggtagtgagtgctggtggagatcttttgactggacttcaggaagcaggaatgtgaggtttgatattgcttattcaaccttggttagtttcttaaatttttaaatttttttcatttttttgagagagagtcttattccatcgctcaggctggagtgtagaggcatgatcacggttcantgtagcctcgacccntcagggtcaattgattctcccacctagcctcccaggtagctggaccacaggtttgcacctc

SEQ ID NO: 85 - DNA, 225 bp, Homo sapiens
  SITE (47): n equals a,t,g, or c
  SITE (112): n equals a,t,g, or c
ggacgagagcaaatgtccatagggcagagggggtcttctgtcctttntttagaatggtttcttttttcccaaaatgttctgttactatcttgtcagctctttgatgctgtanttttttcctaatatcctgcatttttaattgtttttgaaagcattttgggccaggtacagtggcttatagctataatcccaatactctggaaggctgaggcaggagaatcgctt

SEQ ID NO: 86 - DNA, 612 bp, Homo sapiens
agagattgtccacaggctgcttgagtacttggttcctaaacagtagctgttagaattattatgagccctgatcagcgcactttgccctctgcataacgtctatttattcgtctgtataatggaataatagtggctgctgttaaatgaattaaatacgacggcgtttggagggaaacattactactccagttttacagataaggaaactgatgatcaggtgcttgaagtgacttccgragatcaggaagacagcatatggcagggacaggaacccacgcctacgccccagcctctttttaccgaaccttgttcttcaggaagtggttaaaacacctgggctactcccagcaaaacgccagtcacgcagtcctgaaacaggtcctctaaggtgcccagcccaacacaggctgggcgtgctgagccaacagaatgtttgttcctctgtcccttcctagaaccccaagtcacctttctccagccagttaaaaacgttacttttaactaggatgacgtttcaatttatcggccatatccaagcattctgagaatgaactgtgagacatgctattaataaattaaccatgaacagcaggttcaaaaaaaaggggaaca

SEQ ID NO: 87 - DNA, 305 bp, Homo sapiens
aatttttgaaacctaaaaaattcaagctgagtggttccctatacactgaaggtatagtcaaattgaaactatattggagacacaaagatgaataataagacgtgtaaacataatattttctagggtgctttggattttragttgccaaatcatgttggaaaagcaagagatttgtataaaagctgcaaggaaacatctgtgttttgtttagagaatacgttatattttggccaaataagtaaaaagkggaattgtcaaagtgracaatatggggggaagaatgtcttcctaaagatccagaattg

SEQ ID NO: 88 - DNA, 294 bp, Homo sapiens
  SITE (260): n equals a,t,g, or c
atatcaggtctttgcttttttttctcatcaattgtttaaggattctttccttccacttctttaatgggctgcctatactttgttgagcactaactatatgccaagtactatgctagtgagttacctatgaaagaccctgagagggaggttttgttatccccatgggaaggattgagtagtttgcatgagatcacacaactaggcggtgactgwgtccaacacaccaaagcctatactattacagttgagcaatagtgaanattgaggctgctgctgacagtggatggtgcttca

SEQ ID NO: 89 - DNA, 392 bp, Homo sapiens
  SITE (333): n equals a,t,g, or c
  SITE (344): n equals a,t,g, or c
  SITE (352): n equals a,t,g, or c
ggcacagggacacatgagacctaggagacacgggaggctgtaggagattaatggacatggagaggacacaggacacacatagggtattaggcagacgtgaccccagcgggacatgggacttggggaagatccagggtaccaggaggacacagatcaccaggagcatgtggggagagcatggggaggtcagggttcatggcgagaaccagggtcatgggagggcatgagacttgcggaacacagggcatgggcggatgtggagaggacttgggatacaagaattacaaggagaagcagaagcttgaaggtgaaatggcctgggggatttcagcncctggagcccnttatattnatggtggaatattttaagattcccatttccaaagaattcc

SEQ ID NO: 90 - DNA, 311 bp, Homo sapiens
  SITE (252): n equals a,t,g, or c
  SITE (278): n equals a,t,g, or c
  SITE (307): n equals a,t,g, or c
aagccccggtgaaggagagaatgtctggcaggagcttgctaagctcaaaatcaaagaaaggttcagcaaggctgtgcagggtgtcctcaagrcaaaggcagccatcagaagagccccgtgtctcccacaaatagaccccgttagcatccctgctgcactcagtggttggcggaaacagcaaagatagatttcagagcacagcagcaggggtccctggttcagccccgcttccctagagcagggagatcttgnagtgggaaggaacatttcttgttgtnagccacagctggagggccctggaaccagntttt

SEQ ID NO: 91 - DNA, 418 bp, Homo sapiens
  SITE (339): n equals a,t,g, or c
  SITE (380): n equals a,t,g, or c
  SITE (409): n equals a,t,g, or c
ggcacgagggctctcacctgggaaggaaaaagggcacccacagagtagctggcccctcctctttcttttgtcctacccaccatcctccctgtggagagcttcacgtggaaaaagctggattctgacctgggtgtggaaagtaccgtgggtcytctgccctcctaaagtttactgccctgagatcttaccaggtttagagataaactctctctgaatagctggaggagaaaggctcacacctggcagggkattgagaaatgagccttagaacttgctgcttctcggccgtgtgcggtggctcacgtctgtaatcccagcactttgggaggccaaggcggncggttcacgaggtttaaggaggttcgaggaccatccttggnttaacaagggtggaaaccccgttttttanttaaaatta

SEQ ID NO: 92 - DNA, 311 bp, Homo sapiens
  SITE (54): n equals a,t,g, or c
ccacgcaccacggttaaaatgttcaccagctatcggttgcctgtaatgccaganttgacggtcggcggtggtgttaactggcaaaatcgcgtgtataccgacaccgtgacgccgtatggaccttccgcgccgagcaaggtagctacgcgctggtggatctcttcacccgctaccaggtgacgaaaaacttctcgttacaggggaacgtcaataacctgttcgacaaaacctacggttaccaacgtgggaaggttcttatcgtctagggcacaccgsgtaattttcagcattaccggcagtattcaattctg

SEQ ID NO: 93 - DNA, 321 bp, Homo sapiens
  SITE (247): n equals a,t,g, or c
ggcacgagccgacccaaggtctgcaaggagttcgcggcacccgcccgcccacgccggacccggagggcacgtccgccgggaggggcagttcccacgaggaaagtcccattgatgcgagttggcagtgtagaggatgctcccctycggccgccgcggaagccgtcgtccaaatgcaggcgagcggggaggaggaggccgggatkcggccggcgggccactgctytygccggctgccagtttctgcttnttctgaagccctgcatagacggccccgttccccgtgtattcactgaaacattttttataaaaacgttgcgcaca

SEQ ID NO: 94 - DNA, 452 bp, Homo sapiens
  SITE (409): n equals a,t,g, or c
  SITE (430): n equals a,t,g, or c
  SITE (437): n equals a,t,g, or c
ggcacgaggcgagctgggcttccgcgtccgcaagagaacgtgcactaacccggagccccgcaacgggggcctgccctgcgtgggcgatgctgccgagtaccaggactgcaacccccaggcttgcccagttcggggtgcttggtcctgctggacctcatggtctccatgctcagcttcctgtggtgggggtcactatcaacgcacccgttcctgcaccagccccgcaccctccccaggtgaggacatctgtctcgggctgcacacggaggaggcactatgtgccacacaggcctgcccagaaggytggtcgccctggtctgagtggagttaagtgcactgacsgacggagcccakagccgaagccggcamtktgaggagytcttccagggttccagcggcttttgttggnaacagcaagcccagaggccgncccttgncccttacaagggaga

SEQ ID NO: 95 - DNA, 352 bp, Homo sapiens
  SITE (98): n equals a,t,g, or c
  SITE (153): n equals a,t,g, or c
  SITE (257): n equals a,t,g, or c
gctcggtgccttgtgctttaatcgattctccgttcgatttcgacgtatgcactcttcaagacttgtttccaattcaacaaacagaatctcttgatganagttatccaataaatcctgaatttgctttaaatacatcagctggtactgatttgnaaaatcaattacgtctgttaaaattactgatcgctgatttcttgcacttgctccaaggaaagaaaaggtaattccacgaacaaattcccacatctcctcggtanaatcctgatagatctctagtgcaaaatcaatggcttggatgggtataaaatagggtagcatccgtcagtcgagataattcttggaccaatgggca

SEQ ID NO: 96 - DNA, 336 bp, Homo sapiens
  SITE (295): n equals a,t,g, or c
  SITE (296): n equals a,t,g, or c
  SITE (333): n equals a,t,g, or c
ggcacgaggcgccagggcccggcctgggtccagaatcctccgtctgtyccccagcaccccatccccgcctcctcctctccggactcgccctcagccggctcctagacaatggtttccttggtctctgacttggratcctctgaaaaactggaaagttttaaracttttgtgattcgatcagatccttctgcgctcccagagttcaagcaggagtaagcaattcctttggacgatatttgggaactcgctattcacaagagacggccacagagttaagctggggagtctaaccaannaacggcacagcaacaagatgaaaggagctttgggatnaat

SEQ ID NO: 97 - DNA, 200 bp, Homo sapiens
  SITE (144): n equals a,t,g, or c
aaaaataaaaaaatcaaatgttcatgtttttggagtttgagagaatttatacaggaaaaaagtcatatcagtgtgcttaacatgggaaggacctttaatcagtagtgtgtcttcagggctttaccaaattattccatactgggntagaaaccttgcaatgtaattaacgtgggtaaaatttttaaaccttttttcagccc

SEQ ID NO: 98 - DNA, 316 bp, Homo sapiens
  SITE (121): n equals a,t,g, or c
  SITE (295): n equals a,t,g, or c
  SITE (314): n equals a,t,g, or c
ggcacgagtgcatcccgtgctgctcccaacccttggggcccagcagtgaccaacacaggcatccttgtggtcactggagtgtgtgtgtccccaccaaagtaagtgatccaggagtgcacgnaggagctgctggggctgaggagtgggcagtgggttttaggaaggaagccagtgggatagcttgatgggttctagatggggacacttccttagagagaaggcagtcaaggaagccccctgagcagtccctcatgactcagtgaggggcagtcgaggagaagcaaggttaaaagtnggatttcatagcacagatnta

SEQ ID NO: 99 - DNA, 454 bp, Homo sapiens
  SITE (25): n equals a,t,g, or c
  SITE (30): n equals a,t,g, or c
  SITE (454): n equals a,t,g, or c
ggacttttgaagagagtcaagtccnggggncagggccgccagtgggattccttggcaattggttccggttattttcattcaggagttattttattaattcccctaaagccccccaaaaacctctacaaggctttattatatatttacacacacacacgcacatatgttagatgtatgtgtatctatatatataaatagaaacataactataattcatattaatatgtaatagcaaacactatagcactgtatgtcaggcactgttctaagcactttacgtagtaattcatttaatcttcatgaaagtctttgaggtaggtactattatcattttcaaaggaggaaactgaggcacagaaagctgaagtaacttgctcaggtgtgtctctattcaatatctccacctaggtgtcccacacacccctcaaattcaccatgtctaaaactaaaaccn

SEQ ID NO: 100 - DNA, 414 bp, Homo sapiens
  SITE (80): n equals a,t,g, or c
  SITE (282): n equals a,t,g, or c
  SITE (400): n equals a,t,g, or c
ttcaaaaagctatttaggtgacactatagaaggtacgcctgcaggtaccggtccggaattcccgggtcgacccacgcgtncggccacgcgtccgaaaattaactctcataaatgcatatgatatagtaatgcattgcattagatacaaaataaatacttcttcaatgttacctgaagtttaatttaaaaatactaagtagataaatgttcttaaattcctatcatttatgtaaatagtcactaccttcctgctcatctctgagttaatgttaacacttaganattaccataactgatgtctctggttcatcagatgctacacgttcattggctgggcagtggttctcaactgtgatagcacattacagtcatctaattcaaaaaacactgccacccattntccattccagggaa

SEQ ID NO: 101 - DNA, 415 bp, Homo sapiens
  SITE (393): n equals a,t,g, or c
  SITE (398): n equals a,t,g, or c
attttaggtgacattatgagaaggtacgcctgcaggtaccgtccgaattcccggtcgacccacgcgtccggccgctcgcgatctagaactakctacaacctaatcctactctttggtagtctctgcagcagccacagccttagcagagctggggttcctgtcttctgcacacgattgactttcttgatgggtaattttttttaagattataccaacagtggatcagctgggttttggccaggaagttgtctttgtggactctgcctgcatggcttagtagtagaaggaaatttttttttggttttgttttttataattcagtttaatcaataaacatgtatttattgactgttaaaaaaaaaaaaaaaaaaaaaaaaaagggggccccytttnggggncccccggggggccccaa

SEQ ID NO: 102 - DNA, 425 bp, Homo sapiens
  SITE (341): n equals a,t,g, or c
  SITE (380): n equals a,t,g, or c
  SITE (419): n equals a,t,g, or c
  SITE (423): n equals a,t,g, or c
agcaaattaattagagaataaagagtccaggtaaagatttaactgtattaaacttttaatgaacatcaaagttgatactctagggctgtgaaggaaagacaactattttaaattaaagaataagatctaatatttgatatcacaacagggtgactatcatcatcaataatttgtcgcacattttggaataactttggaattaaaagaatgtttataactcaaagaaattatgaatgcttgaggtgatggatataccatttactccaatgtgattatttcacatatttctgtatcaaaatatctcatgcaatccgataaatatatacacctactatgttccngttaaaattaaaaattaaaataaaataaatgctgcccantccattaaatgcccctaggttaaaaaaaaggttagggtnaganat

SEQ ID NO: 103 - DNA, 555 bp, Homo sapiens
  SITE (374): n equals a,t,g, or c
  SITE (419): n equals a,t,g, or c
  SITE (471): n equals a,t,g, or c
  SITE (513): n equals a,t,g, or c
  SITE (532): n equals a,t,g, or c
ctaaaacttgcattgttcgaacaccttaccttatatttaaagacattttaattttttggtggccagcctactttaagatttcagattttatgtttagccatttatcttgatacaggtgtatcattattacaggatcattgtgtggatgaggcctcagccaaagatcacatatactgtaaagatgatgcatatcacttacatgtttgtattttgttacacattgaatgatcaggaataccacaagaatggatttgggtatatcataaatagtagctgaaaaacactctggttggctgaaatatgtgcctcagaatgtaagttttcaagaccatagataagggtttgatgctcataaaatagagagtagaaaaggngggaaactttcagtaagggttttcagtatgtgaaatataaatagnacctttcagaaaacttacctccatttaatttgggcaaaggaaagtttaaacngccttaaccccagggaagtggttttaggttaaaattcccagnggtttccgcagggcttttnaccgccttgaggaggaatttaaa

SEQ ID NO: 104 - DNA, 420 bp, Homo sapiens
  SITE (397): n equals a,t,g, or c
  SITE (403): n equals a,t,g, or c
  SITE (404): n equals a,t,g, or c
  SITE (411): n equals a,t,g, or c
cccacgcgtccgggaaagctccatggaagataaaggcagagatttacaagccaaggaatgtcaaagacggccagcacaccaccagaagctagcagagaggtatggaacagattcttcttcacaacctcagagggaaaaccctgctgatacctggatttcaaactcctggcctccagaacgaatccctggagagaggacgtgatgtctgaagctatggcagccatcttgtaactatgaggccacaaacaagaaaagcaaaaaccagagtgaagcatggcagagcagaaagatggaaagaacctggatacataagagtgtcactgtgcagctgtacccaccctagactgcatatacctggactttaagtaaatgacaaatatcctttaaaaaaaaaaanaaaaannaaaaaangggggggcc

SEQ ID NO: 105 - DNA, 300 bp, Homo sapiens
  SITE (238): n equals a,t,g, or c
  SITE (263): n equals a,t,g, or c
  SITE (264): n equals a,t,g, or c
gtgaaagtttttattgctagtcctagcagaagaaaaacatatttcagtggttctaggtctttagcttatttacatggttttagaaatctaaactcaagagtcatcttcctagtctcaatgagaagacagctcgtctttcagcagtgtggcccaatggggtgagttacagaaagaaagctgtctttctcctttattactgggatctacacgctgctggtggatgatttaaggctcctantatctttataagccagttctttttnnggcaccttaaactgttagtggtatagtttgcaaaga

SEQ ID NO: 106 - DNA, 506 bp, Homo sapiens
gaagggtttggcttgatgcttttatggagatggaagaaaatgaatagaaattcttaatttgactctaaaattgaaaaggagaaactatgtagctaaaaagtaaaatgttttcatctttggtttagaattctcaagttatactttatcttaaaattttaaagtttaattttagctattacagctttggcacagtcttaaggataatgatattattatataaatttgagtatttagagccatctcatctatcctgcaataaacatattgaatagcttcgaaattgggtttgagacttagatttgtcattgtttatcttaagaatttgagatttaaaaattctcatttgttatctcaatttttgttaagatttctaaagatttgtaaggaatcaccctttataaaacagcatataaaaaatgagcgttaaaaattggatatttaacttgtttaaagtaaaacttggattattagggactggataagttttctgtactccattataaaac

SEQ ID NO: 107 - DNA, 243 bp, Homo sapiens
  SITE (1): n equals a,t,g, or c
  SITE (211): n equals a,t,g, or c
ngaccatcccggatctagctaggcttttgcaaaaagctatttaggtgacactatmsaaggtacgcctgcaggtaccggtccggaattcccgggtcgacccacgcgtccgtagttctagatcgcgagcggcctccatgactttttcaaaaaaaaaaaaaaaaaaaaaaaaaaaaaaaaaaaaaaaaaaaaaaaaaaaaaaaaaaaaaaaaangggaaaaaaaaaaaaaaggggggggggggggg

SEQ ID NO: 108 - DNA, 382 bp, Homo sapiens
  SITE (343): n equals a,t,g, or c
ccttttcttttcaacttaagtaattgggaagttacaagcatagacccaacttgagaaaagacagaacatcatctcatcttagcaggaggacagcttaaccaaatgagaagttttggatttctctaatgcttctgtaataaatctagagagatttagaaggaaaatcaatcttaaaatgagaatgaacttttaataatctaaatgttgggtatgtgatttttagctgattcaggtagaatatttgttaaacgtttacagaataaaacaatggcaatgaaaccaacctatttggaaagcaatccatttaagtgataagaagaaaagggaaaaaagatggaagaancaattgctgttggaagtacttgtcacttcctgtacatcc

SEQ ID NO: 109 - DNA, 223 bp, Homo sapiens
  SITE (162): n equals a,t,g, or c
  SITE (171): n equals a,t,g, or c
cagaataaaaaccgcctaacaactcattatttaaaattaaaartcctgttgtttagcaaatatccacactttccatagcaraattgtgcttttctgctccttgcttctgggtarggggcaatgggatgttcacacatgggaaacaargaaggtcttgaaacntgtttggcnattgaacttaccctcttgccttcctgcttttctttaccacaagaaaataagt

SEQ ID NO: 110 - DNA, 158 bp, Homo sapiens
  SITE (150): n equals a,t,g, or c
gcagatggtgggatgataatgcaaraactgataacctgctgattctaacaacatgttcataaagcatttccacctctaaagcacagttacgtaaattctattacatctaaatatgcgtaggaaataaaatcttctccagttagtgggttnaaaagtta

SEQ ID NO: 111 - DNA, 451 bp, Homo sapiens
  SITE (275): n equals a,t,g, or c
  SITE (321): n equals a,t,g, or c
  SITE (355): n equals a,t,g, or c
  SITE (404): n equals a,t,g, or c
cgggtgtaaacagcctctgcggtgtaaacagcctctgcggtgtaaacagccgcggcgggcaggccakgactgtcagtgcccgcccctcggggcaggtaatttcatgctcccaaaatgggacataaagtggttgtcttcgacatttctgtcatcagagccttgtgggaaactcgtgtcaagaagcacaaagcttggcagaagaaggaggtggaaaggcttgagaagagcgccttggagaagataaaggaggagtggaactttgtggccgaatgcangaggaaggcatcccccaggctgtatactgcaagaatggcttcatanacaccagcgtgcggcttctggacaagattgaaangaacactctcaccaggcagaattcacttcccaaggacagaaggcaaacngaagcattgcgtttgtgtttgaactttctggggaacactggacggaa

SEQ ID NO: 112 - DNA, 241 bp, Homo sapiens
gtacgcctgcaggtaccggtccggaattcccgggtcgacccacgcgtccgcgggacgcgtgggggargttcttgaaactggttaagtctctggatccaattcccagtttacaggaaaatacagattatggaggaacacattaacctacatttcatgaaagtaatcaacaaaatccagattctgggaaaattctacaaaataaatgatccggttttctttttctttttttttttttaaaaaa

SEQ ID NO: 113 - DNA, 280 bp, Homo sapiens
  SITE (270): n equals a,t,g, or c
cccacgcgtccgaaaaaaagcctattttgtttcagcaacaattattctccttttcatgcccattgctagccagttgaaaggtcacaggttcaaagatataacaagagccaasaaactttgggctcattggcctgagataaaaaaattatacataagaaatagagatgtatcaatctcagataagaaaaaaatcttatttatttggcacaattttagtcaaattttgccctaaccaaattttgacagaaagatgtattgattttctaaaanaagaaaagag

SEQ ID NO: 114 - DNA, 55 bp, Homo sapiens
cccacgcgtccgctgaagtaaggtgttgggaraaaaaaaaaaaaaagggggggcc

SEQ ID NO: 115 - DNA, 308 bp, Homo sapiens
  SITE (143): n equals a,t,g, or c
taaactaatattaatggatttcataaagagcctactcggtaccagacttagttctgggtgtatcaaagcagtctctctaagcaagaagctattaaccttatttcacaggtgatgaaaccaaggtttgcaaccaggtagagcancctcccaagctcagggctttctatgatactatacraccctcgggataattggattggctatgcactgctggtggggaaattctggaattattttaacatcmaatcagacagacgtgttagaaatagaaatttctgtttgtcttgggagtatttggttgtacatat

SEQ ID NO: 116 - DNA, 68 bp, Homo sapiens
gccatgggcaggaatcctcatcaggctctttaagggtcacccacaaaactctggagaagttttgacaa

SEQ ID NO: 117 - DNA, 552 bp, Homo sapiens
  SITE (504): n equals a,t,g, or c
  SITE (506): n equals a,t,g, or c
  SITE (522): n equals a,t,g, or c
  SITE (537): n equals a,t,g, or c
aagagatcagctggtttccactgaagaagtatttgccttcctgggccaccatggggaagagtctgattaagattcacaccagagtccgggtccagctccggctgactaatcactgctttcggcccctaagtgtgcgcatcctgaggatggggccccggctccagggtagggtcctgactgctgtgacccccgggcaagggaatcagctggagcatttccaaggcctaragtccttacgggacartgcccattccacaccagtgcgttccacttcccatggggacaccttcctgcctcacgtgagaagcagccggacagatagcaatgagcgagtagctgtgattgcagacgaggcctacagccctgcagacagcgtgctgccacccctgtggctgacacaagctggagctgatgttgctttcccggcagatcaatggagccacctgcagcattgaggaggagaaggaatctgaagccagcaccccaactgctacagaagtggangncctttggggagaactnaaggccctgtgtcangggcacaacgggccc

SEQ ID NO: 118 - DNA, 76 bp, Homo sapiens
cgcgtccgctagttctagatcgcgagcggccgccctttttsaaaaaaaaaaaaaaaaaaaaaaaaaaagggggggg

SEQ ID NO: 119 - DNA, 301 bp, Homo sapiens
  SITE (301): n equals a,t,g, or c
cccacgcgtccgcccacgcgtccgatccgatgtaggggaggcagcagaaatccctgccccacgcccccaaagataaagcccttttgctttccccttatctggagagaagaaatggaagttgtcctgtcccaacaggacctcctgacttagcatggaggtggcttccttgtccccatcctgtcagatgacaggttgcaatgggcatgaccacagtccagaccccatttggaagatgtgttcaggggttcatcctgctcgccgggtattaccatgggcctcgctttcccccttttcacccggn

SEQ ID NO: 120 - DNA, 350 bp, Homo sapiens
  SITE (286): n equals a,t,g, or c
acctggatgaagtcgagaccgggctcctctgccctgggtccagccctctttgccctgaccagagttcaggatgtccggggcgcgtcccctgtccctcaggcaggctcctggtgatgtttgcgagtgacgagcgctggatgattttgactccatgtgccccatggggcagggcctcagggcacagaaccgtctggagacatccacgcgggcctcagcgacatccggaaacccgaagatggctggtgtgcgtgaagaagcacscggtgttggcgttktcttccctggnctscttgaagaagcmcccggttgacttktcttccctggttgccccacccgacctagatggtctc

SEQ ID NO: 121 - DNA, 310 bp, Homo sapiens
  SITE (308): n equals a,t,g, or c
aatagcctargggctctgaaacattctatgtcaagattcctttttatcctcttaaaaataattgaaactttgatttatggtatatctactatttgattgtattaaaattaaaattgggaaatttaaaaatgtttactaattaacttaaaataccagtaataaaacaattacatgttgacwaaaagaacataactttatgaaaaataattttatatccmaaataaaactcttcmatgtctggcttwatataaaaraactggawtctcatttctgcctctgcgttcaaattattacatgttattttagtnta

SEQ ID NO: 122 - DNA, 447 bp, Homo sapiens
  SITE (273): n equals a,t,g, or c
  SITE (290): n equals a,t,g, or c
  SITE (330): n equals a,t,g, or c
  SITE (426): n equals a,t,g, or c
aaacgtcagcatctcaagggcactgtggtatggaaaargacgccacatgagtaaattttaaaaatataaatattttaaagggtaaaaatgagggtccctgtatttgaggatataaaagatgaaactgaagaagaaaagataggggaagaagaaaatgaagaagaccaggtcttctataagcctgttattgaagacttaagcatggaattggccagaaaatgcacggaactcattagcgatatccggtataaagaagagtttaaaaagtccaangataagtgtacatttgngactgacagtcctatgctaaaccatgtaaaaaatatcggngcttttatttctgaggcaaaatacaaaggcaccattaaagctgacctttctaaatctctttataagcggatgcccagcaccatttgaaaaggtttncaggaaaagtttccccagttc

SEQ ID NO: 123 - DNA, 233 bp, Homo sapiens
ttcggcacgagattcaaattaatcacatgcaaagcattagttagaggctcttggacattttctgtttttagagctttgttggatgctcacatggcaatgtctgtgcagtcagttcctacccagcctctgggctcttcttgcagcttatcttgcagaaagaagcctcatcagaattccagaatctcagctatgattagcttactccacctcagctcagaaacatgcatgattcc

SEQ ID NO: 124 - DNA, 301 bp, Homo sapiens
tttaacaaaaaaaaggaaaaacaaaagcctaaaatctgagttctagaaccagagagatttgggaaccataagatctagaatcagaaggagttgagggtggtaagatctaaaaccagagaaatgtataaggcaaagtctaaaatcagaagatatttgaaggctgaattctagacccagggtaatttggagtcagatcttgagtgaggaggagctggaaatgatgaagtctagagccaagggaacttacggaatgaggtctagaatcaagaaggcactttgtaaagtccagttctggaaccca

SEQ ID NO: 125 - DNA, 409 bp, Homo sapiens
  SITE (279): n equals a,t,g, or c
  SITE (381): n equals a,t,g, or c
  SITE (385): n equals a,t,g, or c
  SITE (398): n equals a,t,g, or c
aattcggcacgagatttccaggttttcttggcccggggttatttccatatggtgtagagctagtttaggagtcagatcaacctagatttgaatcctggctttgcaacacttttctccttgcttccatccatcctttcttcattctatcctctgccttccctaacctaaacactgagcattaagagctctgctttttgtcagccctgaagattctcagggaattgtaactcatatcctaacgggaaaggccctcacaatctgatgggaggagcagatgtntcagcttgaaaaggaacaatgtagtgtcgggggtgctggcagggagatgttagagacacaggggcaggtgaacaggcacaatttttagggaacttttaagtnctanccagaacgagagnaccagggaaga

SEQ ID NO: 126 - DNA, 270 bp, Homo sapiens
aattcggcacgagccgcggttaacacgcacgtggaggttggttaaagggaagacctgggttttagtcctgtctccatcaacctcaagaaatgggacctcatggaagggaggggaggcaatgccgaggatgtgctcctgagcaggtgccacaattcttcacctgtaagtaggtctgatcatgggaattcacagatatttgtgatagatgacttataaaaaatcacctggcaacataaaatatcacctgtagggtaggtcttgatcatgggg

SEQ ID NO: 127 - DNA, 369 bp, Homo sapiens
  SITE (339): n equals a,t,g, or c
  SITE (346): n equals a,t,g, or c
  SITE (353): n equals a,t,g, or c
aattcggcacgaggcagaaagcgggctctggagctcatgctaagctttttataagaggacttactgcattcacaggggcagagcccttgtggcgtaatcacctcccaattggcccacttattaacatcatctctttgggagttaagttccaacatatgaattttggagggacacacacattcaaatcatagcatgcacaccttcatstgtggcttctgttttatccctccaggaccaattactgaattttacttttacacaagttcttctttagagtaaagattaggattcaattctcagtctctctaagtwaaggscaaaggttatgrcttwaaatgnatgtttnaaattgngcggcggcgggtggtc

SEQ ID NO: 128 - DNA, 358 bp, Homo sapiens
  SITE (295): n equals a,t,g, or c
aattcggcacgagcgctttcctcctttttgtggtcaaaaatatatgttcagctaggttcctcaggggtatttagtatttttttatttttttcttaagaatacatctgaaaatgctgtattaaaccagaagcttatttctataaagaccagactacttcgttttattctgtattatcacttatattatttagaaaattgaagtgatatttgttctgtatattttaaatggaaacataaaatacagataacttggaaattcaagtgcactatcagggattttacagagttataaatnactctcattagttactgggcagtcttcatactacatggtatattttccaatgcaaccactttt

SEQ ID NO: 129 - DNA, 401 bp, Homo sapiens
  SITE (336): n equals a,t,g, or c
  SITE (394): n equals a,t,g, or c
aattcggcacgagcaaagcggcagtcgatccctggtctccacggcggtgcagcctcagcctcctcgcttttaacggtcggcttgggcgtcccttcggaatgccttcctcactgatggtgctttattaggattcctcttgtgcttaattacctcctagcctcctgctggcagcggggtgccgcctcctcaccgtaattaggctccgtcgagagccctttcccttcttgccagcccagcaggctcagagttggccgaagccaggggggaggggacggccatgggaacccagcggtgttgacccttgccctcggggacggggccaaggtaaagccaganttttttggccagacccacatagaacttaaggaaacccctttatttttttggaacccgnaagtgag

SEQ ID NO: 130 - DNA, 355 bp, Homo sapiens
  SITE (45): n equals a,t,g, or c
aattcggcacgagtacacacaggggatggagcgaaggctgcagtnattcctaggaagcagcagagccagcagacagcctccaaacccaggttccctccaacacatcctcccgcctgtttttgttctagtttccacatgttccgtgttagtaactctctgcatttccaataccaggcacaggtcgtggcaccgtgtgtaggtatcagtgaatatattttggaataatagacgggagaatgggtgaaggaaattagggaatagggaagcatttgaggcagaggggctccacttggcctctggtgcatacacattgcatcctgtcctatctatgggcttcagaggttgctgcttcctg

SEQ ID NO: 131 - DNA, 305 bp, Homo sapiens
  SITE (38): n equals a,t,g, or c
  SITE (300): n equals a,t,g, or c
aattcggcacgagggaagtcattaaatgaagccaagtncttttaaggtagctaattgacacttctgacaatgcaatcatgatcctattatggagataacagcagcaaaaaaaagttttttgagcccctgctatttgtcaatataccgagcattgggaaggtaaacagatcagtcccggttcctccctttggagggggttacagaacgagcagggggactgacattaaataaatcattatgcagctaattcgttaattactgttgtgataagtgctataaaatggaatatagtcaaagaanaaatt

SEQ ID NO: 132 - DNA, 314 bp, Homo sapiens
  SITE (305): n equals a,t,g, or c
aattcggcacgagattaagggtcagaaggttatgatacaccattattcatttttgtattttatccgcaacaaatagctagaaaatcaattcattattaaataccagagacataagagtagagtagtataaaatacaaaactgttttctactaaaaagcgttaagctgaaatatgattagatctctgttaaaacattgggaagtacagttctatttagtacatttttcagctacagttgatgtktatcactaggraaaagctttgttgacctgcttttctacatgggtgacctttactcagtgggntatttggag

SEQ ID NO: 133 - DNA, 240 bp, Homo sapiens
  SITE (82): n equals a,t,g, or c
tctgcgttcgcaggagaatgcccaggactgcggcggcgcctcggacacctcagcctcgccgcccctactcctgctgcctgtntgtgcctgggggctactgccccaactcctgcggtgacaccacccagcctgacctgtgttttggcaaggtgatcctttccagagccatcccaaaaagtcagcactgacatgggatgcagctaaactgcagttggggtcgcccccaggccaaaggttcct

SEQ ID NO: 134 - DNA, 367 bp, Homo sapiens
  SITE (342): n equals a,t,g, or c
  SITE (356): n equals a,t,g, or c
  SITE (366): n equals a,t,g, or c
aattcggcacgaggtcacataggctgactttttgtggaggaaaaaagcaaaataataaaaataaggcctacctttctctatgtctgaaacgtgaattgagtaccttctaagtaaagggaaaaatatcagatccatggcctcaaagcacaatccctgttctcatggagttcaattaattgggaagacaagttgaaaatcttagagcagtggtctttaaatatcagtatatattggaataatctgaggaacatgttagaaatgcaaattccttgatcctgaaccagagattctgatgtagtagatttgggttgagtctgagtttttagcaagctctgccgccanccctagtaatctgntacagttganc

SEQ ID NO: 135 - DNA, 321 bp, Homo sapiens
  SITE (287): n equals a,t,g, or c
  SITE (290): n equals a,t,g, or c
gataattccagaacactagtagacagctctcctgagcacataattttacataattatgtaattactggcagcaaatgggtatttactgcattcaagcaggaaaacccagcttcaccacagactgattcttctaaaacgtttaaaaataagtatatgaaaatgtgttctgaattaagaactgggtgagaaaattcctaattaaaaaaaaaaaaagccttagctgggtgtgttggcacatgactgtagtcctaactactcggtaggttgaggtgggagggtccactttnagncccaggggttttgaggaccagccttgggcaa

SEQ ID NO: 136 - DNA, 425 bp, Homo sapiens
  SITE (377): n equals a,t,g, or c
  SITE (407): n equals a,t,g, or c
  SITE (421): n equals a,t,g, or c
aattcggcacgagccacaattgaatatgcacctgacttccgcttctatattactaccaagttaagaaatcctcattatcttcctgaaacatcagtaaaggtaacattattaaacttcatgataacccctgagggaatgcaagatcagcttctgggaattgtggtggcacaagaaaggccagaccttgaagaagaaaagcaagccttgatattacaaggagctgaaaataaaaggcagttaaaagaaatagaagacaagattttagaagttctttcatcttcggaaggcaatatattagaagatgaaactgctattaagatattatcttcctccaaggccttggctaatgaggattctcagaagcaggagtagccgangagacagagaaaaggttgacaccacccgcngggcttttcgtccnattg

SEQ ID NO: 137 - DNA, 326 bp, Homo sapiens
  SITE (19): n equals a,t,g, or c
  SITE (247): n equals a,t,g, or c
gccagtaacatggtatttnattatcaagtatcatgtaccatacataattctatgtgtcatacttctacatgcagcctactgtgcggcttgtttacaccatcatcaccacaaacatgtgagtaatgcattgtgctaagatgttacgatgcctttgtctttagacaggaatttttcagttccattatgatcttatgggaccaccatcatatatgcagtctgtcattgaccaaagtcattatacagcgtntaaactgtacagttgtcttcatttcatgtaacagaatgctttaccgtaaatggctatggcaatgcccctccaagtaaat

SEQ ID NO: 138 - DNA, 421 bp, Homo sapiens
  SITE (319): n equals a,t,g, or c
catcctcccagagccggaacacaggagcctgccccgctccacctcttccaagctgcatggacttgaccaagcacctttacttccccatttcctcctatctaggatggagataataaaacctcctccctgcaaaccaccatctcagaaggctgtagtgagaatcaagcaagacaataatggagaaacttctttgaaaacagtgaggtgccagtcaaatctaagggcttctgagagggcagcagtaaataggtattgcacacggcagctcctgggggcccactgggagccactyaccacgggcatgggtgcacggtgcctnttaagcaagggcagacagagttggctgcaacaaaggcttttttccttcggtattttttattaaagggggattcgggtgaagggaaatgtttttggaattaga

SEQ ID NO: 139 - DNA, 351 bp, Homo sapiens
  SITE (335): n equals a,t,g, or c
  SITE (348): n equals a,t,g, or c
aaggcattctgaagactctatctgcaagaggaatttttctgttgtttatagctatcctctgtagacctgatcctgaaacctatttcccaagtagtaacctttatttttacattattgagcctgaatgctgatcatagactttccttgcaggtggtgctaaatgagaatgttgacacatttattttggaagccactggggaatgccgtccagaattttagctgatcttactttcactgcactctttttattgaaaatatatttttggttgacattcaaaaaggagacaagaacaggcagatgtctgggattaagactgccacatcaagtcttcccnttcatttggcccntcc

SEQ ID NO: 140 - DNA, 212 bp, Homo sapiens
gttttgtttttgtttttgtttttttgtggcccatgaacacccagagtggcccttgggcacaatccctttgtttccagacctccagaagtcaagtggattcccagttgagttgagcaagggttttttgttttgttttacaaagataaaaacttaagtctcatttagtgagacaattaacaagctcaggtttttgaaaaggataaaatctgagg

SEQ ID NO: 141 - DNA, 241 bp, Homo sapiens
  SITE (193): n equals a,t,g, or c
  SITE (204): n equals a,t,g, or c
ccttcattaaaaaaattaaaaactctttaaaggaaacgtgggctaagttatttttctgagagactataagatttgggaagaaaaataatcatgatgaaacgttttgggaatatttttggtatttaaaattattgtagaaatttataaatgtgcactccacaatcacacacttacacagttccgccttgccagnagtgtagaccngccagcagtgtagacagatctgggtaactatctttga

SEQ ID NO: 142 - DNA, 354 bp, Homo sapiens
  SITE (331): n equals a,t,g, or c
ctccgtatgagcatctaatgtccagtgatctgaggtggaacagtttcatccagaaaccatgccccactcccacccccgcaacctgtttgtgggaaaactgtcattcaagaaaccagaccctggtgccaaaaaggttagggaccgctaccttagggcccaccaattccaatcctaggtatatgtctaacagaaatgcatatatatggataccaaaagatgtgtaaaagaatgttcattgcagcactattcacaatagctggaaaatgggagcacagtgtccatcatwggagggatacatacagtgtggtattcatagttacaatacacagtnttgtaaaggggtggactacagca

SEQ ID NO: 143 - DNA, 295 bp, Homo sapiens
  SITE (46): n equals a,t,g, or c
aacaagtacatcattcaggtcttctgcaggtcatgctgttttccangctgactgtcattaacagccccagttttccggatattttattcattcaacaaatgcataatgaatatgtgcaaatgaatacctactctgccaagctttcttcccctcaagtgctaaaaatagagcactgctagagatagtccctgctctcatggagtttatgttttcagtgttaattgagaaaataacactgggagggtctgagggagaactagcatatagagtaaccatatcgcatattgcggttgaa

SEQ ID NO: 144 - DNA, 319 bp, Homo sapiens
cttaaacctgctagaccaaaatgcaatttgatatagwagtagstatttttttctctttctcttgtttttctctctttttaaagmaaaaaaattgaatgattattctttaccttattataagataaatagcatctaatatagcaaatacaggaatgcatttgtaaagtctgattccacatcagttgtttacaacattatttgaacattttggctattgtctcatgacccatgttagaatgggttggagtgtttcaaatctaatacacagtgagctcttctttaaactctaatgaagctgggctgggtcacctatttgggg

SEQ ID NO: 145 - DNA, 300 bp, Homo sapiens
  SITE (136): n equals a,t,g, or c
  SITE (261): n equals a,t,g, or c
  SITE (267): n equals a,t,g, or c
ctgtgagagtcatgaactaatttacccttagatgaagtgaccttctctgcaggtcaccatccccacgcccaccagcaaggtgtagggttgactcagattgaagagtgcagagccgttgcacccctgcagtgcgggnccctggctccaccccgacctcaggctctgaccctaaggagaggcaggggtgacctctggtgtccttcacagatgcaggatccttactttcccgcattagacctgtggaaaggagaagccagtttnacaagntgtgggggcttaccacgggagaccagatgaatt

SEQ ID NO: 146 - DNA, 326 bp, Homo sapiens
  SITE (326): n equals a,t,g, or c
aattcggcacgagggacatttaggttgtttgcagtttttggttattacaaataaaattggaatgaatattcatttacaatatttctgtggacataggctttcatttctcttgggtaaatacctaggagtggaatgactggttcaaattatatgttcaagcttaaaagaaactaccaaactgttttccaaagcaatcgcaatttgcattcccaccaacaaggtataaaagttccagttgcttgtgagcatttggtgatatccaattttttcttcctaattttagccattttaataggtatgtaatactgtttatagtggttttgcan

SEQ ID NO: 147 - DNA, 391 bp, Homo sapiens
  SITE (283): n equals a,t,g, or c
  SITE (285): n equals a,t,g, or c
  SITE (325): n equals a,t,g, or c
aattcggcacgagaaaaaaaaacaccaaaagcaaaaaacttcaatgacctgtactattcactgtttacctgggtactgctctcaaaatttgaattaatgctttgtgcttcaagtctcatgcattcttgcattcttctaaattctatgcacaacacagaatatgcagaatgatcttccagttaactcatttatatggacaggtcttaatacaatgaatagcatttgtattcaaagtacagtctattttaggtaaaatgttctcctttacaagcaaattacaagngntttaactgtacaatgtacttttttctgtatttttttgggnaattttggcctcacatcacccaggttgaggtgctcccaatactatatttaagggggtcaggatctg

SEQ ID NO: 148 - DNA, 352 bp, Homo sapiens
  SITE (313): n equals a,t,g, or c
  SITE (332): n equals a,t,g, or c
  SITE (339): n equals a,t,g, or c
aattcggcacgagttacaaactcagtgaatctagcttcatcagggtcctcccacacatcccctttccaagttgcagggtcccatttttttccaatcagtgccttcactttaacagtagacacctggtgaggctgtgcatgcaccttttgttgcagatcagccactcaaatgataagagtttgtctctgtgtttccacaattttagctctttctctataggagataagaccctcactcagggcaatcttagcagttttgaggctcagtatctgcttctggggagatggaatccctgagttcatcattttctttnatcaccttgttcactgacnttagggnaaccactagttca

SEQ ID NO: 149 - DNA, 302 bp, Homo sapiens
  SITE (230): n equals a,t,g, or c
  SITE (271): n equals a,t,g, or c
  SITE (300): n equals a,t,g, or c
aattcggcacgagcacgtgagccactgctcctggccccaaaaataattaaaatttaaaaatcaaggtgcgctggctgtgacccatgggctgtggtctacagcccccggtttagaccctaactgccatgagaatggaactgttgtcccttatcaccacctggcacatcgctgggataaagtgcaggctcatgtaaatagcctgtgttcaagaaaataaagaaaawaaaaangaaatagggggccaggtgagccccatcccgaagctttagantcagcacttgctattgaacaaagtccagngg

SEQ ID NO: 150 - DNA, 340 bp, Homo sapiens
  SITE (306): n equals a,t,g, or c
  SITE (312): n equals a,t,g, or c
  SITE (333): n equals a,t,g, or c
atgccttcaccaaggcagggcagagctggataagggtgaacagaaagggacaaattattgatgagagttctgtgagtagaaactcctttctcttctttagaatttctgcctccagtttgttaatgccacttccaaaatacactgctctgagctgaagataatactgcatgcagatagagtgccatgaaggcattggtttgcagtgatctataaaggactaatgtgccaggctctgtgttaagtgcttgactttcaccaccttgtttacccctacaacaacaattttttaaattgccctatttaagntatagngcattctatccattctaaaanggtttcc

SEQ ID NO: 151 - DNA, 392 bp, Homo sapiens
  SITE (46): n equals a,t,g, or c
  SITE (327): n equals a,t,g, or c
  SITE (383): n equals a,t,g, or c
aattcggcacgaggttacttggggtatataggaattcacatatgtnctccattatgatttaatggaattggttttgtttttctgtgtagttttggattcctcagaaacttgawtcagacgaggaccctgttggcctcttgatccctttggggctctgcttgtgagtagcagcctccctgtacctccctcattgtggcagtcagagttcaagccctcattacaggaatgatcataataattatactactgaagataatagcaagaataatatatatgtcaggcagttctaaaagtttgacaaatattatctaatatccttaccgtagncttttgccgtgggtgctgttattggtctcctccctaccaaaattactttattaaancccatctcc

SEQ ID NO: 152 - DNA, 401 bp, Homo sapiens
  SITE (353): n equals a,t,g, or c
  SITE (357): n equals a,t,g, or c
  SITE (384): n equals a,t,g, or c
aattcggcacgagcttgttttaccagttaaactaattttctgagtttcgatattttatctgcacaatcatttcttatagaaagttcagtttgattaagaactgttttgagctaaatttgagctaaaaatactttcgcaatttcttgttgctgacaactctgttgaggtaggtaacgtactggttttaaaggagagtaaattaaaggtagagattattttgtccaaggtcacggccagcagagctgcttgttgaaaatccagaatatctgagaccattgctcaatttactctatttgagctgttttctcctcatcttttcagtaagatactatagttttacaaatttggtttgntttngtttagttttaggtgggggctcactcnttgcccaggtggaatcc

SEQ ID NO: 153 - DNA, 441 bp, Homo sapiens
  SITE (333): n equals a,t,g, or c
  SITE (407): n equals a,t,g, or c
  SITE (417): n equals a,t,g, or c
  SITE (431): n equals a,t,g, or c
aattcggcacgagctttgatacacccagcacattcagtttagaaagtacaatattgatatttgaaagcaatgcgtggtagttgattttccactaaaatttaaatgtggacagggtattatagagcttgaatgatagtcacaggctatttaaggaccaacttgtagagtaaaaagttgctatgtaatacgcttagcataaatttagaagtaaaacctgcaaggatagcatatagccttgtgagaatgccatttcccttaggagcctggtatttagaatgttatgaatgggrtatttattataagcctgttttttttgtaaaggcttgctttttngatattaatattggaawtgaattacgggagcccgttttggggacttgacccctttactgactgcggaatttcanggcttaaccncatcagccaatgtnagcggggttt

SEQ ID NO: 154 - DNA, 352 bp, Homo sapiens
  SITE (352): n equals a,t,g, or c
aattcggcacgaggtaccaccattgacttaggtttttaaaccagaaacctaggatttagcttcaattcctcactttttctgaattttcacatccagtccatcagcaaaggcctttccattccagctacaaaaggtatcttctatccttctatttctctccatctccactatcatacctcagtctaggctaccagcatttctcagctgagatagacaaatcagctccaaggccttgtgtgatctgctgcctgcctcttttcagtctcaccatgtatcattctcccctcgttcactagacttcagccacaatggaccgtctttcagttctttkgatagacccagctctgttccn

SEQ ID NO: 155 - DNA, 428 bp, Homo sapiens
  SITE (381): n equals a,t,g, or c
  SITE (390): n equals a,t,g, or c
  SITE (422): n equals a,t,g, or c
  SITE (428): n equals a,t,g, or c
aattcggcacgagaaagagttaaaaagcaggtggaggaagttgaggtgtagaacttttattagttcatttttgcttgtttgtttgtttatctaaacagtgttacatttttatcaggttaaaatagtgggtactgagacagtatttgcaagtccatgtgggaatctcaagtcaaaatacataaaatggatacaaaaaaaatagaaagcaagaaactaaactgtatcaacagagaaaatcaccttcactagaaggaagacaggmaggaaagaagaccacaaaacaaccagaaacaatgagraaatkgraggagtaagtccttcttatcatatacatgatgtaatgggtaacctccatcaaacacaggtggtgatggggaaagncagtctttngccgtgctgcagaacacattccctttgggccncttgcn

SEQ ID NO: 156 - DNA, 260 bp, Homo sapiens
  SITE (241): n equals a,t,g, or c
  SITE (251): n equals a,t,g, or c
agctcaaattccccgaacttgagcactagagtcttcttgttctgatggaatatgttctgaaatgtttaagggagaggagaaggatgcctgcaactgaatttcaaatggttcaggggaaggataatagagtagaatagactatatagatggagaaagtaaatgtggcaaataacaattggtgaaggtgggtgaagggcatgaaattctttgccttacaattaattcttctataagtctgaantatttgaaantagagaatg

SEQ ID NO: 157 - DNA, 309 bp, Homo sapiens
  SITE (54): n equals a,t,g, or c
  SITE (218): n equals a,t,g, or c
  SITE (249): n equals a,t,g, or c
tccaccagtgccaaagsccaagaraggagggtagaggaggaaagcagctcccanctccacttcatttagaagccagtgcaaaaggcattttgcagtactcagggctcactttggtgatgaacgcggattgacttggaaagtgtcttaaaattgactgcaattttagaaaggtaaagagtaagcctttggttatatctagcaatcctggaggtcttccntacatgaaagtttttacagacactctgggtnaagatggatggacaggcacaacacagtttaaaacgtttttcatgaaggaaaaattgggtg

SEQ ID NO: 158 - DNA, 181 bp, Homo sapiens
  SITE (115): n equals a,t,g, or c
aattcggcacaggggcctggaaaaagcactatccgactggccaaaaggcatcaaggaagttctctgggttggagactktacccagaactggcagcccgggctccaggcttcaggncatccctggcttgtaggattacaggcgtgacaccgcgcctggtttatttaatgtttttaaataaac

SEQ ID NO: 159 - DNA, 202 bp, Homo sapiens
  SITE (151): n equals a,t,g, or c
gactgcacccccaaaaacccaggragtagatttctggctacttctcagcgatgacaaagtttttctagggtcctcaccctcctccacactgttgttgtgttgtaaatttcacttattgctgtagctttctttcctcctatctagcgcctcnatgtatttccccctcttttctttgaagctctactgtatgtttttcctattt

SEQ ID NO: 160 - DNA, 330 bp, Homo sapiens
  SITE (283): n equals a,t,g, or c
  SITE (291): n equals a,t,g, or c
  SITE (326): n equals a,t,g, or c
aattcggcacagcttggaataagttacccaaggaagaaagaacattaacttgattgagtgccttctggagccaaaggtttkatcgatgctatctcattaacatagcttcttgaggcccaattacttcacctgtcaagtggggatgataaaatcatccttgaagggttatagtgaagattaaataggatgaggcattgaaagtgtttggcacatcacgagagacctcttcctcactctaaactctcaatttgtacctgtatactgccaatcacattatttatcnctcacaantaaaaaaaaaaaaacctccatgatgtgaaggatgntgaa

SEQ ID NO: 161 - DNA, 218 bp, Homo sapiens
  SITE (204): n equals a,t,g, or c
atacgatggagtagaccggaaaattaccatttttgaagtgctggagagcaaagggagaaagggaagaggatattgatgttatcctcagaggctatcctcagatgtgtctgtaaaaccaaaagtggttctktttaaagaattaaatcttttggacaaaatagaagtatcaaagactaagaggaggaaaatcagraggggtctgtntgttggaagaaagg

SEQ ID NO: 162 - DNA, 186 bp, Homo sapiens
  SITE (10): n equals a,t,g, or c
aattcggcanagtgtgaacatgtgaagtagaagtactagtataaaattttggtagataatgccaaagtgatctcacaagtgtttactaatttttattcctaccaacaaatataaaagtgccagtttatccctacactctttatagtacggtattttcttttctttttttttttttttttttgggga

SEQ ID NO: 163 - DNA, 1005 bp, Homo sapiens
  SITE (922): n equals a,t,g, or c
  SITE (1002): n equals a,t,g, or c
tggaagtaatgatttggccattccagagattctggggctaaagtttgtttttccagggctgctgatccttttccagatagctscagagtatgatgaccccagccccatcccaatctctagcgaaagggttatgcaaatctcagggtgttgcctctaaagaatctaaagaatagacatgctttgggcttactcagtgtaccagattctctagtgggccattctcatttgatgttccctagaacctccctgtcttccaactgcaggatgtgtttacttctcttctgggcttcccctggtttctgtcctagttcccaccccaagtttaagaagacttagattcatttattgctatctgaggccactagtgagatttcagatctctcttttgcaacattttacccatttcccttccccaaaccatgtgcttattagatggttccactcaggaagcaaggaagctaaaactcaagttaatggtctgtggaatcccacgaaagtgtgtgtaaactactgactgtttctccactagaggcatttaattgagccaaagatgatggaagaagaaactctcaaagccatgtactttgttaggtgtctggatttttggcctgtttgcagcctctcctagccacagacagacactgtctcctctcagagaaaggccagtgtttcggtccaggccactggtgagtgtcggcacccttgaggtgggcatggagtgagcagaagaagcctggagaagagagaactatttaaaagtgttgccagttattcagcttccaggcggctttgcacctccaaaggtgcaaaaaggaaaaagaaagcagaaaggattcagcatttaagcagaaagaaaagggaaattctactctaccagatgagccactggttccactggagcttatcagtgaagtaacactgnaggagccctggtatccttcccctcagagatatcatcaaggggccttaaaaccccattggtttatgccagcacctgaccgnact

SEQ ID NO: 164 - DNA, 118 bp, Homo sapiens
  SITE (109): n equals a,t,g, or c
agtctgggatttcagagactaggcccttaacccgttacatttgatcttacttagcatttatcatctgtatcacaacttttagcttgtatactgatgttgtctctgactnattgggagt

SEQ ID NO: 165 - DNA, 262 bp, Homo sapiens
agggaatcttcctgcctcatccttccatcgtgcagggrttacaggggtgagccaccacacctatctcttcttataagggcactaatcccattcacaagggccccaccctcatgacttaatcacctccaagaggccctgttcttaataccatcaccttgggcatttgggcttcaacatatacatttagcctggacacagacattcagtccacagcagggtctttacctcaaaccgtacctgggtcttctctcttcaaacctgg

SEQ ID NO: 166 - DNA, 400 bp, Homo sapiens
  SITE (8): n equals a,t,g, or c
  SITE (326): n equals a,t,g, or c
  SITE (371): n equals a,t,g, or c
  SITE (388): n equals a,t,g, or c
ccggaatnaggagcagctcatttctaagcttcaggaaattgaattggatgacacactggtgaaaatttttcgcaagcaagcagtcttcctattagaagccggaccatatagtggtttaggtgaaataatccatcgggagagcgttccaatgcacacatttggccaagtatctcttcacctctctcctacctcacgatgctgaattggcatacaaaattgcatcagttgttcccaaccgcttaccctcgctggttcactctaagccacattgagtcccagcagtgtgagctgggcatttcaccatgcttaactgcaggccaaagggnattgtttcggggggctgggaaacagtatttaggaattccattccnggaaaaacatttcaatncttcattcacaa

SEQ ID NO: 167 - DNA, 545 bp, Homo sapiens
aattcggcacaggttcagatgaaagggcagattaaatggactcatcagggtaagaggaataatatgggtaaaacaagaaatggcccgatagtttcacactattcctatacctccaggtccggaagacaggtaaaaaattctataatgtaagaatggaggtagttaccctgatttgaccctgtgtgggaaatgctgaaagcaccaggaggaagccggttcccgtgagataagttaacccggcctgacagaatcaagaaaattgagatgagatttgaaaggacccgaaaatgcaggggttggctttctgactgggaacttaaaaatcactcttcatgcttccctggtcctatgtgataacagagttagagacttgagtctgatttcagtcatcttcagggaccagtctgatgttgtagcaagaagactccctttaaaagtgttactgttcaaatcatatatcaggttgaatcacattcaacagagatatattctagaatacttttttagaagaggctaataaagggaagaattatattgaatggaaa

SEQ ID NO: 168 - DNA, 467 bp, Homo sapiens
  SITE (438): n equals a,t,g, or c
  SITE (460): n equals a,t,g, or c
ggtagattttttttaaaaactaaagarctgccgcataaaaggaacaacccctggtgagccagaaggtagtgcgctagagtgatggaaaggtgggtgagagtcgggaagcatagggtacattcctggaataccattaactcgttatgatattttggggcaataaaccctttcccgtttatctatcaagtggaaataatcatcagaattttcaaaggggtagaatgaaatcatgatataaatgcattcttagaactataataaacagtgaaaatatgaatgataatatttgtattaccccttagggttaacaagtctctaacatgaattgttttataatacaaatgccaagtcttttattaatataaactgctgttatcccatattgttcagtactaatgaaccagactttcagtcttttgaaacacagctttgggaaangatctgtataaattgtattcanaggttgc

SEQ ID NO: 169 - DNA, 357 bp, Homo sapiens
  SITE (273): n equals a,t,g, or c
  SITE (335): n equals a,t,g, or c
  SITE (343): n equals a,t,g, or c
ggcagaggcttgcttatcttacggaaacgttagaaacacctatatatacagtagcaggggcgtggttaaataaatcacagcatcagatgctctgcagacatcacatggtatagctttttcttttcttttttgtttttgagacagtgtctcgctttgtcacccaggctggagtgcagtggtgcgatctccactcgctgcaacctctgctccctgggctgaagcaatcctcccacctcagcctcccaagtagctgggaccacagacacacaccantatgcccagttaagtttttgtatttttagtacagatggggttcgccatgttgttcaggccgntttcaaantctgagctcaaggg

SEQ ID NO: 170 - DNA, 372 bp, Homo sapiens
  SITE (196): n equals a,t,g, or c
tacaggataaaagaaaaaaagaaggaaattcacctaacagaacagtagccattttaaagtaaacaattcaatggcctgtagtatatttacaatgttgtacarcctctatctctgtctagtttcacgacattttcatctttccaaaggaagcccttgccctttaagcagttactctccattccttccttcccccagnttctggcaaccaccaatccatcttctgtctctggattacctagtctggatagttcatataaatggratcatacaatatgtgacatgtgaccttttggctgattccactcagcatrgtatctttagggttcatccatgtcatggcagcacgagaaccctgccaacgtgggataagca

SEQ ID NO: 171 - DNA, 277 bp, Homo sapiens
  SITE (252): n equals a,t,g, or c
tttgaaattacctattgctgctacttgttcaaactggtgagggagggtgggaaccgtgggcatagggaagggcaatttgaaattacctattgctgctacttgttctgtcctctgaccttggggcaaaggrgccccaggccctgtctccccagcatcctccctggtggccctgggcaggtgcactgacacccccaccttcccatccccttgctggaaccaggccctgttacacacagccgcctgaaggcccgnggcttcatgtgctgcccgcccccat

SEQ ID NO: 172 - DNA, 352 bp, Homo sapiens
  SITE (16): n equals a,t,g, or c
  SITE (323): n equals a,t,g, or c
  SITE (342): n equals a,t,g, or c
agggaccagccagagncagtgggagaggaaccatcagggtttccccggaagttatcccagtgggtccatctgtgacccttgtactctgaggtcacctaagcctcagaggtgaggcacctgcccctgcttgtgccaattgctgcacagaggaaggagaggaggttcttggcccagggattccagacccatggccagcctcgtggccatgcggatcttcagcactaggctgcctgccaccctggttcacargaggccccatcccggcctctgagggaaggggaacgcaagaccagacatacaagggaggaagttaaaagcagaantgaaggggttgggaaggtngttaaaagtt

SEQ ID NO: 173 - DNA, 410 bp, Homo sapiens
  SITE (201): n equals a,t,g, or c
  SITE (274): n equals a,t,g, or c
  SITE (320): n equals a,t,g, or c
  SITE (348): n equals a,t,g, or c
ggcacgaggtctcctgtctttaaaataatgtggaggcagctctgaatatactaaaaccattgaattgtacccttcagatgggtgattttgtggtatgtgaattttatttcaatgaagctgttaacagaaatagtacagagtccgtactgttgtgttttctggagcacctggagtcccctctgtccctggccatccctcctngccccacacctcacccctgtacctcaccttccccacccccctgcctcacccctgcacctcaccctccccacgnttcccgtgattcagggagcttcttgaaacacagaatgggggtgttnaagatgattggagggcagcagcctattnggaatcccgatggaacgtgggaaaggtgttcagggaggggttagctgttggtgttggaggag

SEQ ID NO: 174 - DNA, 408 bp, Homo sapiens
caagaagctcactttgagaaatgtggttctaacctatgaatctaaattcctcctgggcattatccctctctgctcttattctctccttggtagaatcagagaacaagatgtaatagtccctccagtacttaaatctaaaagtcctctaccactctgttgggcacctggagagaggctgcaggtccttggcttsaaaacattagccaatgaaaagtccttccccaagctgcaaccagccagcccaggtcagcagcatgaggaatgcatttctgagggctgctctcaggcagagaagggcacctcctaccagaaacatgatgttctgaagcaccctcagagtytccttgcctggggagttgtactggggacaggatgtgcagggtgcttttccagagaggagtctgagga

SEQ ID NO: 175 - DNA, 294 bp, Homo sapiens
  SITE (161): n equals a,t,g, or c
  SITE (199): n equals a,t,g, or c
aaaaaactgaacctactaaaatggaccaatactacacacatacacttacacacacacattcattaataacaagtcagtcctttaaattaaattaaacaggatagagttactgctactgcttctgggaattgtcccatatcagaaagagcctaaaatttctnaattatctctcatttaactgaaactctcagggaatttnaatcctcttcagagagcctattgtcttgaaattggcacatttagttaaggaaaccaagttctttttatccaaggtactttatggaatattggagg

SEQ ID NO: 176 - DNA, 467 bp, Homo sapiens
  SITE (371): n equals a,t,g, or c
  SITE (411): n equals a,t,g, or c
  SITE (433): n equals a,t,g, or c
  SITE (467): n equals a,t,g, or c
ggcacagctacagggagaacctcaagctccaactctgaacaacggaaatacacctcctctctctctacccaatttcctgccagccagagaggtggagctcccagttctaagtggtcagtgagggcctctgggtgaggcaggcagagaagcctgtaaagggagtgtggaatagaacagggggaggaaaaagaggaggtgcaagcagggtgatgaaagagagggcagccggggaagccagagcaagtctgcagggtggtgatgaggggagagtgggcttggcaaatggggraagaggraccagcccccttctctarttcctgtgtgtaatgggacaactttcattcaagggctggcttgcagttyttcccttntgatctgatcatcattcagctgatttcaaccgtgttaatnccttgaagttacattcagcacngctaacaagtttcagtcaatgatgggggcaccan

SEQ ID NO: 177 - DNA, 456 bp, Homo sapiens
  SITE (377): n equals a,t,g, or c
  SITE (379): n equals a,t,g, or c
  SITE (413): n equals a,t,g, or c
  SITE (456): n equals a,t,g, or c
ggcacaggcctcatgtaactttttcttcagaaccccatgcaggtgtttcagggctttatgtcattcaaggatgtggctgtgaacttcactaggaagaatggagagaactggaccttgctcagagagtcttgtacagggatgtaatgctggagaactataggaacctggtctccttgggtgagcttgggtccttccaccccagattgacctttcaggatacctttgccttctaaagattcccttgcttctattagggaatggtaacaaatgaggctttggttattttcccccacagaatccagatcagatccttaaactgtttctcaccctacttgggtagaaattatttaattgcttttgacaattagttatttcgntntctcctctctaaaatgcaacagagtgggactganaatagagtggcctttctcttttgaacttaaaattacattctgn

SEQ ID NO: 178 - DNA, 322 bp, Homo sapiens
  SITE (118): n equals a,t,g, or c
  SITE (307): n equals a,t,g, or c
atttaacatttaacatttctaagaaagaaaacctctttcttagtgtctggcacatgagaaatactgagtaagtattgggcacttctcctgctactgttctttggtgaccacgcagatnagrtgsaagctaggttttaagtctttactgagcacccattatgtctcaggcactkttttgggcttttagaatacatcagtgsaaccaaatagattctggcctccatgaagcacacattctagagtgggtaacagacaattaagcagtggaatgagggaaggggacaaggacagtctccagtaactgttngtattatgcgtgctt

SEQ ID NO: 179 - DNA, 416 bp, Homo sapiens
  SITE (387): n equals a,t,g, or c
  SITE (404): n equals a,t,g, or c
ggcagagcactacagggctatgtggagaagcatatctcccatagcatggcagcagaaagggctgtgatctgttgataatgtctgccctgcttatgggagcagggtgcggcgttccttgaatcctgtgtccggcaattcttcccaggttgcttaacactattggcacatctgtaaagaaccacaggactagggaaattttaaatagatcaagttttatttgcttagtagaaaaagggcccctccctttgcaaaggattggagratagaggcttcacagctgttaatccagacaccttgatcacaggcacaggatccattggtgraaatgcccttcaccakttttttarggcatgwtaacttgcagagrctwtagccmtgagttcaggnatgggaatttcccgatnagagtaactcca

SEQ ID NO: 180 - DNA, 318 bp, Homo sapiens
  SITE (273): n equals a,t,g, or c
  SITE (317): n equals a,t,g, or c
  SITE (318): n equals a,t,g, or c
ggcacgagcaaagactttggagtagggtataaaagcccagattggaagctctgacctggaaggacamcacagttctagtcctgactgccacgaacatgctgaatggccttaagaaatgacttaacttctcaacatcctgtacttcatctgtaaaatttatctgcctagcctatgtcatagagttgttaccgggaaacaaattagagaacaaacagttgtaactaaggtttaaaagaaaagttgatattgggagagaaacgttgcttatgaaanttgggattccaattagttgagccatttgagttggtatattgccnn

SEQ ID NO: 181 - DNA, 417 bp, Homo sapiens
  SITE (410): n equals a,t,g, or c
agggcggccagctggtctcctggcaactgaagtccgcgcttcccttccgttcactcattccttcctttcctcatgcaggaggcgctgcaaggctccgtgctcctggagcttcgagtctatggtatgagttaaacagaagggtatctcctccatcagatctacaggagggtgtctgctccatcagacctggagcttccaaggcattttacccgaagctccagcacctggcccaaggctgggctgtgctgtgtcctcagtgaaagaatggatgagtcacagctggaatgactgaagagctgaaccataggttttccctggggttttcacaggcarttttaagcccagggargacccmggggatgagggccacttgcaggacgttttggttttggaggcaacaacctgggcanggatttg

SEQ ID NO: 182 - DNA, 314 bp, Homo sapiens
  SITE (252): n equals a,t,g, or c
  SITE (313): n equals a,t,g, or c
ggcasagcgaggctcactctttcccggcccctgagtaagatgggaaagaaggtgcccacacagggcctggtgcacaggaggggctcagcacaggttccctgctgggacacagggccaagacctgagaatgtgcctccaagtggggctgggccctgctgctgggagctggcaaagggagctgggaggggagggcctggaaagccacattattaatttatttactgccatggcattccccatggggcggggytncccccagagctgggacagatggtgtctgggagcctgcagtgtcttagcagcttggcacccng

SEQ ID NO: 183 - DNA, 333 bp, Homo sapiens
  SITE (231): n equals a,t,g, or c
  SITE (288): n equals a,t,g, or c
  SITE (300): n equals a,t,g, or c
tgtatctagccccccgggttcccctggccttgcctctcaagcaaccaccatgaaccctctgtgtgcatgtgggcggcctggagttaacccttgggtgccagcctggagagggggggcatgcatctttyttcctaattagtgtgggcctttcgactaccatgtccgtgggtagaggaccctgcccatggctcttagctccaggactttgggaggtcttagsttcgactgctncctccatttcatcagaaccgcacatccctctcagaggagcagtttgcggggcagccntggacaacttgngaggattccagattcccccagaggggcagggga

SEQ ID NO: 184 - DNA, 413 bp, Homo sapiens
  SITE (396): n equals a,t,g, or c
  SITE (409): n equals a,t,g, or c
  SITE (411): n equals a,t,g, or c
ggcacgagccagtgttcattaacctcgcactgcatgcctgatgccagcctcatccgtgatcttgctgaatccccccacaactctgtcaagtatgttctattattatcctcttttagtagataaggaaacagaggctcagagcagtgaagcaaacttgctaattccacataactggtattaatggagatagtaatcaatcccagatcatgctcttcactgctgtactgtatccctttattccagggacattgctttccctacggtatggcaggtgtggcactctycagcccctccagccccaggcagggaggacaaggagagggggaaagggggtgtcccgactattggcaaactcattcaytaactgaggggtctgctatgtgcccatcccttttntttttttttgaancnct

SEQ ID NO: 185 - DNA, 376 bp, Homo sapiens
  SITE (300): n equals a,t,g, or c
  SITE (347): n equals a,t,g, or c
  SITE (374): n equals a,t,g, or c
ggcacgagcagaagaagacagaaggggctggatgtcaggaagggcacatcagtggaggcacacatcagcggaggaacacatcagcaaaggaatacacgggcagctggactttgggaggaacatacccatgggcaaaatgatgtggagtttgtctggggtggttggagaagagttgggtcattgagcaaccgactccaggggaaaaccctccccttctggcatcccccagctgcttgagagctacctccacttcaaaataaccttgcactcattctccaagcccaggtgttgatccaattntttccggttaaccaaagcaaggaacccagggttacaggaaagccctnttgaccttccgacaaggtagagggttnta

SEQ ID NO: 186 - DNA, 418 bp, Homo sapiens
  SITE (276): n equals a,t,g, or c
  SITE (334): n equals a,t,g, or c
  SITE (367): n equals a,t,g, or c
tttggcataactgaattgccaacgtcactactcttgtggtttagggccattgttaagtaaaataagggttacttgaaaacaaacactgcaaaactgaaggttgatttgatcactgagatggatactaagtgactattaggtaggaagcatagacaatgtggatgctctggacaaaggattgattcatattctgggcagaagggctggagatttcatcgcaatactcagatagcgtgcattttaaaacttatggaattgttggctggatgcggtggntcatgcctgcagttcccagcactttgggtggcccgaggcaggtcactgactttgagcntcaggagtttagagacccagcctgacccaccanggccaaacctcatttctaccaaaatgtaccaaaaatttaggcaggcatagt

SEQ ID NO: 187 - DNA, 472 bp, Homo sapiens
  SITE (357): n equals a,t,g, or c
  SITE (378): n equals a,t,g, or c
  SITE (432): n equals a,t,g, or c
ggcacgagcctgtggccgccaaattgaaatctctgtctttttctttttttcatggccttttcagtatgcattttattctaaaattagtgagatctctgtcttcatgaggagagaggaaggggaagagcacatatcaatttggctcctgcactgaacactggggaacattctttcccttgaaaaagcaatgcatagagagaaattattctcttctcttcttccctttctcctagrttgaaggaaactttagsccaagctcaggcagagctgaaagggctgccatcgsagaccagcttgccctgcaggrggagrtccaggtcaaagrgracaccmtttatatcgrcggagkgctgtgtnatgcagatggaggaaatccancccacttcgggatggggaagaccaggggtctgggctggggggcctccgccctgnatgctgtctgctaatagttagggctagttcccaattctca

SEQ ID NO: 188 - DNA, 241 bp, Homo sapiens
  SITE (241): n equals a,t,g, or c
aactttttgaggtaatattaaaggcagtttgaccaaaatcggaattcaacaatcagggagcttttggtttgctctgggttcactctgggtttaaagacagtttggtttggctacagctgacctccctccctgtttttatgaactagtcttcttcctgcaaaactcaaatacagtacttggtatggtctcataataaatttagttgttaattatatatatatatatatatatatatatagtn

SEQ ID NO: 189 - DNA, 420 bp, Homo sapiens
  SITE (246): n equals a,t,g, or c
gtaattcggcacgagaaatggtcccataggtggatgtgaagattgagacttgtctggaatttgcttagtgtttggaagagaccatctctagaagtaaagtactaaaaatactaccaatgagacagagatgagttgctattattagtgtctctgtcattattagaactttcatcattgttacaactcagaaaatgatattgggaattagagaaggtgaaaaacatacccaaagtcacacagtgaagnaaggagtaaatctgggacatgaacttaggtctttctgactctgagaaccaggcttagcccctcagccagttaccaggctagcccacaggcaagtaaagtttggctgatggrtttggggtcattgggtgacttggggagtttctgtggcttttgtttggaaggggacctgggtgg

SEQ ID NO: 190 - DNA, 418 bp, Homo sapiens
  SITE (293): n equals a,t,g, or c
  SITE (319): n equals a,t,g, or c
  SITE (355): n equals a,t,g, or c
  SITE (384): n equals a,t,g, or c
ggcacgagcagggaagcacggggttttatgctaagtttacaatgacatgaactgaaaagcaattcaaagtcaaggttagtatgacaacctcacatccgtctagggcatctagaggggaaaacggtcaaaatgcaacattattttctttgaaaactgaacatctgttaggggattttgaaatgatagagaagtagaacagttgagttgcttcttgaactcatttaatgtgtacattttactctgggaagtaagtattttcccaagactgctattcagcgctgcatttttttccnctggattgtgcccaggcggtttcttncacaaccctctgggatgtttgccaagtccaagtacntcttaaataagcttgccagatcttatatnctggggtattccaaattcacagggtttttggaac

SEQ ID NO: 191 - DNA, 275 bp, Homo sapiens
ggacagggtggaacattcaggctgctttgtggctgcttttaactgcatatagttaaggtgcgagagggaaggaaatgatttaaaaatgggaatttataattaaatggtaagcggaacagaaagacttggaaaattagcagcttgaccatgtaaaaagtgaaaaggtatcttttagggaaagtaaaccaaggatgtgtgctaaagagatgagtgtggttacaggggagccaagtgctagtcaagacaatgggagaaaggccctgaggcattttaag

SEQ ID NO: 192 - DNA, 463 bp, Homo sapiens
  SITE (345): n equals a,t,g, or c
  SITE (406): n equals a,t,g, or c
  SITE (436): n equals a,t,g, or c
acgcccagccacctggaacagtgtttgagttctcttcctggtsacagtcgccctcccccgagagggtcccaggctgcccagggaggaccagccaagcagctgctgcccctkgagcgggtgtaccakgagattgccatcctgaagaagctggaccacgtgaatgtggtcaaactgatcgaggtagggggtggtggtgagcaggtgggaaccagcacctgagtctcatgggagccgyttctggtgctggggagccctagcacagacccagggatyttgcccargtggcagatktggctgaggcctytgaaggacarggccagactttgggttgggcttcaagaaagnttttgggggcccaaccttggtcaaggatgttcccaagttcccattgaagggttaagggctnccccaaaagcaagaagttagcccctcattncaaccttgaagggaagaaagcttgaat

SEQ ID NO: 193 - DNA, 227 bp, Homo sapiens
  SITE (83): n equals a,t,g, or c
cacacatctttttcccaaatgtttctttttgcagttggtccttgctggctgatccagcttccccgtcagcatatggtgagcanttcggtgagaggaccacacttccaatactggcagtacgggtccacaaggaccttgcttccagggaaccctrgctgctagatatcagggctgagggaagctggcttctcaacttcggctgctgcccgtgtttmttcccaccatcc

SEQ ID NO: 194 - DNA, 162 bp, Homo sapiens
  SITE (6): n equals a,t,g, or c
ttgcgnctgggactcagtgtaggacttgcctcggaaatcctatgcaaagcatttggctgcagagtcgggcaggggtttggagatcatgggaggccctcactgagtactggagtttcactgtgcctcaccagcaccccgcctatcttctgagtagcatctcct

SEQ ID NO: 195 - DNA, 266 bp, Homo sapiens
gggcasrgccaaaaccctgtaaccattcactttagttagttatttgttttacagggtttttggcatattttttagtatttgtgtttaacatgtgttttatgctacttctttaaaaaaagattggaccgggcgctgtggctcacacctgtaatcccaacactttggtagtccgaggtgggcagatgacctgaggtcgggagttcaagaccagcctgaccaacatggagaaaccctgtctgtactaaaaatacaaaattatctgggca

SEQ ID NO: 196 - DNA, 362 bp, Homo sapiens
  SITE (344): n equals a,t,g, or c
aatggtcaagactttgcctgcaggtaggagagaatctcagaaaaataacagggagcaacattaatccactgatccccattgctgatttataaagtacaccaccttaagtaggcttttaggctattttcagttttttaagtctggcctcattttacctttccaggactctatggaaaaatgaattgtttactgccctggggactgtgttctttcatggcatgttcataccatataccctcctggaatgccctgtttccatcttytatcttatcaatctcctgtcatraaaatcttccacaaaaacttttttctggatcamtttcaacttaaagttggcacttttnctttttggaattccctcc

SEQ ID NO: 197 - DNA, 526 bp, Homo sapiens
  SITE (419): n equals a,t,g, or c
  SITE (424): n equals a,t,g, or c
  SITE (518): n equals a,t,g, or c
aggttgcagtgagccgagattacaccactgctgtccagcctgggcgacaagagggaaactccattagaaaaatgtaattcccatgtctgccatcttaagtgtaaaggtggctaaattatatagaaaaataagacaatatcatttcccaattacattcctttcctmccrcactctatgatgctagctgagatttttccaaaagaaaatggcttaaataaaaccctaagagaaagaaaaactttaaatccctccaaagctcaaaagtaatagaaacagatgagtttggagtcaggatttctstgtaagattgcctaggctgtgtactgcacatctccrggtgscactgttcacagaggwttgttaactacaatgtggaaggtgatgggtgccactggacagtttatggccaaaccgtcccngagcntagccacctggatcctgctggggtttcctctttgccagttccattcaggcagttttccctttgaaaggtttttcacccaaacattccctttaantctggccc

SEQ ID NO: 198 - DNA, 437 bp, Homo sapiens
cgtgagggcatggactgtgtctgtcctgttcactgttgtattccccaagcttatgggcccagtacacagaaagggctaagtatttgttgaatgaatgagctattttggtacctgctgtgtgtcaggcactttacaaacattaattcgtttaatcttcaaaacaaccctgtgaattaagtgtgattgttattcccattttatagatgaggcactgggaggtgacttgacttgcccaaggtcacagggcttaggaagaaacagagctggaactggaacttgactcttgacttatgctggcccccctaaacacattgstccaaagtgtggcattcaggcaggttttgttgttgtttgtttgtttgtttgggrgacaagttcatactgtcgccygggattgagtgcaatggcgcgatctcggctcaatgcaacctccgccg

SEQ ID NO: 199 - DNA, 371 bp, Homo sapiens
  SITE (267): n equals a,t,g, or c
  SITE (296): n equals a,t,g, or c
  SITE (349): n equals a,t,g, or c
ggcattaaccctaagaagcagtgcatatcttgggaagggacttccacagagaagaagcattcacgcaagcaggttgaacgctattttactaagaagagtgtgggattaatgaacatcgatggagttgccattagcagtaaaactgaacctccctcatctgagcccatctcctttataccagtgaaggacttggaagatgcggctcctgttacaacctggttggaatcctctggggatttatggattcagtcaaccacacattggctnacaaggacagggtcctcccagagcagganttcaaagcagccagacggcacagccagacagcgagagtgcggcttttcaaggnccaaggttggaggagtttaaca

SEQ ID NO: 200 - DNA, 672 bp, Homo sapiens
  SITE (27): n equals a,t,g, or c
  SITE (35): n equals a,t,g, or c
  SITE (42): n equals a,t,g, or c
gcaggttatatcacagatgatattggnaatatcgnacttggnaaggagcagacttttctctcccatggtgccttactagcaaagagctgccaagctgcaatggaattagcaaagcatgatgctgaggttcagaatatggcatttcagtatgggaagcacatggccatgagtcataagataaattctgatgtccagccttttattaaagaaaagaccagtgactccatgacttttaatctaaactcagctcctgtagtcttacatcaggaatttcttggaagagatttgtggattaaacagatcggagaggctcaagaaaaaggaagattggactatgctaagttgcgagaaagaatcaaagctggcaaaggtgtgacttcagctattgacctgtgtcgttaccatgggaaacaaggcactkggaggccctgggagagctttcctccctcggaggccagatctgctttgagaaaacattgtgtttgctgtgaccagattttcatgacatcaaattaaaaagacactattgttagttagctgaaaatcctagggaatgaggttgattgggagcgctttcacgatgcgttaatgacttttaaaacatatgcatttttccttcttttatcacaattgctaaatgagttctgctttctttttggaactgctacaaac

SEQ ID NO: 201 - DNA, 377 bp, Homo sapiens
  SITE (321): n equals a,t,g, or c
  SITE (337): n equals a,t,g, or c
  SITE (340): n equals a,t,g, or c
gggcacgagatataccagggtcctatgctaagtgcatacagtggataccatgctaagtgcatataccaggtactatgctaagtgcatacaatggatactatgctaagcgcatatacgaggtactatgctaaatgcatacaccaggtactatgctgagtgcatacactggrtactatgataagtgcattcaccagattttatgctgagtgcatacagtagatactatgctaaatgcatacaccaggtagtgtgctaagtgcatacaccagtactatgctaagtgcatgcactaggtgctgtgcataaaccaggtactatgtnaagtgctcattgcctnatntcattctgagaactgaccaatgaactattattctgat

SEQ ID NO: 202 - DNA, 189 bp, Homo sapiens
  SITE (118): n equals a,t,g, or c
ggcagaggaccatcggcaggcacagtgtccaatcctaaccctgctcctatcagggatcttccacttgacatttcttgcttccctctgtcaggatggaggagctaaagattttgtccangatgggcgtggtggctcacctgtggtcccaggactttgggaggctgaggtgggcggatcatctgagggcgg

SEQ ID NO: 203 - DNA, 225 bp, Homo sapiens
  SITE (64): n equals a,t,g, or c
  SITE (207): n equals a,t,g, or c
gtgtcctcagggcaactcagaaggatagctgtctccaggagcaggtgcctgcagggacactgtnatatgcagatgaggctgccccccagccctttgkgatggcttgttycggagaagttgatctccccagtcactcttgggactttattccttgtctctttatccccatcctcccctacccttgccggggtctctgcaaaatgctgntggtcccttctgcagaag

SEQ ID NO: 204 - DNA, 410 bp, Homo sapiens
  SITE (394): n equals a,t,g, or c
  SITE (395): n equals a,t,g, or c
tcatgaagaatagagacgacaaatgtatccatctttatataaagttaggagctagacggtgatccctgaaaacagtgatttttttttaaagtctgattttcactctagaattttatcttgaaaaataaaaatagtgtagatgaagtatgggtggaaaacattctgctgtttcttttttcatggtgagctttttttaaaatgatagattaataacacctactatggtgtaagtgctatgtaccatgctctgtactaaggaggcattttatattctgtgtatatcatgtagtttacaaccctgcaaggtaggtggtatttttccwacccactttacatataagggactcmaagrttgagrttaggtaattccawatttgtggctattgaccacctnncaatgaagtggccaa

SEQ ID NO: 205 - DNA, 352 bp, Homo sapiens
  SITE (295): n equals a,t,g, or c
  SITE (322): n equals a,t,g, or c
  SITE (351): n equals a,t,g, or c
tgcaggggctgagagaccaccccctagaggcttcctcatttgcatctttaacactgccatggttgggggctgttttcttcttcagcctgccctgcctgggctctgttgactactcagcctgttgttctgaagttctcctggccctttcagaggccatgggggctcaaaagccactcagaacacaagtccctcttcarctgctgggagtctgagcatgggaaaatccagcctgattttttccagttcccatgcaggtggtggcttcttcgactctcgcggtcttcttggtggaaanctttgtaagtcttaagtgcgctataantgagcactcttaaatgaccagacacagtng

SEQ ID NO: 206 - DNA, 128 bp, Homo sapiens
gctcagaaatagtaactatatatgtgctgattttaatgtatkatcgatttgtcaaatatttgaaaattaattttcttgcattgtaaaaactagtcattattatacgtttgattttgcaaaaaatatat

SEQ ID NO: 207 - DNA, 353 bp, Homo sapiens
  SITE (316): n equals a,t,g, or c
ggcacgagtatgtaccaagtccaatgagaggacagagaagggagaaagttgttatacctagggaatttggggttagcatcctacaggaggtgacaccaattagagtttgaaggagaagtataggagtgctagcaagatgtgggttgataaggaacacatcagaaagcacttcacaccattgacgagtctgaaagagcagttcacaggcggcaaatggtgctaagtttaggatcatattggggagctggtttagtatattcatctctctccttgaattggtcccatttkaaaaacaaaaacaattcaatccctctgnttccatgtgattccatccagttcactccttttggttt

SEQ ID NO: 208 - DNA, 355 bp, Homo sapiens
  SITE (265): n equals a,t,g, or c
  SITE (302): n equals a,t,g, or c
  SITE (328): n equals a,t,g, or c
ggcacgagcagaggcccacctgagagcttggaaacacacctatgccccagaccaccgcaatcgcaatctccaktcagccctggccaccacagtgaactgcctaagtgccccagatgactgagtcacaagccagggctggggaagcactgcatgaaaggcggccttctctagacaaggctggacacacccctgcaaggcctgtctcctaaggagctgggatgaaactctggacgatgtgctgggaacaaagaaaacccacatggtnaaaggctcgcttttccttggggaatctgcaatgcttnacagaacggggaaaggctgaaacccncccacagtggccgcacttggggggggg

SEQ ID NO: 209 - DNA, 403 bp, Homo sapiens
  SITE (300): n equals a,t,g, or c
  SITE (378): n equals a,t,g, or c
  SITE (388): n equals a,t,g, or c
  SITE (397): n equals a,t,g, or c
gaggagttactacagataggaaaaagaaaaggggaataaaggaattagccctagaatactacaatattaaaatataaaggagaagagaagaaaacctgacaggaggctatgatggagtgatcaatgaagtaggaggaaaactattagtgtggtgtcctgaatatgaaatgaaaagaggtttattaaagaggagttccttgatgtatccaaactgcaaaatctggaggcataatccttcaaaactatcctcactcaggaaacgaactgttaagtgcggggggttccccaaatccctttaantatgacagttctctagtagtactcacagtactctctgaaagctgttatattcattgtcatgttttgctacagggacantatacattanaaccagccnaaggaa

SEQ ID NO: 210 - DNA, 299 bp, Homo sapiens
  SITE (298): n equals a,t,g, or c
ggggctctggaggagacagcctcctggggggcaggggttccctgcctctgctgctcctgctcatcatggccccctgcccggggacatgcccacgatggccaggccctgtccacagacctgggtgtctacacatgtgaggccagcaaccggcttggcacggcagtcagcaraggcgctcggctgctgtggytgcctccgggaggatttcagatcagcctcggacatggtggctgtggtgggtaacagtttactytkgaawgtgggcccgccttgggscaaccaaaagccaaaagttaang

SEQ ID NO: 211 - DNA, 413 bp, Homo sapiens
  SITE (329): n equals a,t,g, or c
  SITE (343): n equals a,t,g, or c
  SITE (351): n equals a,t,g, or c
  SITE (393): n equals a,t,g, or c
gcaccagtctccttattgttatgtccttttaaaaatgtcagtccagtgtgagtgatttaacagatggacaaatatctgggttggattgtgccagctactggstggagaagagccaggtctcctcccacctccctgggagttcgaaagtaaccccgggtctaaccaggctctgagttggaatctaactttgtactttaatatctagtctttcgacaagtgggcatctttgagtcatcctgcctttgcctggaaacttgaaactctgtaaaactgactttgtgtgatgctgcccagcccacgttggggaagaagggtgtggtggctgcctngagctgtgggagangaagcatncatgggggaaatggagagtgcgtctgaactgggcctctaggnccatgcttggacaccccatt

SEQ ID NO: 212 - DNA, 268 bp, Homo sapiens
  SITE (261): n equals a,t,g, or c
  SITE (262): n equals a,t,g, or c
gggtttttaatatattaggatataattattcttattaaatgaaccatgtttacttgagaagcctgtgtattttgctgttttggggtggaatgttctctacatgtcagttaagccaactaattttgtttttgctttctgctcccacatcacatgtgtttatttttttttttacaactttcattttaggtttgggggtacatgcacagttttgttcatgtataaattatgtgtcactagggtttggtgtacaaatgattttgnnacgcgg

SEQ ID NO: 213 - DNA, 450 bp, Homo sapiens
  SITE (415): n equals a,t,g, or c
  SITE (434): n equals a,t,g, or c
  SITE (445): n equals a,t,g, or c
  SITE (449): n equals a,t,g, or c
gcggcggcgctggggcccccagaagtgatcgctcagctggagaacgcggctaaagttctgatggcaccaccttccatggtcaataatgaacaacgccagcatgcagagcacatattcttatcatttaggaaatcaaaatcaccatttgcagtttgcaagcatattttggaaactagtaaagtggactatgtcctctttcaagctgccacagccataatggaagcagttgtccgagagtggattctcttggaaaaaggtagcatcgagtctctgcgaacattccttttaacctatgtcttacaaaggcccaagtaagtacatggagggggactgctgaaatacttttgctgagcttatgtgtatctttttagagctttttttggttgcattttaaaaacttttgggtgggtatagnggctcacacctataatctncactttgggangctna

SEQ ID NO: 214 - DNA, 441 bp, Homo sapiens
  SITE (345): n equals a,t,g, or c
  SITE (409): n equals a,t,g, or c
  SITE (435): n equals a,t,g, or c
gctgaaactctgtaccctttaaacaatagcccttcattactctctcctcccagtacctgggaaccatcattctacttttggtttctatgaatatgacatgctcgatacctcatataagtggaatcatgcagtattagttttttgtatccagcttctttcacttagtcttatgtcaaggttcatccatgttgtagcatgcatcagaatgtccctttttaaggctaaataatattccactgtatgtctgtaccacattttgtttatccattcctctgtcaatgaatgcttccaccttttggctatcatgaatgatgttgctatacacatgaatttgcaaatatctgntgaagtccctgctttcaattcttatgggtttaaacccagaagtggacttgctgacttatacagnaattctatggtccatttttaattatntattta

SEQ ID NO: 215 - DNA, 506 bp, Homo sapiens
  SITE (370): n equals a,t,g, or c
  SITE (378): n equals a,t,g, or c
  SITE (450): n equals a,t,g, or c
  SITE (476): n equals a,t,g, or c
  SITE (486): n equals a,t,g, or c
gaataggtaggcctctcatccaaggktgatgattacsttttatttgtataaaaagacaggttcatttgcctctagwctacatgtacaacattactgatgggaaaataggatgctttgttaacctcttttgttaaaatagcaaaacattaatgtattttaacaggaaatggttctagaatggtattttaaagcagtttactgccaatcacagaaatgactctagaatggtattttaaaacagtttactgccaatcactgaaatgactctagaatggtattttaaaacagtttactgctaatcacagagaagtttttacagttctaaatgcatttattttaaatatatctaaaattaccctcaaaattatcntattcatnatttgctttttcctgtgtcctgtaaatagtaggactttaaaaagtttagaaacaaaggcttttattaaaggnttataaaattaagaccctttatttcnagttagattnaatcttttttgccattcttt

SEQ ID NO: 216 - DNA, 436 bp, Homo sapiens
gggctcatggaattaaaatgatttgctcaagagcacctctagtaaaatgacaggaccgggattaggtgtctttccagtaatcaactttgtcaaactttgttgacgtccttcacaggtataataagagtttttgaccaggaaagcattttgtccccaaaatgctgaattaggaactgagattaatagctataacaatctatagcattcatatgaggtgatttcatctgtatttgattgcctgtcaccaccaggcttttttatgcagaacttctcagtttcttaatgtaggaaatgatataaacccatgttaggtacttgagccaggaagaaacagggagaaagtaattttgggaaggctactttagtgttagkacatgaaggggattgagtaaaagtacttcatccaactataagyctattttggtaatctgggaag

SEQ ID NO: 217 - DNA, 309 bp, Homo sapiens
  SITE (250): n equals a,t,g, or c
gccagggtgatctctaactcctgacctcaagtgatctcagccttccaaagtgcagagattacaggtgtgagcactgcacctggcccaaacaagtgtatcttaaaaggcaaggcagaaggcatgaaggcacaccagctctggggagctgcccacgtggacaggcgggaggcacgtgtggttctgccttttcacatgtgtgtaggtcgtgtcattaagaccggaggcggatgggggaattatgactgagggngctgtctctgtgcccgtcttatttttcacaatttctataatgcacaagttacttttata

SEQ ID NO: 218 - DNA, 342 bp, Homo sapiens
  SITE (302): n equals a,t,g, or c
  SITE (316): n equals a,t,g, or c
  SITE (326): n equals a,t,g, or c
gcatgctctcaggaagcctcacccgggcccctggctcctgctgcacagccaggagggggttggattccggttccggtgacactgtcgggggctgctcctcacccccaggtgtgcacctggcacagccactgtcccaggatccctggaggctgattgcacacatatcccagcctgggaaggaccccctctaaaatgaaggccgcccctctggtggtcttagaatgtgtgcaccccccgcacggttcctgctggcttgcagctgctggcccacctgctggggccggttccacactcaagatganaaatcaaattccanaagggctgangccggcaggtccctgg

SEQ ID NO: 219 - DNA, 459 bp, Homo sapiens
  SITE (421): n equals a,t,g, or c
  SITE (433): n equals a,t,g, or c
  SITE (459): n equals a,t,g, or c
gcatttactcactaccctcttgagcctcacataggcttaccacatcttaggtggtgactcctggagcactggcaaagctgggtggcaggcatagtccccatagttagttcctgccccagcgttctagagaacacagtccacaatgatgtgcaagtgctgtctgcaagaccagatagtgggcccagccttctctttgccaagtgttccccatgtccggtaaaccagtctcatgtctgggcctttgaatgtgcaggtggaacaaaccaaggagcacgcactctccaaggagcgagcagcccagaacaaaatcctggaccttgagacccagctgagcagaaccaaaacggaattgagccagctgcggcggagccgtgatgatgtgagtcaggctggtgggccgggctaggagagtgggcagcanacctacttctgnggggcctgtgggccaaagtgttttgn

SEQ ID NO: 220 - DNA, 378 bp, Homo sapiens
  SITE (319): n equals a,t,g, or c
  SITE (373): n equals a,t,g, or c
  SITE (376): n equals a,t,g, or c
gtgctgccgcaagtggtctgttgaagggtcagatgctggttgaacatgtagcaaattctctaggcctctratttttccaaccacgttttrccttgctgtttttggttcttctgctgtgttctggcctgtagcctgctcttctgagaacctactatgcttctatttactgtcttcaaggagtaccttccctgtttcatttgcctggctgatttttactggtcttttatgttttgcttttctggatgtctacttctccttccagttcaagagttaggtgcttgacttctgtgctcccatgtaccctgcacttaacttttgngtcttataatgccctgcacttgacttctgattcccataaagccttgcacttganttntg

SEQ ID NO: 221 - DNA, 481 bp, Homo sapiens
  SITE (467): n equals a,t,g, or c
gaaagtcccaggtagaagggaggagctgtccccagcagcctggggtctctagccccggtccaccatcagcacccttggagtgagtgtcagggagtgtgggatatttgcccaartccagccaccacccctgtccgagtagagcccacacagtattggaaagagaaatatagccactgctttcactcctgggagtaggggtgccctggttgctttcaccagcctgcaagagtatagtcagggtgaggtgctggagaacatcaacaacgatctgggttcaaatcccagctttgccacttattagccatgttgctgtgtcaacttctctgagcttcagtttattccactgttgtgtaaagataatgcctcttagggctgttgtgagcattagcacagtgcctggcatatagtaaatactcaatatatggtagccatattataattgtaattgttactaccaccactgtcgnctctactaaaaaac

SEQ ID NO: 222 - DNA, 474 bp, Homo sapiens
  SITE (445): n equals a,t,g, or c
  SITE (464): n equals a,t,g, or c
  SITE (466): n equals a,t,g, or c
  SITE (473): n equals a,t,g, or c
ggagccagcagcctcagaggcccggggctgagaatgttccgtgtctcttctgtgtgacagagagatctggagcagctctcaccgtgaacaccaaaagaatgtaatcttgtgggggcagaccctgagtcgtgagggaccaagcacacataggcccactgtttgtttgtgatggagtctacaagttaagttctgctaagagagtttgcggggccattgaccaggggccattttcccaggctacgtgaaggctcagaacaagtgaaatgtgattgcctcaccaagtgcacattgacaaataattgattaagcaaaatgtggtctatccatacaatgaaatactatccagtttcaaaaaggaaggaaattttggtatattccagtcacaaaaagacaaatcctatacaattgtactgatatgagacacctagaggagtcatattcatanaaacagaaagtagaatggnanctagcana

SEQ ID NO: 223 - DNA, 337 bp, Homo sapiens
  SITE (250): n equals a,t,g, or c
  SITE (253): n equals a,t,g, or c
  SITE (273): n equals a,t,g, or c
gtgtcttggtctccctggtgcatcatttggggtgcttggctcccatcaagcccacccctgctgccctggcctctagagaagagcctctgaggtgaggtgcttctccacctcaagtccctgcccttcactttctgkgacatgagaaacccttttcctgttggccatgccttctgccaacactctgggagcttgttcagagtctgtgcagagccccccggctctcctaacctggggcctggctggtacccanaangtgggccatgctctgctgangcccagcctacacctgtgcccactgtgtggcgctgttggggggttccccaaacaggggacatga

SEQ ID NO: 224 - DNA, 422 bp, Homo sapiens
  SITE (357): n equals a,t,g, or c
  SITE (360): n equals a,t,g, or c
  SITE (362): n equals a,t,g, or c
  SITE (420): n equals a,t,g, or c
gctggagtatccaggtggccccaatgaaatcacaagggtcttcaatatggccgagagaagcagaagagagggtcagagataggataatgcctgcggggtcagagagaggtyatgtggcggctttgaagatggagggaggtggcctctaaaagctggaaggggccgggaaacagattctcttcctcaggcccagaaagcagtaccgctctgtcgacaccctgcttttagcccaatgagacccaatttggacttctcacgtgtagaacgataaaggtagtaaagtttgggtcattttatgarcctggtcattcatgaacagcagccatggaagatgatgcgggggtagttagtctgganaananctgagaagtggctccccgccatgactggagtgcacacgggcacacattcacaagccanga

SEQ ID NO: 225 - DNA, 322 bp, Homo sapiens
  SITE (296): n equals a,t,g, or c
  SITE (300): n equals a,t,g, or c
  SITE (305): n equals a,t,g, or c
gctgctctagaggccccatagccagggcccggctctgagggccccacgggccagcttctcagggggctgtgttcttcctgggccaaggctgcgtgctcagcagctctcctgctgccaagatgccatcaccacagacagacactcctgggccggagctgcagagtcccaaggaggctgaggagccacagactccagctcagggctcccggcgaacaagcagcaggaaagagcccaatgcccaccgcaaggatggcacaaggctgggcctgggctcctgaggcaggccttctcccggnccanccagnggctttgacccaagtct

SEQ ID NO: 226 - DNA, 510 bp, Homo sapiens
  SITE (364): n equals a,t,g, or c
  SITE (447): n equals a,t,g, or c
  SITE (466): n equals a,t,g, or c
  SITE (477): n equals a,t,g, or c
  SITE (494): n equals a,t,g, or c
gcaaagacttatgccttcagtggtcccttggtcagaattagtactcagcaaagtaagtagaacatgctctgttctgatacataaaccaaatacacagtatgatttaaataggaaatgagattttttgcaagactaagtgctcagtgaatgctttagtgtatgcactaaatcttaaatcacatgggatatgagaaactaaccaggaaaactagccctcattgaagcattaagccaggaaaaaaaaaatgtgtttcttgtttttcctattagcatccatttaacaactgggctattattaccctatgtagagtgatactttccacgcatttgcatgcctgagagttggaaccaacaaaagtaacangactgccattaagtgatttctttttgttttctctttcagcaaatgttcccagcaggccacaggcaatggtgaagtattcattncgggcaaccaatgtttccntgccgtaccantgttgcccttttcagcnaatgcccaatttcaag

SEQ ID NO: 227 - DNA, 479 bp, Homo sapiens
  SITE (438): n equals a,t,g, or c
  SITE (444): n equals a,t,g, or c
  SITE (454): n equals a,t,g, or c
tctggaactcctgggctccagcagccctcctgcctcagcctccaaaagtgctgagatcacaggtgggagcccccacacctgggcagtttctgttgttctaagcctcccagtcggtggtggtttctcacagcagccatggggaacggaagcgtccccaggccacagcctccccgcagtgtgcaractcggcctgctgagcctgcatgttggcgtccccgcctgccggagggaatgatactaaatgcagcctgctgcagccgcacccacactaaacatggaggagggctacgaagagtarcagggccctgcatgaagggtgacacgtaaatttaaaaaacaatttcggccgggcgcggtggctcacgcctgttatcccaacactttgggaagcaaaaggtgggccggattattttgaggtcaaggaatttaaaaaacaancctggncaacatgggngaaaaccttgtgtctacttaaaaaa

SEQ ID NO: 228 - DNA, 422 bp, Homo sapiens
  SITE (388): n equals a,t,g, or c
  SITE (407): n equals a,t,g, or c
gctttctcgtgagagcctagaggccttaaaaaaaaaagtgcttgaaagagaaggggacaaaggaacaccagtattaagaggattttccagtgtttctggcagttggtccagaaggatgcctccattcctgcttctcacctgcctcttcatcacaggcacctccgtgtcacccgtggccctagatccttgttctgcttacatcagcctgaatgagccctgggaggaacactgaccaccagttggatgagtctcaaggtcctcctctatgtgacaaccatgtgaatggggagtggtaccactttcacgggcatggcgggagatgccatgccttaccttcttctttaccagaaaaccactgtgggaacccacggcacctgtctgggttcantgggcagccaccccttagnagggcgacggcattt

SEQ ID NO: 229 - DNA, 534 bp, Homo sapiens
  SITE (494): n equals a,t,g, or c
  SITE (501): n equals a,t,g, or c
  SITE (516): n equals a,t,g, or c
  SITE (521): n equals a,t,g, or c
  SITE (524): n equals a,t,g, or c
gcgggcttgctgtagcagtccctgcggtcgctcttcactacgtgcctcagtactggatggccctgtgtctgtcccaatgtgccagcagggaccgtttccacccgtgtttctcacatgtgtgttactgtgacagagtgacatcagagcctataccgggggggcaggatgcgctcgtgtccaggacccaggctttgcgtccaggtgttgttgcagtcatcctaggcccgagcctctttgattctcttcggctcgggtctgttggctcttttgtttaatagaggagcgatcaggagcctggagggagcagggagctgatgctggtcgcagattgtggctttgtgacatattagccacggttctgaatttatgtgtctgtgaaaggaggatgatcatacctatctcacgggtgtttgctcagatgcccatcgcaatgcctggctggtgggagtgcaccccctggtggccactgctattctcattactaatactaatgntcttcancatgacttatttganaagcnaanttttgtgaaa

SEQ ID NO: 230 - DNA, 379 bp, Homo sapiens
  SITE (359): n equals a,t,g, or c
  SITE (369): n equals a,t,g, or c
gggctttttttcttaagtggaaaatgcttggataaccgaggggagagggggctgcggagttaaagaaagggtagacgggctcccagttgccgagttaatcaggacgtttctcggggtaacgaatttttaaattacaaaatgcctgccgatgtaatcccagaccgagctatttatggaaggggtattggacagcagtgttagcagctggattgctggaatggggtacctttatcttgacctagtcaggagggaaattcgacaaatttcttggattacttggtttggagttagaaatgcatctttgtactttacctcaagaaatggcttcaaataggyyycctgtttggtttttttttttntgccttttcnaaattgcccc

SEQ ID NO: 231 - DNA, 469 bp, Homo sapiens
  SITE (202): n equals a,t,g, or c
  SITE (390): n equals a,t,g, or c
  SITE (442): n equals a,t,g, or c
  SITE (453): n equals a,t,g, or c
gggtttgggcacatggtactcgtaagatatctaggaggtgacagaggaagtctgcaacatatttaaagccgggaagcttgagcagtattgcattctttgcatttgtttgagacaaattgaagtgacctggtttgttgccccacattatcaccaagaagaaaaacttggggctgggggaggttaaaagacagggatccttgtnccttctccacccctgaattatctagtgcaagccatttttctcaatctttattttaccatctatgtaatgggatcatagctgctttacctgcctttcttgttatcacgagcaaataatagaagcataaagaattcaaaaaacattgaggtttttgagaaggaatattgttacatattccttctcaaagntatagagaaggaatattgatgattccggcacagcttcacaaaatgttatctntatccccttgntaaactcacataagaa

SEQ ID NO: 232 - DNA, 217 bp, Homo sapiens
  SITE (206): n equals a,t,g, or c
  SITE (216): n equals a,t,g, or c
gggcgtgcgggagtcttgggagggggcggcgcaagggggcgtctgacccgggcccggcggccgtggcgctgcttggctgtgggagccttttgtctccgcgtgtgagaaaatggggcgaaagctgagcgcggggcgtgcgtgcgtgtggggtggtgcgtgtggtgtgtgtgtgagatcgggaggcgtttggcttggagccatttttntttcttaatnt

SEQ ID NO: 233 - DNA, 422 bp, Homo sapiens
  SITE (355): n equals a,t,g, or c
  SITE (381): n equals a,t,g, or c
  SITE (406): n equals a,t,g, or c
  SITE (420): n equals a,t,g, or c
gctggaaggttccaggtgcagggtagaggccaaggtcagtgcttcagcatggggagtcctgatggctaagccctgcacagtgagcactttgaggcgagtctgtggtcacgtgagtgaggcccaggcatctgtggaggggcgatgggattatgaccagggatttctttttctttttctttttctttttgagactgagtctcgcactatcgcccaggctggagtgcagtggtgcgatctcggctcacggcaacctctgcctcccggggttcaggtgattctcctgcctcagcctcctgagtggctgggactgcgggcgcccgccaccacgcccggctaatttttgtatttttagtanagacagggtttcaccatgttggccangctggtctcgaactcgtgacctcangtgatccaccccgnct

SEQ ID NO: 234 - DNA, 419 bp, Homo sapiens
  SITE (323): n equals a,t,g, or c
  SITE (356): n equals a,t,g, or c
  SITE (380): n equals a,t,g, or c
  SITE (419): n equals a,t,g, or c
gcactcatgccaaggttgtcggttcgctattacttcttgaattacagcttccatatttgcctaccctgaagtcatactgctactcttaggttcactactgaacaggacaatttctttgagtagaaaagaaccattgccttttataattagtcatttacatttcctttccttggggaagaattattgaattccaagaactgtttggtggcatggaggtaataggaatattggggaaagtgactaaattatctcagaacttgtcagagaaaaggccagaaacgcagtggcgtcatgactcctttagagaaaggtcaggaaacggncaggcccatgactcggggtggagtggactctgnctgtgagcaggtattgcccttcangtggggctggcgtgagttgaccattgatgttaataccan

SEQ ID NO: 235 - DNA, 451 bp, Homo sapiens
  SITE (60): n equals a,t,g, or c
  SITE (61): n equals a,t,g, or c
  SITE (415): n equals a,t,g, or c
  SITE (449): n equals a,t,g, or c
agggaacaaaagctggagctccaccgcggtggcggccgctctagaactagtggatccccnnggctgcaggaattcggcacgagggaaaggccttgggttttggaatcagagagccctagcctaatattttgtttctcagttacaatactgggcaatttactaccaaccccaggcccttggttttctgacacaaaatggaagtactaaccccttcctcttattcagtgatcacaattcaagtcctagaacattgcctgagatataagggtcctcccaaatgatttcttcctctcttgtagttgtgggtttgttacttgggctctttctaatccaaatgatttgcctacactgttattatggacctattgtaaaatgtatttgagaagcagacaatgaacaacaaaggcctgggatngccaaattgtcccagtccatagcttaaagcttanga

SEQ ID NO: 236 - DNA, 367 bp, Homo sapiens
gggaatccttgtccgacaagattcagaagaagaagaaaaaaattctgagttctgtggtggcggaaacccagcgtccctatgaagaggctctcctacagaagatgtgggaaagccaggacttcctgaaatgcatgcaaaggttcagagaagtgcgtgggcaaggaaggtggtggtccctgtagggaagcagtggatgrgcagtccccacggmctgtgggaatgagtcaggcttctcctgatctggcgctcaggaggtctctgaytctggtgttggcctccctccttgccggtgccattactgtcacttgtctttcatctgggaaggcgattggcactgacctaggccttgcgtcattagccagcaatg

SEQ ID NO: 237 - DNA, 353 bp, Homo sapiens
  SITE (83): n equals a,t,g, or c
  SITE (329): n equals a,t,g, or c
  SITE (337): n equals a,t,g, or c
ccaactaaagggaacaaaagctggagctccacacgcggtggcggccgctctagaactagtggatcccccgggctgcaggaatncggcacgagctggtgtaggggacacagtgaggctggcccgagcagggggtggggtgcacccctggggatcatctgactgcctgagcctccctggaatggaggcagcagctaggatcagctgagagggaattctggcggggatgagwcttgaggtgagcctgggcttgaggagttgtgggtgttcagccttactcttgctgccagctggggaatggggaatggctataggaagggctggagacagcntggcgctntcattggttgcattca

SEQ ID NO: 238 - DNA, 309 bp, Homo sapiens
  SITE (288): n equals a,t,g, or c
  SITE (308): n equals a,t,g, or c
gagacaacctgtctaagcaggaagactgtactctcactgcgttgctaccagcatgcacccttccttctgctttcagcatagcaacagccaggacattggcaaagaaccattggtggcccaactatgaattgttcccagacttcctgcagggaacacgattctcttgcacaactcaatattagctacagaacgagccactgagctcagaatatctttgctaactagtccagtaggctagctttacaatttarctctggactactggcttttcagataattgactttaangggttttccccctttatgant

SEQ ID NO: 239 - DNA, 367 bp, Homo sapiens
  SITE (213): n equals a,t,g, or c
  SITE (345): n equals a,t,g, or c
  SITE (348): n equals a,t,g, or c
gtacaactccatgccatgaaacaacacaaatgctcattcatttagcattggctatgcatccaacatcagcaatgcagtggtgaacccaatgaatgtggtccttgcctgtgtatggcttaccctctaatggggaagatggatacagaacaaacactctcacacatcaagtgataacacaaggcaaagcaaaagaataatgaggccaggtgctgnggctcatgcctgtaatcccagcactttgagaggcagaggtgggtggatcacctgatttcaagagttcgagaccatcctgcccaatatggcaaaaccccgctttactaaaaatacaaaaaattagccaggcgntgnggcgcacacctgtatccca

SEQ ID NO: 240 - DNA, 291 bp, Homo sapiens
gggagcctccccaccagcccctgaaatggaaaggcctscaggtasgtgtgattggcctccagccgggggagcagggaacttctctaggttccacttccagtctctctgtccccagctcctgagtcagtgggcacagaggagatgcctgaggatggagagcccgatgcagcagagctccgccggcgccgcctgcagaagctggagtctcctgttgcccactgacactgccccagcccagccccagcctctgctcttttgagcagccctcgctggaacatgtctgccaccaaa

SEQ ID NO: 241 - DNA, 543 bp, Homo sapiens
  SITE (494): n equals a,t,g, or c
  SITE (511): n equals a,t,g, or c
  SITE (523): n equals a,t,g, or c
  SITE (540): n equals a,t,g, or c
acagggactccccacccacaggactccacttcacccacaggactccactcacccacaggactccacttacccacaggactccactcacccgcaggactccactcacccacrggactccccacccacaggactccactcacccacaggactccactcacccacaggactccccacccgcaggactccactcacccacaggactccccacccacaggactccactcacggcgtccacgtggctggcttcctcagagacaagaactgggtccctgtgatgaagtcaccctgaggggcagggtgtcctgtgggggcactggccctgcctgggaggacaggctccagccgcacctctgtgggaggccctcggagagatgacctcctcggagagatgacccccagtgtggctgtgcagctagcggaatgagcagcggggcctgcgtggatgtgcacgctgcgtgcacgtgcacgtgtacgtgtgtgtgcatgtgtgtacntgtgtgcatgtgtatgngtgtgtgcgtgnatgtgtgttcgcatggntgt

SEQ ID NO: 242 - DNA, 426 bp, Homo sapiens
gctgaaatgggaagtctgcagtgagccatgattatgccactgtactacagtctgggtgacagagtgagacctcatctcaaaaaataaaaaaaagtaaaaaataattttaaaagagtgatttaaaaagtaagcatactgatacaggttcccagtcccttacccacagttctaaaatcccaaatctctgaaagccaaaacctttttcattattttgtgggaaattaattatagcatcaaaacctgaatttatgtggtactgtttagagcctttatccttcattatgtaaacattcatgaatctcacagcagatctattaatacttcattatagaatgctgcctgtctaaaacctgtaatattctgaattctgtgaaacttggggcccctggaattttcagaataagggatgatgagcgtgtaagaaaa

SEQ ID NO: 243 - DNA, 409 bp, Homo sapiens
  SITE (381): n equals a,t,g, or c
  SITE (387): n equals a,t,g, or c
gttgatctgattattgagtggctgtggagctggtgccgcgttccttgttgagtcatttcctgtcttgattttaggaccttcctccggggcagcgactgctgctaccctgccgagaagtttgctgcccgtggcattgctacttccatgaaggaaatctatcttctcttttcatgtctttgttctgaaatttcgctgtggtatttctgagtataagttggtttggctgtgttgcctggcgctggccgtgkcttctcacctgagatagctaagtttcagttcccagcccttcccggscatctgtcctcccgtggcacctctgcaccctgacataattcttgktctggatctcctaaaagggagtagcttgcacccattcagtgncttctncatctctcaactgcgcttccca

SEQ ID NO: 244 - DNA, 334 bp, Homo sapiens
  SITE (330): n equals a,t,g, or c
  SITE (334): n equals a,t,g, or c
gggaaatagccaatagtgaatatttttattatgtgttagataaagcttctttcttcttatgcttatttaggtgaactagaaatatggtttcagtgaaatttaagttctgataagtacagatacatagcatattttctgaaaaatttgaaaaacacacacaaatataaaaaattaccataaccattctatcaagcaaccagtgttaatgttttaatgtttctttccaatgtctttttaaaaaaatctcattgagactattctatgtatttaatcttactatgtattcttaacaattattttaaatttttgatcactgcttaataattaggntggn

SEQ ID NO: 245 - DNA, 579 bp, Homo sapiens
  SITE (547): n equals a,t,g, or c
  SITE (554): n equals a,t,g, or c
  SITE (559): n equals a,t,g, or c
ggtcctatccacccccgcacatacaacctacattgttatggcaaggatacgatgtcacatgaattgactaagtttacaagagaggaaattgaaggcatgtagcaatcccatggcagttgtgaaatccatctgcctatatgtcaccaattcccccaattccaggggtagggaacatttgattagtctactttggttctctgaagttggctcccttttctttttctcagttcttgacttttttctttgagctgtctttccttttccatgagaaatgtcctctttttgtagctttctcagcctgcttctaggctctgtcccaactggcacagttatccacactggcacaacttctttaaaaagctttgtggactttcaaattataaaccactcactycaccagagagaagccacacccacaaatttcttcaagaagtcctctatgtactttgaatgtcaatcagggaatgawaccctttagagyatatatgkcttttgtctacctgagagcgkcagctaacactggsttaaaatctttctgaaagtacanggtgggncgtcnacttatgatgggtcaactta

SEQ ID NO: 246 - DNA, 333 bp, Homo sapiens
  SITE (301): n equals a,t,g, or c
  SITE (327): n equals a,t,g, or c
aaataagttgtgataaaatatgtgcagtatgagaaatccttgatgtaagtttttaagcagtacaaatcatactatgtctgttaatagcagtttataaagaaagtataaaaatgtgatagataagctgcatgtacgccagctttgtgataatgggttttcctgasggtgggtgggtgatwctgaggtgggcaatattaagggagcttcacctagctcagctaaaaaattttaaatcaaatattctgaagcaaatgtataatttttgaatttgaaagtctgaatagctaggttcataactatnttaatattctctacacttgtgtatgnctcaaa

SEQ ID NO: 247 - DNA, 451 bp, Homo sapiens
  SITE (290): n equals a,t,g, or c
gttttagtaattctatgattcagacctctttttaattcagctttcctgctaattaatgtaaattagtaaggtttctgctgggcgcagtggctcatgcctgtaatcccaacactttgggaggccaaggcgggtggcaggcgcctgtagtcccagctactcaggaggctgtggcaggagaatggcgtgaacctgggaaccagagcttgcagtgagccgagatcacacctctgcactccagcctgagcgacatagtgagaccccgtctcaaaaaaaaaaaaaattaataaggnttcataattattatatttaccaaccaggttctttctacataattattggttaccttctaataaattacttacaaaggcccctacaaatccmaattattacaaaacgttcatttcctatttccttyccagggatgcataattattttggaaaaatcagtggc

SEQ ID NO: 248 - DNA, 395 bp, Homo sapiens
  SITE (381): n equals a,t,g, or c
  SITE (390): n equals a,t,g, or c
ggaaaaatcatgttttccccctcaaaaaatcatgcgttrrtttcctccaaccaaactaagtcccaggactactccgaaaactactcaatgaccatctgggcatttgtacatgggtttccatttcttggatgcctgctctcctgttacctcccagaagcctgtgaaaaaggcaaggcatattacttccacttaacggaagaggatgctggggcsaggtggcaggaaatgactggtccaagaccttacagtcaggaaatgtggaaacgggtgctgctctggggttctgaactcttggccctgcttaaccctgcttctmagatctctgatgctggctcttttcccaagacaatggcttggtaaccgcacaaaggcctaagggcntcattgccnttgct

SEQ ID NO: 249 - DNA, 318 bp, Homo sapiens
  SITE (293): n equals a,t,g, or c
  SITE (295): n equals a,t,g, or c
  SITE (299): n equals a,t,g, or c
gccatgatgtttgggacaacttgcctctgcaaccaattaggcagctgcagctcatcacgagagagttacagccacctgcccctgcaagagaggggactggagtggagaaaggaggctgcgccatgtcatagagcarccgttggtcacagacaccttgtgttagggacctggcactgccattcacaggctgcgtgaccttgagcaagtcgcttaacccctcccaacctgtgtcttcatctgtaaactggaggctgtcctccctgagctggctacctcaccagaatgtggtcatntngcanccatggttgttaaaattgg

SEQ ID NO: 250 - DNA, 404 bp, Homo sapiens
  SITE (379): n equals a,t,g, or c
gcttccacttaaagtcagcagctgcattattccctaccaagatagtcatccagtccttttaagttttaaagccaggctttaacttcacctctctagcaatgaaagtcctagatgacatctgcttccatttatataaggctgttttatctacactgaaaatctgttgtttagtatagctgccttcatcaaggattttagctagattttctgggtaacttgctgcagcttctacagcagcacttgctgyttcacattgctcttatgttatagagacatcttctttccttagacctcatgagccaacctcagctaagctttcaactattcttctgcagtttcctcaccttactcagcattatagacttgaagaaaagtacancctttggtctggatttggctttggg

SEQ ID NO: 251 - DNA, 242 bp, Homo sapiens
  SITE (221): n equals a,t,g, or c
  SITE (225): n equals a,t,g, or c
gccccgctggccgcgggctcggtacccggtgggtcggtggagcgtctgttgggtccgggccgccggcttcgccctcgccatggcgccctggctgcagctcctgtcgctgctggggctgctcccgggcgcagtggccgcccccgcccagccccgagccgccagctttcaggcctgggggccgccgtccccggagctgctggcgcctaccagttccgctgganatgntcaaccgcagcggctgc

SEQ ID NO: 252 - DNA, 224 bp, Homo sapiens
  SITE (201): n equals a,t,g, or c
gagtgggattgtgaaggtggactgagaatttatttwaaaggtaagctgacagaatatgttggcagatgaratacggatttgaragaaaggagtcaagagttttggcctgagcagatggaaggattggaattgtratgtcctgagacagggaaatggcagctgaggcaggttgacagcgaggacaagaactctgaattgtantgttaggcaggctttggggtgcc

SEQ ID NO: 253 - DNA, 375 bp, Homo sapiens
  SITE (347): n equals a,t,g, or c
ggtttttgcatctagaaaaatgtaagcttaattccagagaccattgtaggtgtaggaaaaatacattactgcccttgagtaagaggctgtaggctatccacataaagtggtaataccaccttattcttgtatcacctcctgtctctcctaggttatcttagagcattttgcaaattacagtcagccctctgtatccatgggtttcacatccgtggtttacaccaattgcagattgaaactatttggggaaagaaaaattgtgtcgtactgaacatgtataggctttttttttttcttgkctcagtattccctaaacaatacattacatagcatttacattgtmttangactaaaataatctagagattatttaaa

SEQ ID NO: 254 - DNA, 239 bp, Homo sapiens
  SITE (126): n equals a,t,g, or c
gaacaagagagcaatctattaataaattgcttattataaattataagtgaatgctggctaaaaaaatcatgtagactaagttttcagtttgaatcttttattgctgtgataaaaatagatatgttncaaagcatgtaagtgctttcacaaatagaatcagatttcaaattcaggagtatgtttctttttttcatcattataaattaagctccatcctctcatttccctcagtcttcttc

SEQ ID NO: 255 - DNA, 232 bp, Homo sapiens
gggtgcctcaggccgtggcagttccgtcactctccaacgcctcccccacagacttctttttgctaaatggtatcaagattttctcgttgttgtcagcaagagagttggttttctaacatctcatcgaccatggctggaggtcaaatcgatgttttaaacttgctggaaataaacggttcctttcttgcatggctcgatgagcaataaggttcctctgtgtcattttgtttac

SEQ ID NO: 256 - DNA, 259 bp, Homo sapiens
  SITE (221): n equals a,t,g, or c
  SITE (254): n equals a,t,g, or c
gagactccccaggagaaatctaggaggcagcagagatatcaccacctcgctcactctcagcatctaattgatgcccagacctctcgtttctacctctcagatctctggaatctgccttctcttcaccattgccactggccctgcccctcctcaagtgccagctttcatcagttctgacttgtggcaggacctctcactggtctgtctgcctccctgctcancccccgtcagtctccacactgctgccgccagantgatg

SEQ ID NO: 257 - DNA, 1140 bp, Homo sapiens
  SITE (1104): n equals a,t,g, or c
gcgcctgaaggagagagctttgtttaagactgagaaagtgagggtccgagagtctaatgaatgctctgggcacccaggccgcacctgaggagcaccgacgactgcacggtctgcggcgcgggaagcagatctgcggctgaacctctaccccaattacttagcggcgactgagcctatcgagcagttttccatggacacagcctagcagaaagacgcagccttcgtgcttcgctgactgctgaccactgacccaccgccttgatgacagcaccctcgtgtgccttcccagttcagttccggcagccctcagtcagcggcctctcgcagataaccaaaagcctgtatatcagcaatggtgtggccgccaacaacaagctcatgctgtctagcaaccagatcaccatggtcatcaatgtctcagtggaggtagtgaacaccttgtatgaggatatccagtacatgcaggtacctgtggctgactcccctaactcacgtctctgtgacttctttgaccctattgctgaccatatccacagcgtggagatgaagcagggccgtactttgctgcactgtgctgctggtgtgagccgctcagctgccctgtgcctcgcctacctcatgaagtaccacgccatgtccctgctggacgcccacacgtggaccaagtcatgccggcccatcatccgacccaacagcggcttttgggagcagctcatccactatgagttccaattgtttggcaagaacactgtgcacatggtcagttccccagtgggaatgatccctgacatctatgagaaggaagtccgtttgatgattccactgtgagccatcccacgagcccctgcattggagtcagaggtacagatctattgttgatcttacaccaagatccaaacttgaacattctacttttgttgatacagaaaaaaacagatgatgccttttatgagcacaaaaaagagttgctgtagcttttaactttataatccattttttttcagattaaactaattgtgagatggtgaarawaaattttctgccctgtgagtgaacatgggcagggggtaggttgaggcagatggtgcccagaagaaagagggnagcacccttgcacatggcaggccgggattcctgcag

SEQ ID NO: 258 - DNA, 453 bp, Homo sapiens
  SITE (422): n equals a,t,g, or c
  SITE (441): n equals a,t,g, or c
  SITE (443): n equals a,t,g, or c
gggaagctgaggcttaagggagaattctggccagggtaaccctgaatggccggctgtttagcatctgtggtcccctcctgccccctagtggagatctgctccttctctgagctgaagtcctcctcccagcacttgtgcctgctggccccagtcccgtctcctggtgcctcacagagaccctggctcccaccctaggggagcccagtgggggctgtgtgacccccaagtcagctccccccagcacctccccttcctccacaggctctttgcagatagagattgggccgctgcgagtgtcccacgcaccctcgcctacctcattcacggggctctgcctgtcccatatcagagaacatggtctgaccctgagctcttttcaagcctctgagccattgggatagcctctcctccttgcactttgnccctggcccgtttcttgtntncaaaataaga

SEQ ID NO: 259 - DNA, 341 bp, Homo sapiens
  SITE (281): n equals a,t,g, or c
  SITE (288): n equals a,t,g, or c
  SITE (325): n equals a,t,g, or c
gctggccaacatggcgaaaccccgtctctacaaaaatacaaaagattagccgagtgtggtgtctcgtgcctgtgtgtgtgtgtgtatgtgcatgtgtatatatgtgtacacacacacacacacacgttgttctgccttgcacagcccagtgacaaccttggccccacccttgtccctctgatccattcaagtcaggaatcttggttgtgttttggaggctgtggggtcccaggttcatccatgatacaggttggtcgccaactggtagtgatgtgaatggngaactanccatcctttagggaccagctcaaatgctgttaccttncagaaatcttccctgg

SEQ ID NO: 260 - DNA, 351 bp, Homo sapiens
  SITE (202): n equals a,t,g, or c
  SITE (347): n equals a,t,g, or c
  SITE (349): n equals a,t,g, or c
gctcactccatgtgttgttaatcggcgttatctccatgtgttggagatatgttatttccatgtgtttccacatggaaagtcatctccatgtgttgttaattggcgttatgccaaaaaggtgttcagtggtcaatatgtttcagaaacataggtttctccttttttatttttctaaagaagcagggccttgcttgttgctcangctggagtgcatggcgctgtcatagctcgctgcagccttgaattcctgggctcaagtgatcctcctgcctcaggctcccaagtagctgggactacaggcgtgtgcccccatgcccagctaattttttctttttttttttttgtananac

SEQ ID NO: 261 - DNA, 311 bp, Homo sapiens
aattcggcacgaggtgggcagggccttactttcttgtgagtgaactctttgcaggttttaaggaatatgactactctgctttaagggggtgtggggagcactttgttaaagcaatgtgcattctgaatccatttcataggcgtccttactccgtggcagctacacctttaatcgtggattataataacttttaaatgagtgcaaaactttcaggatcttttccttaagttgggaaatgagattttttttttctgctcttttcaagtatcacttaaattaagctctggtacggagtcaggagtctttttctt

SEQ ID NO: 262 - DNA, 359 bp, Homo sapiens
  SITE (299): n equals a,t,g, or c
  SITE (350): n equals a,t,g, or c
  SITE (355): n equals a,t,g, or c
aattcggcagagcctgcagcctgatgctgtctgagtatctgacctaaaggcttccaagacaaagatggtcccacagggctctcagcagcctggwagaatatcgttgttcagaccagattgaagattgttttctgcccagagggagtttgttgggccctcatctctaccagatccaaggactgtttctcacagagactcagtaggatgtggaagaagaaggccgtggctccgttggctcagggaacatctgccttttcccctcctgccacctcccctggcartgggagggtgactgtctntttgctttggcaacttcatcagagatttttttttttttggacaacaacctncatcntggg

SEQ ID NO: 263 - DNA, 314 bp, Homo sapiens
  SITE (242): n equals a,t,g, or c
  SITE (314): n equals a,t,g, or c
aattcggcagagcacactccagccctcctctgggtacaggtggcataggtggcatccacccacccccagcattctaatagcccaggcatctcctcctccaggccctggtgcccttccacaacctgggccttctcatcggcctcttctccccacggtgtgcggacctgtggcctgccacccgccagaggccgtgggactgtgtctactccctgctgtacctccagctcggctatgagggcttnttccggggactaacgcggatgacgtggcggagggcttccttcagcctcaaggacgggctcgtggtaacctgn

SEQ ID NO: 264 - DNA, 389 bp, Homo sapiens
  SITE (61): n equals a,t,g, or c
  SITE (62): n equals a,t,g, or c
  SITE (334): n equals a,t,g, or c
aattcggcacgagcagccatgccgttgacctctccatggggatggactgaagagcccaccnnagctcaggggagagcctctcatccggaaccacgagtgacagggactttccagtcctagggaatgttcttttaaatttagatcctgcccacccccaacaagtgtgctgtcaggccctattctaaatgctgttgcgtatattaagttatttaatcttcacagcaacctattcaataaggactgttatttctagtatagagaggagggctcctaggcctggctaagcagtttaagataaaatgcaaaatgacccaattcaggatgattatagttnggtttaaatttggttgctgaggcacaaacaaaagtgttgggattctggtagtttt

SEQ ID NO: 265 - DNA, 305 bp, Homo sapiens
  SITE (255): n equals a,t,g, or c
  SITE (265): n equals a,t,g, or c
  SITE (299): n equals a,t,g, or c
aattcggcacgagctccacatatattcagcaaacgtttgcacctgctctcttctgagtaaaagccactaggctagccacttgccctcattactcctgtgttattaaaaatggcacataggccgggcgcggtggctcacgcctgtaatcccagcactttgggaggccgaggcgggtggatcatgaggtcaggagattgagaccatcctggctaacatggtgatacccagtctgtactaaaaatacaaaaaaaaaanttagccgggnatggtggcgggcgcctgtagtcccagctactcangaggct

SEQ ID NO: 266 - DNA, 368 bp, Homo sapiens
  SITE (299): n equals a,t,g, or c
  SITE (365): n equals a,t,g, or c
aattcggcacgagtcttgccagaagatactttgagtgtgagtatactgtttctcatcatgttctcctccactaattctagcctccatctgtagtttttgcttgcagtaataatgatttcagcttttgtctagtgtggctttgtatttcaccatctcttctgcatttactaattggaattctttggtccctacttccctatctatttattgaattatttattgaagcttattttaaaagtatggtaatgcgccacgtaatgtttcggtcaacagcagaccacatatacaatggtggtstnatacggttataycaattttaactgcactttctgtgttagatgtttagatacacaggtacacagtgnttg

SEQ ID NO: 267 - DNA, 385 bp, Homo sapiens
  SITE (365): n equals a,t,g, or c
  SITE (371): n equals a,t,g, or c
aattcggcacgagcctaagtgaatttaatggctagacttcagttgcattcccaagatctctcattatgtatatgcaaatattttgaaattcaacctggttccacacattttagataagggatactcaagctgtaattaacaaataaacttttcacagtccaagcagccaaaggsccactgtccctgttccctcagctcacgcccccttccgtgcacagccttatcttaatccttctacccttcgttgtgtttgggacttcagactcttttttttttaagacaaagtcccgctctgttgcccaggctggagtgcatggcgcgattttcagctcaacctttgccccccaggttcaagcaattttcangttttnggcccccgagtagt

SEQ ID NO: 268 - DNA, 327 bp, Homo sapiens
  SITE (202): n equals a,t,g, or c
  SITE (249): n equals a,t,g, or c
  SITE (281): n equals a,t,g, or c
aattcggcagagctgaaacaaagctgttataaaattattggatacaacttaaagtaaggggatagtctgtttttattagaagatgatccttctgtgtaagaaaaaaaaatcacccattcattcattaactcattcattcatgttaatatttgcatgaataaatgaaatatgcaaacatttaatgggtgtctatgtgttaagngcaatactaggtgcttgaaatgcatacttcttaataacatacttctncatactagttagggaatgtgtttgtctgcaantaacaaaacttaacccagggggtgtacatgggggactttttttcct

SEQ ID NO: 269 - DNA, 212 bp, Homo sapiens
accgcgcgccggccctcgggtcctggttctscggatcaggagttgaaaccagcaccttccctttctytgagtcctgcctccttctgcagaaggragctcaaaagaactttgttgttttgccttttactctggggtgaaagcggcaggaggtatgtgagatggtgaaatgatttgcttctgccatgctggggtcamgggtggatcgccctaaa

SEQ ID NO: 270 - DNA, 348 bp, Homo sapiens
  SITE (134): n equals a,t,g, or c
  SITE (143): n equals a,t,g, or c
  SITE (348): n equals a,t,g, or c
aattcggcacgagaaccaaaccaacttgctagaactactctttgagttctgggtaagttcatttttttctcttacagcaacagctctctaataaaagggagaaatgaagacaggagtttgagaccagcctgggnaacgtaggngaccctgtctcttaaaaaagcattatcatacattttttgtagttggtagacctagtagccccctcccttccaccactctttttcttttctggcatttttctagctattcttgtacatttatctctccattaagttttcaaatcaatttgtctggtttcaggaagaacaacaagccaatttttttttttttttcaaaaatcactgn

SEQ ID NO: 271 - DNA, 502 bp, Homo sapiens
  SITE (365): n equals a,t,g, or c
  SITE (460): n equals a,t,g, or c
  SITE (490): n equals a,t,g, or c
aattcggcacgagatatgataaaaattagatggataaggttaagaaaaaggaggcattgtgtatcctttccccctgaatacggtatagtatccttttctttggggagatgctcctttcatttgtattatattgttcaaaggggagctgctaccatcttacagattctacctccttgatcaccccacccaggaaatcccttgagagagtacttggctcaaactgagttactgagttaatcaaagaatgaaatttttaaaattggaaacaaaaagagctaatctcagcatgggggctctccacagttctgtttttctgtcatctgggggaaagcttgattttgaaaaacaaaattttagtaggggcntaggttaggttggaaaccagaatcttggagggcctttgaaactggattgtaggctgttgctgagtcttcagctgtctattgcttggtcctttagnacagacttgctcatagcttgttgggttctngactcacaccgg

SEQ ID NO: 272 - DNA, 343 bp, Homo sapiens
  SITE (168): n equals a,t,g, or c
  SITE (336): n equals a,t,g, or c
aattcggcacgagtcggtatgaagggaagatggggagtgatttctgacagagtgaagtaagagcatatgtcctctatatgcaaggtgctgtgtttagaaagcagttttcagtttgccactttcagcctttcagacgagatgtcattttcgatataatgttcgtatgtnttactgatagtaaatgccatgtttcctcttggtggaattgcaccgtagtaactcatccgtgttcatcacttttctcttaggtttttcaggcttctttgaaattgttgaaaatgatcattacacaatatattcctaaacataaactgagtaaacttggaacagcttcantgtgtgg

SEQ ID NO: 273 - DNA, 205 bp, Homo sapiens
  SITE (187): n equals a,t,g, or c
agccactgtcctgtgaacgtgaactactttctatttgggtaggtaggaagaagtgaggatagttgcaaagttataatttcattccccttccccacccagaaaaatagaactgagagtcttaaaacatggaatctggctgtagcttggccacagttacctatgtgtstttagcatagcctcctggatntcagctttatctctgaag

SEQ ID NO: 274 - DNA, 357 bp, Homo sapiens
  SITE (235): n equals a,t,g, or c
  SITE (255): n equals a,t,g, or c
  SITE (346): n equals a,t,g, or c
  SITE (356): n equals a,t,g, or c
gaattcggcacgagagggaaggaagctgaggacttagcagggtatcactggacaggccatggctccacggtcccggcgacraaggcacaagaaacctccctcatcagtggctcccatcatcatggccccaaccacaattgtgacccctgtgcctctgaaccccctcaaaacctggscctagcattgacacacttggcttcttctccttggatgataatgttcctggcctatcgcngctgatccttcaaaagctgnaacatgaaaagctatgaagaatataagttggtggtwgatgggggtwycccgtatcaggstttggatttcgatgtsctcaaggaatgtcccnaagatggaana

SEQ ID NO: 275 - DNA, 224 bp, Homo sapiens
agggcacgacccaatctcatcaaaccagctgcccagtggsaagatctgaaaaggttgggagaagaaaggcctaaaaagtctagagcagcatttgaatcagataagagcagctatttttcagtgtgtacaacccattgtttgattctggggcacagggtgcttctgaggatgactacggtggaatttctggatcttgggcctcctggtaatctctggaattcact

SEQ ID NO: 276 - DNA, 160 bp, Homo sapiens
  SITE (122): n equals a,t,g, or c
agaagccccagaagcagccctacagtacaaggagactgtgccccctggaaatggggcccccaatgtgtttmaaaccctccagcacactctragctccctggaggcagcggctgcagcctggngccaccagccccccagccattctgggccgatggagttc

SEQ ID NO: 277 - DNA, 399 bp, Homo sapiens
  SITE (292): n equals a,t,g, or c
acagttggctatgttggtgccgacctgacagcactctgtagggaggctgccatgcatgccctccttcatagtgagaagttccaggtttgaccataagcacctctcacttaggtggaccagtcagctgctgtcgtcccagggtggagcccactgctacttcaggaggggcctgctcaggtgtagttaccacaggtgatggctgagttcagaaacaacccaggggaagtggaaggaagaaaggcaaaaagcatgaagggacagacaactgggaagaaccaggacaatcctgtgnattgatgaaatagacttccttgaagcttttaaaaatattcagccctcatcgttttcgaagcgtcattgggattaatgggtatcaagcctgttgacttgggaggagtt

SEQ ID NO: 278 - DNA, 494 bp, Homo sapiens
  SITE (125): n equals a,t,g, or c
  SITE (169): n equals a,t,g, or c
  SITE (358): n equals a,t,g, or c
  SITE (371): n equals a,t,g, or c
  SITE (444): n equals a,t,g, or c
attattaaaaatataggccaagtgctgggattacaggtgtgagccaccgtgcccggccagagattggtcttaaaatgccatgacagtcagcattaattggagagagataatattggcccaaatgnctgcctcttcaaatccaaaatccattttggggagtggagagggngactaacattggttgtatgtgtgcatgcatgtatatgtatgtgcgtgtgtgtgtgtacaagctaatcacctatcaaacataatgctgggtacattcgcatctttattttcatagttattgttactgtcatggctgtttyaattggttgrggrcctgctgtgcacttcacatcattccacaaagccctanagtgatcatggtnctatacacaaggaaaggaaggcagagaaattagacaacttactcaatgtcaaatgtccagtaagatacagaantcccaatctaaaactcaggtgtctctggggcccaaagcctgtggatctgt

SEQ ID NO: 279 - DNA, 370 bp, Homo sapiens
  SITE (330): n equals a,t,g, or c
  SITE (354): n equals a,t,g, or c
ggcagagggaattctttgctacatggcagaaaactttagtgtacctsctgttttctagtactacaaagccggaagtyctttccttttcctttacatcctccatccctattttagctgtttttcaaggactcacttaagtccttcatgctttatgaaacctcaaattattctagaacctatataatctcttacttttctgaactcctgtcgggtatatagtttatatcacagagttagcacttaattatcctctaaattttctaatatatgtgtattttaaawgcctccttaggcaaaggatctggtttctattacttagcatggtaggtnaatagtggggtatgcaatactccnacaggttgaggcatcc

SEQ ID NO: 280 - DNA, 391 bp, Homo sapiens
  SITE (122): n equals a,t,g, or c
  SITE (146): n equals a,t,g, or c
ggcacgagagcaactagggccctcatcacttcgccgccgaatccccggcgccgcccagcggggcagagccaggccagggccgcccgcccaacctggtccgctgcctcttcggccatggaagntgccggcagccctgcggctacggngacaggggtgggaaccgccaaacctctcccttctttttgacttcacccttggataccatcaaggccagaggatggaaccaagataacataaaataggcaagtatatcgcgtcaacacagcgacctgacgggacctggcgcaagcagccagagggtgaaagaaggatatgtggccccaggaggaggttcccagttttatggaaaacaagttatgttaaagttttttcaagggttaaaaccaggttt

SEQ ID NO: 281 - DNA, 501 bp, Homo sapiens
aatttgaaatactagctatgttaatggaggtcaggattactaaggctggatttacagctacaaaaaagtgacccagatttattttctattactcaaaattagttatgtcgaaggaggagcaaggggcttcttggtctatagactattgctaaatgtgtctctggacataaatcttctttggttttcattatctattctggagaaagcaatggtgactctragtaagtggggcagcaattcaggtctktaccacaccacatgcagcatttgtacaggagtagctttggcctcccagaccttagtgacctgggcaggccacccatctctgccttttcttgsagtgatttttacaggcacagagtaaactcctgccctcaaatacctactgccatttgcttcctgatgcttaacattccacatttatagaaaaggcctcaaatataaggaccacaataataacacgtgatttaaattcacatagagatgtattggctcctattg

SEQ ID NO: 282 - DNA, 473 bp, Homo sapiens
  SITE (444): n equals a,t,g, or c
ggcttgattcgagaggatctctcataagcacagattcgggtaacagccttccagaaaggaatagtgagaagagcaattccctggataagcaccaacaaagtagcacattgggaaattccgtggttcgctgtgataaacttgaccagtctgagattaagagcctactgatgtgtttcctctacatcttaaagagcatgtctgatgatgctttgtttacatattggaacaaggcttcaacatctgaacttatggatttttttacaatatctgaagtctgcctgcaccagttccagtacatggggaagcgatacatagccagtgtgagaaagatatcaagtgtgcttgggatttctgtagacaatggctatggccacttcgggacggcagatgttcttgcacccagttcatttacttttggaaaggccaacatttgcttacctttgnaggggggtttttttttttgcctgacagct

SEQ ID NO: 283 - DNA, 460 bp, Homo sapiens
  SITE (428): n equals a,t,g, or c
  SITE (459): n equals a,t,g, or c
gggcacgagccctgaccggaccagaccatcccgcagcgccccgccccggccccctccgcgccctcccgctctcagcccactctccctgttacacactgcccacactcagagcaagatgagttgctgctattctttgcctgcccctggggttctctgcagatggtcccagtaatagatactcagcactagactaacataacaggtcactacacgggtgcagaatcactttacaaaagaagactctgttttacgaaggggattcactacagggacttagagaacagtctcttttctgcctttaaaatgagagttcctccatttaccaaaatttgacacgcacacattcttcaggggcatgccaattrcgtaaagtgaggctcgcctgcatagctaatcctgtkaaakacaacttctyaaagcacaacgtntttgtttctattggggtccttcggggctttnt

SEQ ID NO: 284 - DNA, 366 bp, Homo sapiens
  SITE (246): n equals a,t,g, or c
  SITE (303): n equals a,t,g, or c
  SITE (333): n equals a,t,g, or c
ggcacgaggataagtgtccccgtagagtcaaccgggaagtggtggaatacatggtccagcatttcaagcctcagatctttggtgatcgcaagcctgtgtatgatggaaagaagaacatttacactgtcacagcactgcccattggcaacgaacgggtcgactttgaggtgacaatccctggggaagggaaggatcgaatctttaaggtctccatcaagtggctagccattgtgagctggcgaatgntgcatgaggccctggtcagcggccagatccctgttcccttggagtctgtgcaagccntggatgtggccatgaggcacctggcatccntgaggtacaacctgtggggccgttccttctttt

SEQ ID NO: 285 - DNA, 418 bp, Homo sapiens
  SITE (377): n equals a,t,g, or c
  SITE (381): n equals a,t,g, or c
  SITE (411): n equals a,t,g, or c
  SITE (415): n equals a,t,g, or c
ggcagaggcctttttttcctgactctaaattactatgattcgaagtggccatgactacttgactgtttcctgaaaaaaatatgttaaaattttatttcatcttatgaatcctcatagtattggttcatttaccattaattctttttattatgaaattacactatcccagttctctgcttcaaccattagtttgataattagaccttggtgcagttcagttgagctcctgatagagttttatgtaccatgtattttataacatttgcacaattttcttaagraatgcaaatcaaagttttatagtgccaagcacagttctgaaagttgaggacttttcagagtgagggagtgagcgctctgaagtcagcaaattagancccnctaaactaatttttcagtgtgtgaagtctntatngcc

SEQ ID NO: 286 - DNA, 459 bp, Homo sapiens
  SITE (440): n equals a,t,g, or c
  SITE (443): n equals a,t,g, or c
  SITE (455): n equals a,t,g, or c
gttagaaaatctaagaagtagccttacctgtttttttaaccagtgcttgccaatcataccatagttggaattatgtaatcttggctccttcatacttatgttctataattcttgtttgtctatttgttttctttgatgtaattgaggttgcacatcatgctattcttggcaatgcctgattctattgtattgtacttttgttagtcatttcctttagaaagatggggggaaacgtttatttcttcttttaatttaaaatttgtttaatgcactggaaataaaattggacatatttcactgtttaaaaaatcagaaacaaaacaaagcaaaaccatgagggaaaaaaacagcaaataagcaacaggggaaaacagctatggaaaaaaatatatttgtactggawtacacatacaaactacatcccacatggaaggttgatntcntcaagtgaggtnaaat

SEQ ID NO: 287 - DNA, 377 bp, Homo sapiens
gaacatcctggacaagaattagagattgagctctttgatgaagacccagacaaggatgactttttaggaagtcttatgattgacctcattgaagttgaaaargagcgccttttagatgaatggttcactctggacgaggttcccaaggggaagctacacttgagactggagtggctcacgttaatgccaaatgcgtcaaacctcgacaaggtgctaacagacatcaaagctgacaaagaccaagccaacgrtggtctttcctctgcattgctgatcttgttacttgggattccagcaagggmaccttccggtagktaacacatggttaacaccgtgggtggcgtattttccccaggcagtgctcttgtttttaacca

SEQ ID NO: 288 - DNA, 570 bp, Homo sapiens
  SITE (469): n equals a,t,g, or c
  SITE (485): n equals a,t,g, or c
  SITE (536): n equals a,t,g, or c
  SITE (561): n equals a,t,g, or c
ccccctgattgggggggggccccatagaagttatggcagagcttcttgaaaatggattggggatgatgctggacagaaagcgtgattttgagttagcccaggcataccttgcattgtttctaaagttacaccttaaaatgcttccttcagagccagtactcctagaagaaataacaaatttgtcatcccaggtggaagaaaactggacccatttgcaatcactcttcaatcaaagcatgtgtattttaaattatctcaaaagtgctttgttgtaaaaataaatttgtgactaaacaaagactttcatattaaatgggttcaattgaactcatttcttattttccaagtgtcaatgtgaaaagaaaataaatgctagcactactgactagtcatatatctccactttaaatgctaaatactttcttggaaataaaatcgcacctcccggccaggcatgatggataaatgnccgtaaattccagcanttccgaggccaaagcgggaggattgcctgaagcccaggaatttggagcccngccggggcaacatagccagccagantcccatctc

SEQ ID NO: 289 - DNA, 408 bp, Homo sapiens
  SITE (347): n equals a,t,g, or c
ggtcacgcaggaaatgggctctgccatcctctgaatcacagcaggaccctggcgggcaagagaccaaaggccccccatggggaggaagcccatctgccacctgtttcgggatttgactgttgagtttgataaactgaatttgcaaaatataggacgtagcgtttccaagacaccagatgaaagtacaaaaactaaagatcagatcctgacttcaagaatcaatgcagtagaaagagacttgttagagccttctcccgcagaccaactcgggaatggccacaggaggacagaaagtgaaatgtcagccaggatcgctaaaatgtccttgrgtcccagcagccccaggnacgaggwtagctygrgggggggcccgtacccawttggcctatrgtgggygtattmaattaa

SEQ ID NO: 290 - DNA, 225 bp, Homo sapiens
aaaggcatgcgcgacgtgaggtccctgtcctcggggtctgagaggcaagtaagcaggtaacgcgttctaaataaggacgtaaacagtgggcggagagacagtscagggtcgggtcctgctcagtccaggtcctccacaaaggcttctytgagacttggtctgtgraatgagaggcatcaacgtggatggacctccaggagggaagagaaagagttaccttaggag

SEQ ID NO: 291 - DNA, 373 bp, Homo sapiens
ctgagtgtagcatgcccccagtcgagaatggagagttgtccttctaactatagtagtagtagcaatcataatagcacttttctgtgcaaatgctctaaraattgagggaaagtggggcttktgtttggtgtcactctttttttaattgtggtggaaatatatataacatgacatttaccattgtaatcatttttaagtgtgcagttcagtggcatgaagtacattcacattgtcgtgcaaccatctctaccatctatctctgtaactttttcatcttcccaaactgaaactctctacccctgaaataataaccatctaccctgtcgcsccagctcccagccccaggcaaccactattcagctttctgtctgga

SEQ ID NO: 292 - DNA, 277 bp, Homo sapiens
ggcacagcgggcttgaccggcgtcggcccgcgcctccgctgccgcttcgccccaatccggtccctctggcccggcctgacccggtctggcttgttcgggctcagcggccgcaagagcctgcccgatgggaaatcatattatgtagaatacttgggtgacatctgcctgagagatctccaagaattacagattgagtctcgctctgttgcccaggctggagtgcagtggtgcaatctctgctcatgcaacctccgtctcccgagttcaagcagttctc

SEQ ID NO: 293 - DNA, 271 bp, Homo sapiens
  SITE (156): n equals a,t,g, or c
ggcacaggcaagaccctccaacaagccccctcccactttccacggtgtctccctctccccctcgcaggccctccaagttactagacgagcccagacccatttgtgggagaccccgcccctccctgcaagcacccacagcctcagagagcagcagangcccctcactcctgcacgctcctccaagttgccaggacaagaagcctggagccarggagacaaggaatccgtgtycctkgamccacagagcattcagggagagggcacaggcggg

SEQ ID NO: 294 - DNA, 138 bp, Homo sapiens
atgttagatcaggcagcaagattccttgcattcgaaaaatctcgggcagttctccctcaaccctaatcgagtaacgcaaggcaagcaagagtccagggtgttggttggactccccacgtatttacccatgcagtctgt

SEQ ID NO: 295 - DNA, 336 bp, Homo sapiens
  SITE (269): n equals a,t,g, or c
ggcacagaaaaaaaatcaaaagatctggctagtccagacttgtatttcagacatgcagtaattactttgagctaaaaggcagctgccgctctgaggcaggaggcacacgctccagtttgccaccaaccccacctctcccggttgccttgagagcgctttactcatgtgaagctacctgtatgggcactgggtgagtaggtgagcttctcactacctggcccagctcccagtctgaccacagagagtcccacctttgaggccagtggaantaggctccctgttagaggactgaccaaagtcatttagcatcttccatcaaaactcacattattcaag

SEQ ID NO: 296 - DNA, 260 bp, Homo sapiens
  SITE (10): n equals a,t,g, or c
  SITE (96): n equals a,t,g, or c
  SITE (247): n equals a,t,g, or c
ggcacagggnggtcttgagcagcactctgtctctctcctggcctcagtttttcctccttttggtggagggggtagagggagatggggactgtgaancagatgattgttaagaacctttgtagtaacaatattctgatagtccccgctctgggagctcggactgggatttccaggcttttaccctagggcctgatttatattgagcaatgaggaaaccatacagggaccccagcacttttgggaagantgctttggagcct

SEQ ID NO: 297 - DNA, 381 bp, Homo sapiens
  SITE (362): n equals a,t,g, or c
  SITE (371): n equals a,t,g, or c
ggcacgagaaaaggaaaaggaaaaaggccaaataaatagtattttagctgtttctgacatgtaaggactttagaagtcatcactgtgtcctaacaagtaaaaagctgaacaaactgaaaaatcaacaaatcttagctccatcagagaggtgtgaggtcagaggacaaatcactgctctcaaaattggagaggtgtgagccaccgtgccaggtctatggagctcttcttgtacctcccagccccattccatgtcttgctgtcactgctgggacccactgttcaggtggggccctaaggcaatgtgggaatcagccagcaccctcttgttctggggcaggacgagaaccactgargttcccccntgggccagngggatttccc

SEQ ID NO: 298 - DNA, 263 bp, Homo sapiens
ggcacaggcctcgtagcacaccccacagaacccccattattactccaaatacaaaggccatccaagaaagattattcaagcaagayacatcttcatctactacccatttagcacaacagctcaagcaggaacgtcaaaaagaactagcatgtcttcgtggccgatttgacaagggcaatatatggagtgcagaaaaaggcggaaactcaaaaagcaacaactagaaaccaaacaggaaactcactgtcagagcactcccctca

SEQ ID NO: 299 - DNA, 316 bp, Homo sapiens
  SITE (290): n equals a,t,g, or c
  SITE (300): n equals a,t,g, or c
  SITE (302): n equals a,t,g, or c
ggcacaggaagagttccagttgctgcacattcacatcaatacttggtattattggtctttttaattttagccattctagtgggtagatagtgttaagcaacwtttcatgtttttactgaccakttatatatcttttttatgaagtgtttgtttaaatctttggcccatttttattggatcatttgccttattattgaattgtaagatttctttgtatatactttagatctaagtcttttttgtcagccatatgtttctcaatatttcccctagtctatgcctgccttttnaatttccgtntnggtttccttttttt

SEQ ID NO: 300 - DNA, 84 bp, Homo sapiens
gacaaactgacccaccgggcgccctctagaactagtgatccccgggctgcagaattcggcacagtcgcggtgtgctaagcgagg

SEQ ID NO: 301 - DNA, 320 bp, Homo sapiens
  SITE (261): n equals a,t,g, or c
  SITE (267): n equals a,t,g, or c
  SITE (300): n equals a,t,g, or c
ggcacagcaaaaaaggaaacagattttgtgtaaaggtgggtgggccaagttcagcttcagaggtattgagctagaagtgtctgcaggttatctgtctagaaatgtacagtggacaatgaaatatttaggtttaaagttcaggagggattatgtttctgaagccaagatcctgactctttcactagctgctgactctggctccagcatcctgtgctggattttcaaaagaaaaacatggaagaggaaacagcacatggcgantgatcntgtaccagcgatggtttcgatatactttatcanctttctgggttttttccact

SEQ ID NO: 302 - DNA, 373 bp, Homo sapiens
  SITE (116): n equals a,t,g, or c
  SITE (268): n equals a,t,g, or c
  SITE (324): n equals a,t,g, or c
ggcacagctgaggcagctagtagccggaggtcaccatgaagttcaatcccttcgttacctcggaccgcagtaaaaaccgcaaacgtcacttcaatgccccctcacacgtgcgcagnaagatcatgtcatccccgctctccaaggagctgcggcagaagtacaatgtccgctccatgcccatccgcaagacgacgaggtccaggtagttgcgaggacactacaaaggtcagcaaattggcaaggttagtccaggtgttacagaaagaantatgttcatcttacattcgagcgggttgcagcgttgagaagggccaacggcacaantgttccaagtggggctttcacccaagccaggtggtttattcaccaggtt

SEQ ID NO: 303 - DNA, 336 bp, Homo sapiens
  SITE (183): n equals a,t,g, or c
ggcacagtgaagccaggcagataactgttcctcagatttcagtacaactaatttagtattatattacaattcaaagactgctatttccattataattattataagagaatgaaccaattatatttttcttgttaagcaaactacatggtatgttagtgtaatgtgaaaaatagataactgaanttttcaaatcttaattcttactgactttttgtttccagaaaagctttgacctggaaatactacgcaaaaaaaattctttactacctgcggcaacagaagatcttaaataatcttgaggccttcttcagcagccagatgactatggagtcgtat

SEQ ID NO: 304 - DNA, 321 bp, Homo sapiens
  SITE (181): n equals a,t,g, or c
  SITE (274): n equals a,t,g, or c
  SITE (300): n equals a,t,g, or c
ggcacagagagcactggcctcacaaataactcagttacgcattcatgctaataaataccacattacgatggacaatgtgcaggcaggagagaaacttctattccttggctccactgctcagccagctggggtgagtgagctcaaaggtctgtacaagcagatctgagcttagtgtaaacangggagaaggagtgtcagaagggaacagggacaatttcacagaaaatcataccagtggctatgaaaacagcctatcctcggcttggcaaagatnaatgttattgggtggggcccctattnacgattaaacacgtggcaagt

SEQ ID NO: 305 - DNA, 280 bp, Homo sapiens
  SITE (261): n equals a,t,g, or c
  SITE (279): n equals a,t,g, or c
agtcaagactgatctaatctgccccaggatgtaggagaaccacttaatattcatagatgctgtctctttctacaaaacctcagtataatcctgtctctcaaactttgtgctggccaattccaactgaataaacccaaacactttgccaactacccatctaccctcccctcactttatccatttatccctgtttgtatcttgggctcttgttcatgctgttccatccatttagaaatggcatctttcatctctactctggcnaacacaatttcaactcant

SEQ ID NO: 306 - DNA, 100 bp, Homo sapiens
  SITE (7): n equals a,t,g, or c
ggtagantacagacgcgacgtactaggggaaagcgtgsgtacgccgtgcaggtaccaggtccggaattcccgggtcgacccacgcgtccgcggacgcgtg

SEQ ID NO: 307 - DNA, 174 bp, Homo sapiens
cggacgcgtgggcggacgcgtgggtcgacccacgcgtccgcgagaagacgacagaagggtatctgtgatgatcttatcccgaacctgaacttctgttgaaaaaaaaaaaaaaaaaaaaaaaaaaaaaaaaaaaaaagaaaaaaaaaaaaaaaaaaaaaaaaaaaaaaaaaaaaa

SEQ ID NO: 308 - DNA, 219 bp, Homo sapiens
  SITE (204): n equals a,t,g, or c
acgcgtgggactgcgagaagacgacakaaggagaagatgaakagaattcatctcatgaatttcagcatgagaaagagaaaatcctgccaaacagagatgggaaaatcaggcccccacagaagaatgacaatcatattagcatcatgtctgtcactggcaacactgggtgctgagatgatagaacacactatagatagttctganataaataccattttt

SEQ ID NO: 309 - DNA, 467 bp, Homo sapiens
  SITE (15): n equals a,t,g, or c
  SITE (454): n equals a,t,g, or c
  SITE (465): n equals a,t,g, or c
  SITE (466): n equals a,t,g, or c
  SITE (467): n equals a,t,g, or c
ttttttttttttttntttttttttttttttgtgagccaccaaattttaaaactagctcttgttttttacggctgcgagaagacgacagaarggtacggctgcgagaagacgacagaagggttacggctgcgagaagacgacagaagggtacggctgcgagaagacgacagaagggtacggctgcgagaagacgacagaagggtaagtaagagtatttggtggatgccttgggtctgaaagtcgatgaaggacgcgattacctgcgataagcttcgtggagttggaaataaactatgatacggagatttccgaatggggtaacctaactgagcaaacctcagttgcattttgatgaatccatagtcaaattagcgagacacgttgcgaattgaaacatcttagtagcaacaggaaaaaaaaaaaaaaaaaaaaaaccggggcggccttaaggggntccaagctttnnn

SEQ ID NO: 310 - DNA, 436 bp, Homo sapiens
  SITE (378): n equals a,t,g, or c
  SITE (433): n equals a,t,g, or c
cccacgcgtccgaagacgacagaaggggtataaattcaattttaataytaaaatttcaaaggaaagtacatgaaaattatttcagtaggtacaaatcacgcaggtacctcatttttaagaacatttagaaaattaaatcctacagctgaattagtaacttacgacagaaacacagatatttctttcttaggatgtggaattgctctttgagtagggcaagaatttgaagatccaagtggattattttattcaaatgttgaagaattaaaatctttaggaatttcagtccacctagaacacgatgttgttgaaattaaccgtgaagaaaaatacgtagtggttaaaaatctaagaacaggtgaagaatttaaagacacnatgataaattagtttttgctggagggacatgaccattgttccaccatttgaaggngtt

SEQ ID NO: 311 - DNA, 257 bp, Homo sapiens
  SITE (11): n equals a,t,g, or c
  SITE (56): n equals a,t,g, or c
taccggtccgnaattcccgggtcgacccacgcgtccgtccacgcgtccggacgacngaagggtataaaaactgaaaacgtgcaggaatcacttcagtagatggttttgaagatgcaaaatgagctctagaagaattagcagagtgtgaaaaattattcagtaaatattctaaattatccaaaaaagactttattaaaaaaatgagggaaaaacatccagaaaaaaaaaaaaaaaaaaaaaaaaaagggggggccgtt

SEQ ID NO: 312 - DNA, 386 bp, Homo sapiens
  SITE (2): n equals a,t,g, or c
  SITE (3): n equals a,t,g, or c
  SITE (10): n equals a,t,g, or c
anncgtcctnacggtgcacgacagaagggacattkkaaatttaaaaatataaattatgtagaaaaatatctatgaaaagaaaactcaataagctttttttattattttttttagcagcaacaccaattgcttttttttatttcttgtaaggatacacaaatatcaagccaagattcctcaactaatcctaacaacactcaatgacaatttcgatcctaacaaaccaacacaagcaaaagataattcaagacaatttcaatttgctatcaacaaaacaaaaacatacaatgaatttaaaaaaatattttttgatgatctgcaatacattgttgatcataatgaaagatttaaaataacattagcaaatcctgataaaaattaagtgg

SEQ ID NO: 313 - DNA, 210 bp, Homo sapiens
  SITE (186): n equals a,t,g, or c
  SITE (210): n equals a,t,g, or c
gctgcgagaagacgacagaagggtatttaattgtaaaagcaagggaatttgccttacaagagattaaaaaaatwaggtgctamtggatttaaattattaattaacaatgaaccagatgcagaacaatcaatttttcatacacatgtcacataattccttattataaaaaaaaaaaaaaaaaaaaantggggccgttttaaaggatccaan

SEQ ID NO: 314 - DNA, 414 bp, Homo sapiens
  SITE (3): n equals a,t,g, or c
  SITE (5): n equals a,t,g, or c
  SITE (61): n equals a,t,g, or c
tangnctcactatatagcaaagctggtacgcctgacaggtaccggtccggaattcccgggngacagaagggtacggctgcgagaagacgacagaagggtacggctgcgagaagacgacagaagggtacggctgcgagaagacgacagaagggtacggctgcgagaagacgacagaagggtacggctgcgagaagacgacagaagggtacggctgcgagaagacgacagaagggtacggctgcgagaagacgacagaagggtacggctgcgagaagacgacagaagggtacggctgcgagaagacgacagaarggtacggctgcgagaagacgacagaagggtacggctgcgagaagacgacagaaaaaaaaaaaaaaaaaaaaaaaaaaaaaaaaaactgcggccgctctagag

SEQ ID NO: 315 - DNA, 374 bp, Homo sapiens
  SITE (320): n equals a,t,g, or c
  SITE (325): n equals a,t,g, or c
tggtgcccagtgttttratgtgttgaratgactagatgtatggcattgtgggtaagtagtgagacatcaggttaacttgaatcttgacaggccatcaggactatcatctatgttggaagaaccaacttgtgattatagatgtggactcatttgaggaggctatgtaatactaatgttagggatctgtttggcttgagggctgaagatctgtaaccattgaatgtyccatcttctttgcagatgcttagttataggaagctagttcttcttttcctttgcttccattgaaaaaaaaaatcttgtggtgcttataggcagtngtttncccaggtgggatgaaagctttgttcccacgttaggatctttggaggatc

SEQ ID NO: 316 - DNA, 264 bp, Homo sapiens
  SITE (166): n equals a,t,g, or c
  SITE (263): n equals a,t,g, or c
agaactcaaaggcagtatatctctatagctgatgagatttcactggggccgacaccacctgtcctgtgcacactcacttctcggttagacctggctaggttttctgctgtgccttgtttttagctttgtaaccagcagtraatcacattggtctttgggaattttnatgtttcaggttttacagatgatgcaaaagcattagttttcaaagtcactgcaaatgctatgtatatgtatttctgcaacatgcagcccctgcactna

SEQ ID NO: 317 - DNA, 361 bp, Homo sapiens
  SITE (38): n equals a,t,g, or c
  SITE (109): n equals a,t,g, or c
  SITE (361): n equals a,t,g, or c
agccaaagacagcagggctcctggtgaccctccttgtnaaggcattggagaaggtttggcctctattttcaaccaccactgttgactttgtccctacctcttgattgtnacattgcagtgttttaaaaagaattccacaaaatcctgtggaatctaggggataactggcaaatagaattgggtgggaattctcaggctgaatatggactttgttcattttcccagctgaaactacctagtagctgcagagtagagtagagatgcctctgtgctagtaggtctgggtttgcaatcccagtgctgccattttcaagctgtgtggacctgaggcatctgatgctccttttgaacctgcatttcn

SEQ ID NO: 318 - DNA, 368 bp, Homo sapiens
  SITE (358): n equals a,t,g, or c
ggcacgagccacttgccagctctgtaacctggggtaaactccttaacttctctgaacctcagtttcttctcaggtaaattgaggataataatatacaggcagacctgatgtaaagattaaataatacaggtaaagcacttagcaccatgtcacgtagcagacactctatacatgttagcagttatcctaatcatcatacgtacattccattttctaggggtgaccactgagttctgggtagattcattgagttgccaaaggattgatgtaacatgacagtaaggcatttgtttgtggacagtccctatccctgccccatctgcattttagttttatatttcacaaggattttgagggntagtctggca

SEQ ID NO: 319 - DNA, 131 bp, Homo sapiens
  SITE (1): n equals a,t,g, or c
nctccaggcctgggcctccagccacctcctgtcagagctaatcaagccagcaccaactcagcaactccctggacagaccctccaggagcaactgaaagcctcttcagtagagaactgcccttgcttaccct

SEQ ID NO: 320 - DNA, 703 bp, Homo sapiens
tttttttgaaggaaaagagattttgcgttatattttttaaatgaagcaatacaatcattttttatgtatatatctagttgaggagaaaaaattacagattttttcccccttactccaagataatctaaacagattttactctggatggcttaattataacataatccatgaagttatagccagggggttaaataagaagttgatgacaaacttggtttctctaacaagyatgcaagaaaactcaagtgccacaatgaacacccataaactgctgtcaggaggcaaagtccctatgaggtaataataaacccacgaggttaaggcaaaacctacggttgtttctgcaaacaaatgtccaggaaactcaagtttgtgatgaaagaacagtcttgaattcaacttcagcagaacctttccctccctgggctccaaagcactatgtcacctacctctccactcaaatgccccattaagtaccatcctgttggagcttcctaacgcccctgctccctggtttcatttggaaccaactgagagacacaagtccctcttcgttgatcagggtcagttgaaagatgtagctgtcggcctggtagccaggtgggcttgctaatcctgcacctctaccttaagcttacccagcgtgaggccaggttagaaagtcacaggccttggcagcaggcagagagcccggacgcgtggg

SEQ ID NO: 321 - DNA, 317 bp, Homo sapiens
  SITE (214): n equals a,t,g, or c
  SITE (257): n equals a,t,g, or c
  SITE (279): n equals a,t,g, or c
  SITE (315): n equals a,t,g, or c
acccacgcgtccggtcaactcttctgtccaaaaaaaagttcagtactctatccaaataccagcaaagcatgacttgtgttcacaacatctataaagcctagagcatttacacaaattctgtatgtatatcccccaagaaaagttttattttcttgtcttcccataaaaaaaatatgctgttactgagccaaattctgtycttttyctatttggnaattccaggtacactccctcgtgcatgagctccagcatgaggnaaggacaactgaagcagtgatnatatatcttctctttcctaggataattgccccaaanct

SEQ ID NO: 322 - DNA, 320 bp, Homo sapiens
  SITE (113): n equals a,t,g, or c
  SITE (242): n equals a,t,g, or c
  SITE (297): n equals a,t,g, or c
acccacggcgtccggaagaacaaaaacatcaacgtcttttgtccagcctctttttattgtatgtttagaaaggtggaacagcagaagaaaaagaggctggacaaaagacttantttttctcagaatgttatgccagagctggattatggagtacaataaagtcatgggataaaaataatcgatgtatgttacgggcgctttaaccatcagctgcctctcgaatggaagaacatggtaatggnttaacatcccatttggtggtactaaagtggccaatcggaataatataatgggaanggccatagggtccatccctgaag

SEQ ID NO: 323 - DNA, 448 bp, Homo sapiens
  SITE (398): n equals a,t,g, or c
  SITE (412): n equals a,t,g, or c
  SITE (428): n equals a,t,g, or c
ggcacgagtttacaagtagggattacaggcgtgagccaccacacccgacctggagctgacattctatgtagttggaggaaacagaccacaaagaagtcccaaaacagactgtataccaggaggtggtgagaactaagaggataaataagtcatattcagaggatggtgagtcatggaagggggctatacagacagggtaatcagggagggcttctctgaggaggtgaaattcaagtagagatgggaatagagtaagcctgacagacatctgggagaagggcactcctgctagactagakgaaacagcacgtgcaaaagctctgaggcaggaacacgcgtagagcatcctcgattagatcctacacaggcctggccaggcacggtggctcacgcctgtnatactagtcctttnggagcttagcgggtgnttaccttacgtcgggattcg

SEQ ID NO: 324 - DNA, 338 bp, Homo sapiens
  SITE (131): n equals a,t,g, or c
  SITE (142): n equals a,t,g, or c
ggcacgagcggccccaatgcccagtgacttccaggtcctcagggccaagtaccgagagagcccgctggtctccgcctggtccgaggagctgatctctaagctggctaatgacatcgaggccaccgctgtgngagccgtgcgncgctttggccagttccacctggcactgtcggggggctcgagcccgtkggccctgttccagcagctggccacggcgcactatggcttcccctgggcccacacgcacctgtggctggttgacgagcgctgctccccactctcagacccggagtccaacttccaaggcctgcaagcaacctgctgcagcaagtccggat

SEQ ID NO: 325 - DNA, 349 bp, Homo sapiens
aaaaaggagtgtaggtgttattactgcagagaagactgaatggagtccacttttcttattagtaacttactaaaaatgatctcaaatgggctccacacactttgccctggccatgaggcaaacttgttgggtttggagaaaaacacataaccctaaattcactatttttgccctatataaaacattaaaataacatgctctgtacacatgctgtcaacaaaagccagctctaggaacctgagtgccagaatgcctgagggagctacagctgggcttagttggctgggattgagctcgctgtctgagggagctcgctctgtctctcgcacactggcagttttacaccagc

SEQ ID NO: 326 - DNA, 435 bp, Homo sapiens
tcgacccacgcgtccgggaggccctggccttcttttgcccgaccaggggtggctggcagataccacccgagagattaagagctgttctctggagttccaatcccacctttaccgtttaatagctgtgtgactttaggagctggagctggtggaggatgtgtggcgaggggaggcgcaggacctcctctcccagatcgcccagctgcaggaggagaacaagcagctcatgaccaacctctcccacaaggatgtcaatttctcagaggaggagttccagaagcatgaagagacgggatttcaccatgttggccaggctggccttgaagttctgacctagggtgatctgcccaccttggcctcccaaagtgttgggattacaggcgtgagcaccactcccagccttgccttttcatgtccgaattgtctgaatcatat

SEQ ID NO: 327 - DNA, 432 bp, Homo sapiens
tcgacccacgcgtccgctaagagttgagttttgaaggtagactgcctctaccgcttactagccacgttattttgggcaagttatttaacacttccaggtctgtttccaaacctacaaaatggggatagtataacaataactcatggggttgttatgaggttttcattggttcatacatcaaatctagaaaagcttttgtcacatatgaagtgtgtagtgagtttcctattattacttccaggttggagatgagattggtcttcataagaattaactgacaatgtttacgaattcacacagctaacatacaatagagtcagaacttgaactctggtttactggctccaactccagtattctttccactactctgcgaaaagtatattarttttaagtggcattagccttttccaaataccacgtgtatttata

SEQ ID NO: 328 - DNA, 447 bp, Homo sapiens
  SITE (343): n equals a,t,g, or c
gggtcgacccacgcgtccgctggactgggcagatgctgtatgacctccctgagcacccgtgactgccccatgctttcccctttgtgctctgtgtgtgtctgggctgtgcccgggggcttcacaaataaagtcgtgtggcagcttcagagactcagaaactctcactgaaagcgggatagtctcgggggccgttgtacgtggagtcccacctcggcagagcatgcggccccgcagcagtctgtggggcagtcagccctgcagaagggcccggcctcggcctcaggcactacctgggaagtggcagtcctgagtgggggcccattttcctgcctggscacacctnacccagcaccctgcctttgggctgcagctcgcttggcttctgcgttgctccttcactatggaagccacctcccttgggatcctttgctccactgccacatatgt

SEQ ID NO: 329 - DNA, 357 bp, Homo sapiens
  SITE (281): n equals a,t,g, or c
  SITE (325): n equals a,t,g, or c
  SITE (336): n equals a,t,g, or c
acccacgcgtccggtctcaccatcctgggcttccaacggagactgcggtatcccggctggagacccagcggcgagtagccttttgctcccggacggacttgaggttggagtctgtgtgttggggaccctgcctttggaagcgcccgagaggcttaaaggatggcctcgtcagatctggaacaattatgctctcatgttaatgaaaagattggcaatattaagaaaaccttatcattaagaaactgtggccaggaacctaccttgaaaactgtattaaatanaataggagatgagatcattgtaataaatgaactttctaaataantggaattgggnaatcatatcaagaacaaacca

SEQ ID NO: 330 - DNA, 394 bp, Homo sapiens
  SITE (18): n equals a,t,g, or c
  SITE (63): n equals a,t,g, or c
  SITE (373): n equals a,t,g, or c
tcattcaggaaacagccntgaccatgattacgccaagctctaatacgactcactatagggaangctggtacgcctgcaggtaccggtccggaattcccgggtcgacccacgcgtccgcccacgcgtccgcctccaaacagtasaagtagaaacccaaggagatgacttacagtctcttctgtttcactttttggatgaatggctttataagttcagttctgatgaattcttcataccccgggtggggagaagaattttcattgtccaagcaccctcagggaacagaagtcaaagcaataacatattcagcaatgcaggtctataatgaagagaacccggaagtttttgtgatcattgacatttaagacaccanaaaataaaagattcctacgaa

SEQ ID NO: 331 - DNA, 417 bp, Homo sapiens
  SITE (411): n equals a,t,g, or c
  SITE (412): n equals a,t,g, or c
  SITE (414): n equals a,t,g, or c
  SITE (417): n equals a,t,g, or c
ggcgattctcctcccacaacctcccgagtagctgggattacaggcacccgccaccacgcctggctaattttgtatttttattagagacggggtttctccacgttggtcaggctagtctcgaactcctgacctcaggtgatccgcccacattggcatcccaaagtgctgggattacaggcgtgataaattgaccatcttataccaggaagtcaaatgagaagacatcagtaaaaatattctggccaactcatgttttatttatcatatcttcatcattaattgcttctcataatgccacagtttgtcatggtatttgtggcagcaggcaaagtccttgttcagactttgattaaattgctgtggcatttttctattaaaaagatctcctgtttcaaaaaaaaaaaaaaaaannanagn

SEQ ID NO: 332 - DNA, 439 bp, Homo sapiens
  SITE (437): n equals a,t,g, or c
cggacgcgtgggcggacgcgtgggcggacgcgtgggttcggaactcaatgtgccgatcagtggagtcagtatcgagcctgaccaccgcaagccaggaagcaggtgaagtgcccagcgctggagtgcagcgtgccacgaggagggcggtcggtgcttccctcctcgggctgtgggcacatggggccccgcaggttccttggaggagccctgagctgggaggcagcaaaggctgacctatcagagcctcccagaggccaccgtgctgggtaccaggactcacctctgacaagcaggagaaggtaagggcccggtcagctccaaggagcgcgctccacgcgcgtgcacacagcttcctggtaataaagagctggcatctttcttaaaaaaaaaaaaaaaaaaaaaaaaaaaaaaaaaaaaaaaaaaaaaagggcggccgntc

SEQ ID NO: 333 - DNA, 488 bp, Homo sapiens
  SITE (5): n equals a,t,g, or c
  SITE (38): n equals a,t,g, or c
  SITE (76): n equals a,t,g, or c
cctcnattggtgttatccagccttcattgtcaaccccngtggttgtggtggatcacccctagttggtgtggtccancctgaggttcaagtgtcggaagagcaaggagtctgaagatccccagaaacctgggagttcagggctgtctgaaagctgctccacagccaatggagagaaagacagcatcacccttatctccatgaagaacatcaacatgaataatggcaaacaaagtctctcagcagagaagatctaaaggacactagcattgccccagatctgggagcaagctaccaacaggggagactctttcctgtatggacagctgctgtggaaatactgcctgcttctcccacctcctcagagccacaggaaagaggaggtgacagagagagagcaaggaaagtgatgaggtggattgatactttctactttgcattaaaattattttctagcctgcaaaaaaaaaaaaaaaaaaaaaaaaaaaaaa

SEQ ID NO: 334 - DNA, 554 bp, Homo sapiens
  SITE (551): n equals a,t,g, or c
  SITE (554): n equals a,t,g, or c
ggccaccccaccccagattgtcaacggggaccagactatgagctcttcgtggaggctgtggaacaaaacacgctgcaggagttcctgaagctggcttgagtcaagcctgtccagagttcccctgctggactccatcaccacactccccccagccttcacctggccatgaaggaccttttgaccaactccctgtcattcctaacctaaccttagagtccctcccccaatgcaggccacttctcctccctcctctctaaatgtagtcccctctcctccatctaaaggcaacattccttacccattagtctcagaaattgtcttaagcaacagccccaaatgctggctgcccccagccaagcattggggccgccatcctgcctggcactggctgatgggcacctctgttggttccatcagccagagctctgccaaaggccccgcagtccctctcccaggaggaccctagaggcaattaaatgatgtcctgttccattgaaaaaaaaaaaaaaaaaaaaaaaaaaaaaaaaaaaaaaaaaaaaaaaaaaaaaaanaan

SEQ ID NO: 335 - DNA, 442 bp, Homo sapiens
gggtcgacccacgcgtccgcccacgcgtccgcttattttactttctgacagaaggctgttttgttttttgccattgaaagaatttaaaagaaccacttaaaagaattatattgtgacccttgggttagcaagcacttcatggttctcaaaaccatgattcctagaggaaatagagtttgaaaaggatgccaagtgcatcccttatctccttcatctcaagaaaagcttaccggttttctttaatttgtttagaaagcacaaacacaactgcttctgtattcaggaggttgtgagtgggctgcggcagcccgttggtgccctgcatagtggggatggctcgcaacgtctcttcattctggaaaaagaaggttatgtgaagatacttacccctgaaggagaaattttcaaggagccttatttggacattcacaaacttgttcca

SEQ ID NO: 336 - DNA, 437 bp, Homo sapiens
  SITE (8): n equals a,t,g, or c
  SITE (423): n equals a,t,g, or c
acccacgngtccgggtgcaggtaggcctgcccctgtctgtccaggcccccactcttggtcaggcccaggtcagcagaacaccgaggaccttgtggacagcccttcgttatgtttgggctgctctgtctactgtcaacaccatcaacttgaacttctgcaccatgctgagcttgaactctcagaggggcaggagcctggcagctaaaagccctgctgttccactccctcacagtgggacttctaagcctttgtgtccccatccggaatgtggagattgtggcttctacatcctggtggtccctacctcgtaggtgtttgcagaggtcctggcacttgtgaaggccttccttacagagtggcctccattctgagagcatggcttcaaggactcgggagagaattacggacagaccatgtgcggantctcctcctcctcc

SEQ ID NO: 337 - DNA, 415 bp, Homo sapiens
  SITE (340): n equals a,t,g, or c
  SITE (385): n equals a,t,g, or c
  SITE (399): n equals a,t,g, or c
  SITE (401): n equals a,t,g, or c
gggtcgacccacgcgtccgcatcattgggaatggagggaaataaatgactggatggtcgctgctttttaagtttcaaattgacattccagacaagcggtgcctgagcccgtgcctgtcttcagatcttcacagcacagttcctgggaaggtggagccaccagcctctccytgccctagcagatgctaatccagcgtgcgtcctgrcagaggttgaagggggctyctcaagtcccaggtccagcttggtgtggttcagctactcgagagacatctgctgctaatggatgagcagtcaacctgggacgcagaaatcattttttatttggaataactgggagntgaaacaggaagctctatgacacactgatcgaatatgacagacanggaaaatcacgatncntccccctccagcac

SEQ ID NO: 338 - DNA, 447 bp, Homo sapiens
gggtcgacccacgcgtccgttcaattcagaatcctcttgtttcattaaactcagaaaacccatcatataataagatagaaaatggaaaatgggttttccataagcccacccaaatattcagtttttccttgaatttaaggtatacttgttttccatcactaaaagtttttctgaacaatattattctaaaaatgctgggattacaggcgtgagccactgtgcccagcccactctttcttatgcttggtattagcctttaacattcaagaaatccccacaccagacttcaaacatctaaattctagattttatatgccaaatcaggagaaacagtctttactttccctacctatagccttgttaataggggtctctacctgggatcaaagtctagggggccctcaactagttggcaataaaaaggacaaaggaaagccatcttgcaga

SEQ ID NO: 339 - DNA, 119 bp, Homo sapiens
tcgacccacgcgtccgcctagtgccacttctctcttgcttcctttcttgccgtgtgatctctgcacatgccagctcccctttgccttctaccatgagtggaagcagcctgaggctttca

SEQ ID NO: 340 - DNA, 412 bp, Homo sapiens
  SITE (160): n equals a,t,g, or c
  SITE (228): n equals a,t,g, or c
ggcgcggacagctcccacgaccctgagcccttcaccccggagwtgaaagacttgatcaatggctacatccggacggtggaccaagccctgcgtgaccacaactggacggkgctgcccagggagtatgtgcccagatgataggcctggcccacgccgscgnccycgctgagtgacgcaatcgcaccacggggctgcgctccccactctgatgctcaggcccgtgctcanctgggacgaacggtgggtggggggctcaccctggtgctgcctcccgcacaaggagacctggacacaacagacacacatcacaaggcgaacacaaatggacacacatacctggccacgraacccacaacttctcagacattmagacaccayttcaggttcatagccccgttttgatgtagagaag

SEQ ID NO: 341 - DNA, 799 bp, Homo sapiens
  SITE (118): n equals a,t,g, or c
  SITE (128): n equals a,t,g, or c
  SITE (155): n equals a,t,g, or c
  SITE (714): n equals a,t,g, or c
  SITE (794): n equals a,t,g, or c
tgtcatgtctgagcctgtccccagtgcctggtgaccctttgttgtgggttgggatttaagatggaggcaccagctcatgggctggagccctgtgggtggggggcctgctggctggtgngctacacagnggggcgacgagcagggagctggctcanatcgtgggctggtccaccctggcgctttccagagacaaagccctcagtgtccagtgttcaggggaggcggctggaagcaagaaggagggttgcacagacagcagatggtgtggatgctgacctctggaaagacggcttatttaaatccaaggttaccagatacctgtgtttcacaagatcattttccaaagaaaatagtcatctggggaacgtgttagtagatatgaagctcattgacatcaaggacacactgcctgtgggcttcatcccaattcaggagacggtggacacacaggaagtggcttttaggaagaagaggctgtgcattaaatttattccacgggattcaacggaagctgcgatttgtgacattcggatcatgggccggaccaagcaggccccgcctcagtacacgtttattggggaactgaacagcatggggatctggtatcgaatgggcagagtaccaagaaatcatgactcatctcaacccacaacgccttcccagtcatcagctgcctccaccccagcccccaaccttcccaggggacatcttccntaacatttcctgccacctttccgagggcagggaacagcacccsgacgggattacggagttaccagcattccattttgttntggcc

SEQ ID NO: 342 - DNA, 412 bp, Homo sapiens
ttaatagggcctatgatgtgtttactttaaaaattgccggttaaaagcaacacgtattaaatatgtaattatcatctgggttaagagtctgtttttcttctttgtggtaagtcttagaatatggtactgtggattaatctaatgaaattaacatatgtggttgaagttaccaakaaacgatgaaaagaaactaaatatagttgacccttgaacaacaggagttaggggcaccactccccaacatagttgaaaatccatgtataacttttgactcctccaaaacttaactactaatagcctactcttgatgggaagccttaccaataagaaacagttgatgaacacatattgtgtatggtatatgtattatatactgttttcttacaatagtgtaarctaaggaaaaaaaaaa

SEQ ID NO: 343 - DNA, 457 bp, Homo sapiens
gggtcgacccacgcgtccggttttaagacggtctcactcttccccaggcgggagtgcagtggcacaatcatggctcactgcagcctcaaccttctcgggctcgggtgattctcccacctcagcctcctgagtagctggagatactggtgcacaccaccatgcctagctaatttttgtattttttgtagagacagggttttgccgtgttgcccaagctggtcttgaactccggggctcaagtgatctgcccgcctcggcctgctgggattataggtgtgagccactgcacccggccaccattatcttttgaatcctctcttcctcctgcccaccatgaatttacttcctctcacccatctccctgatattgtaattctggttagatcatattcagtgtcaaattattaagatgtgattaaactttttaaaaataaaaaaaaaaaaaaaaaaaaaaaaa

SEQ ID NO: 344 - DNA, 464 bp, Homo sapiens
  SITE (9): n equals a,t,g, or c
  SITE (47): n equals a,t,g, or c
  SITE (59): n equals a,t,g, or c
  SITE (464): n equals a,t,g, or c
aagaaaccngcccctttcaaacccccacaccggagaatgatgacacngagaccaagtancagtgatacatcagatgacgacgatgtgtgaaggatttccctaacagctttagaaatccttagtgtgatacatctctcatacagtttggggtgaattgtaaaaatgaagaactataatttatgtagtgaaataccccattagaagaggattttttgggggacttcaatatgaagaaaaccaagaatgttttgttgggctgtgttgaacattatttctttgtaaatgaatgttgtaggaatgaggacttgggttggtccaacattgactttcttcatcactgcaacatttctctgactagcaatgtgacgatgtaacaaatgagattttctcatttaataataaaaaattgtgtaatgttttgcaaaaaaaaaaaaaaaaaaaaaaaaaaaaaaaaaaaaaaaaan

SEQ ID NO: 345 - DNA, 362 bp, Homo sapiens
  SITE (322): n equals a,t,g, or c
  SITE (323): n equals a,t,g, or c
  SITE (341): n equals a,t,g, or c
tcgatccacgcgtccgcggacgcgtgggcggacgcgtggggtttctcttccctctccattggaaatcttgctccggaggtccgaaacacgtattttaagcgtgcccttcctcacctcctggagcacccttagaagtattgcctacttatccgggctgagaatccttcatttttgacctggcttttttttcgccctttgggagataaaggtccttctccaccctctaccccctctagagcaaaaaaaaaaaaaaaaaaaaaaaaaaaaaaaaaaaaaaaaaaaaaaaaaaaaaaaaaaaaaaaaaaaaaaaaaaaaaaaaaannaaaaaagataaaaagganccaaaaattaaaaaaaaaaaa

SEQ ID NO: 346 - DNA, 271 bp, Homo sapiens
  SITE (8): n equals a,t,g, or c
gggtcganccacgcgtccgcggacgcgtgggtcggacgcgtgggcacagtttttgtttatatagagagcattttaaaaagaagaaggttttcctggccatgcacagtagctcacgcctgtaatcccagcactttgggaggccaaggcggaaggattgcttgaggccaggagtttgagaccagcctaggcaacattgtgagactgtttctataaaaaaaaaaaaaactgaaaaatcagccagccatggtcgcccatgcctgtagtcccagct

SEQ ID NO: 347 - DNA, 338 bp, Homo sapiens
  SITE (8): n equals a,t,g, or c
  SITE (330): n equals a,t,g, or c
gggtcganccacgcgtccgcggacgctgggtcggacgcgtggggatatgttggctgctggaggtaaaatcgagagcaacttggcaagtaggaaaggaattccaggaagaataaagtgcatgtgcaaaggccctggggcaggcaggagccttggctgctggaggaagcataagaaagctgaggtgtcggctgggcacagtggctcatgcctgtaatcccagcagtttggggggctgagacgggtagatcaggagttcgtgaccagcctggccaacatggcaaaaccccgtctctactaaaaatacaaaaaaaaaaaaaaaaaaaaaaaaanaaaaaaaa

SEQ ID NO: 348 - DNA, 816 bp, Homo sapiens
  SITE (611): n equals a,t,g, or c
acccacgcgtccgaatcatatagagtatgaattaaaccagaaatcaagtacataaaggtaacaaaaaatttccaaaatgcattaatttaaggaacatacacctcatgacccatgagccaaaaaataaatcacggcaaaattgcaaaaatattttgaaatgaattttaaagaaaatacttagcatttaaatacttagcatattaaagctctaagtacatatgttagraattttaccgaaagttggctatcagtgtttccagaagccagggaaaaagtttatacaatttgatmgctgaggcagggaaacaaagtgagacctccgatcgccckgcctttctgaggtgagcactctggatcccatcgcaggagatcagagtcttgctgagttgaggagaggaagattggagttgatactggagatagcttgaattttcaggacaaagtatcaacaaggaggaaggtagacaaaaaaatccagaaatcttatgtagagaccccattgtgtacattgcggaacacttaagccytaacaattcycaaaattagcgtgagattgggaaatatcttaatttccatccagccacagtggagagtcctgactgaaaaccagnattcgctaaagatcccagaaaggttgtgtgttacatacgtagggctaaactatcctgactaaaaactacactacacttgctcctcacccccacaaaaagcttaaaaacaagcctcaatagtataaagctgatctgtaagtaactaaactacctgcagaacaaagtccaaatttattagttccagtactccaaaaaaaacacatgt

SEQ ID NO: 349 - DNA, 676 bp, Homo sapiens
  SITE (1): n equals a,t,g, or c
  SITE (34): n equals a,t,g, or c
  SITE (39): n equals a,t,g, or c
nccataatacatgaccaaaatacaagatccctgnctggnacattctccctaagtcacatgctttgtatcatatcttttaattgcagaagtaatgtgtgaatatattttccttataaaagatgcaaacattacaaaaaggcaaatgtaccctttgaccatatcccaaaggatagtctttatcagttcattatttattgctgatcatttttctgttcatatatacatgcgtgtctcagtaaaaattataaaatgggggataattataatacctacctcataatgctttgtgaggattaaatgaattaagatcgataaagtgcttagaattgtgcctgacatgataaatacatactcactgaatgttagtcatcgttattatattcatcatcatcagtattattatttgtagaaaggctttttaacttctgcagaacttagtcaccattaggcagggtgtttgactgaagaaagaccctttgaaggtaacaagttaagaaaatttcccatcatcatgtacttactattgaacakgaaataatcctaggtgttgggggggaaagtactgtgaataatgtgtgtgaaggactttattccgactaatactctttttgtcgcattttatacccagtaaaaaagaaaagagaacataagcaaaatattggtgcactaatgagga

SEQ ID NO: 350 - DNA, 479 bp, Homo sapiens
  SITE (184): n equals a,t,g, or c
  SITE (478): n equals a,t,g, or c
  SITE (479): n equals a,t,g, or c
acgctggggcccgggctctgcacagrragctgggcttgagtggagtttattgtagatttcctcccaaggggatcacttagcttctcactgacacacccttccccaattgccacaagcgcaggggtatcttacagcactttggggaggggtgggacaaactgcaaggttctgggccaaggcctancccagggcctctgcccagagaactcacaaccccctctctgacctaggggacaatgcaaacaggtcacagtgcattcccatattaggccatccccttcacgaagaattcaggggatgtgggaagtggggaggcggggagggatcttgactcttgtctcctttgtccttttgttcagacagagttgtacctgcagcagacaactctgaattaaagcatgaaaacacagcaaaaaaaaaaaaaaaaaaaaaaaaaaaaaaaaaaaaaaaaaaaaaaaaaaaaaaaaaaaaaaaaaann

SEQ ID NO: 351 - DNA, 638 bp, Homo sapiens
  SITE (634): n equals a,t,g, or c
  SITE (638): n equals a,t,g, or c
aagctggaacatggatagattccattctaacataaagatctttaagttcaaatatagatgagttgactggtagatttggtggtagttgctttctcgggatataagaagcaaaatcaactgctacaagtaaagaggggatggggaaggtgttgcacatttaaagagagaaagtgtgaaaaagcctaattgtgggaatgcacaggtttcaccagatcagatgatgtctggttattctgtaaattatagttcttatcccagaaattactgcctccaccatccctaatatcttctaattggtatcatataatgacccactcttcttatgttatccaaacagttatgtggcatttagtaatggaatgtacatggaatttcccactgacttacctttctgtccttgggaagcttaaactctgaatcttctcatctgtaaaatgtgaattaaagtatctacctaactgagttgtgattgtagtgaaagaaaggcaatatatttaaatcttgaatttagcaagcccacgctcgatttttatgtcctttcctcttgccttgtattgagtttaagatctctactgattaaaactcttttgctatcaaaaaaaaaaaaaaaaaaaaaaaaaaaaaaaaaaaaaangggn

SEQ ID NO: 352 - DNA, 637 bp, Homo sapiens
  SITE (40): n equals a,t,g, or c
  SITE (90): n equals a,t,g, or c
aaaccttttctaaccaccctagggtaaatcctccattatncctttatttctttgttttccttgtagtatataatttgtaataattttggntactgattgtcattctgccaccctggagtatataatttttaattatctgattactgttattcttccatagtaggggaggtgatatccatttgcctgatacatagtatgtgttcaatacacatttgctaaagaataaatgaatcaataatacctaacatctctaatttgcagtcattcccaagagtaattattaaatatgtggcaaattctttgcctttttacttttaaaaatctaattttgacataactgctgtaaccatccagaaacggcattgatgttgcttcacgttgctgatgcttaagcaatgtatattgtgtaatatacaatgtagtcttcaaactaatttcaacttctgcctttctgtgtactcccttatcccactgggtgatattatttggcatggtcattgtcattaaaatcatacaggatagtaattcctttccatctgctaccatgcctagccttatttaatttttcagattttctgttctattgaaggtaattgattttttctttttttttaatgcttgaaataaagtgttgaaa

SEQ ID NO: 353 - DNA, 432 bp, Homo sapiens
agacaattcctctgtcgggtgtggccaagtggggataaagagaagagcaacatctctaatgaccagctccatgctctgctctgtatctacytggagcacacagagagcattctgaaggccatagaggagattgctggtrttggtgtcccagaactgatcaactctcctaaagatgcatcttcctccacattccctacactgaccaggcatacttttgttgttttcttccgtgtgatgatggctgaactagagaagacggtgaaaaaattgagcctggcacagcagcagactcgcagcagattcatgaagagaaactcctctactggaacatgggctgttccggagacttccagtatcctccatcaacttggataaaggtatttkgatagtcatcctgttctggcatgtatgtttggaagtatggggcgtctc

SEQ ID NO: 354 - DNA, 169 bp, Homo sapiens
  SITE (150): n equals a,t,g, or c
accatgctgcaattattgcaataaatgcacgtaatttattcaataattcagaatgctttctagctaagtattttraaaaatggtaaactaacaaaaaacccattccctcaactaccataatccagtctttcaactcacttaagcctcccncacaattttagtgtgacag

SEQ ID NO: 355 - DNA, 670 bp, Homo sapiens
  SITE (5): n equals a,t,g, or c
  SITE (15): n equals a,t,g, or c
  SITE (18): n equals a,t,g, or c
  SITE (22): n equals a,t,g, or c
  SITE (24): n equals a,t,g, or c
ggtanactgacagtnacngtcngnattcccgggtcgacccacgcgtccggttgaaaacttcagttattaagggtattargaatcmattgatrgagcaatttccmggtattgaaccmtggcttaatcaaatcatgcctargaaagatcctgycaaaatwgtccgatgccatgaacmtwtagaaatccttacmgtaaatggagaattactcttttttagacaaagagaagggcctttttatccaaccctaagattacttcacaaatatcctttatcctgccacaccagcaggttgataaaggagccatcaaatttgtactcagtggagcaaatatcatgtgtccaggcttaacttctcctggagctaagctttaccctgctgcagtagataccattgttgctatcatggcagaaggaaaacagcatgctctatgtgttggagtcatgaagatgtctgcagaagacattgagaaagtcaacaaaggaattggcattgaaaatatccattatttaaatgatgggctgtggcatatgaagacatataaatgagcctcagaaggaatgcacttgggctaaatatggatattgtgctgtatctgtgtttgtgtctgtgtgtgacagcatgaagataatgcctgtggttatgctgaataaattcaccagatgctaaaa

SEQ ID NO: 356 - DNA, 425 bp, Homo sapiens
  SITE (406): n equals a,t,g, or c
tatatattatacaaatacagtattatgtatagtacgtttatgctgttttgagcctccttgccctcatcctttgattcttgcctttttaatttcttgccagtttactatttatactgacaaaagcaacttagagtgtatacacmaaagattttataaaatcagtttakgtcctagtatttataatcccagatttwataatataaaccatagaattttcaacttwagtgactaaggatttttgggcaaaagatatgtgatatcctttatatccyctactttatagccacacttcyaatttgaggtaaatcctctccttcaattttcttatagtccaatcagtgaaagtcgargagtactacaggaatcatgtgagtttttcctaaaggcacaattctaaagttaaacnccaaaagaagcactataaa

SEQ ID NO: 357 - DNA, 504 bp, Homo sapiens
  SITE (407): n equals a,t,g, or c
  SITE (441): n equals a,t,g, or c
  SITE (489): n equals a,t,g, or c
gattaacgccttatgaagtggctcaaggtcgaaaggcgcaccttcttgcccttccactcttctaccctgtgaggacacggcgtttatctcttgcccttctgccatttgaagatacagtattgctcccctcagaggaggcagcaataaagtgccatgttggaagcagagagcaacccatatcagatgccagtcctgctagccccttaatcttagacttctcagtctctagaaccatgagaataatttgtattgtttgtaaattaccgattctatggaatttttgttacagcagcacaaatggtctgacagtgttcttctttaaaaaggaataatgttcatggatacagctctattgttcctggaattcttggggaagattctttggagttttgtggagtttacatatnacttactagttgtccttgccatatttttatgatngtgagtgaacacagtataccttttggttgagattagaataaaataganatttttatttgttgt

SEQ ID NO: 358 - DNA, 714 bp, Homo sapiens
  SITE (649): n equals a,t,g, or c
  SITE (676): n equals a,t,g, or c
gaagtatagtagaaattatagtagtttggattaatagatttaaggaggtatggtcaataatctcaaatgcctctcaagtgtgtttttgtattataagattttctaaataaaagtttctaaataaaacctaataatatttattttttaagagatagagtcttctattttgggagtggcgggtccggcagagagggatcttgctgtgttgctcatgctggagtgcagtggctattcacacatgtaatgatagtatactgcaactatgaactctagcaatgtttccagctcagcctcccacatagctgggactacaggtacatgtcaccatacctggtcataattattatttttaatgggaagcaatcgggagtcttcacttcttaatctgtctctgacattgttagctaatgtcaagtgacttcttccccmggtcatgttacctgtcagtactcaatcatcatgtacacagtaagaaattgttttatcttttcactctgaaatgcagggatagaaggaaggcatcaaaaaattaacaatggattatttcatcacaatgttaagtgcaaggtgtcggtacagcaagataatcctagatatttatttgaccttggaatgcccgttaggcatatatctacttaaaaattgatgnggcttgggcatagtggctcacacctgnaatcccagcactttgggaggctgagcaggcacatactt

SEQ ID NO: 359 - DNA, 780 bp, Homo sapiens
  SITE (577): n equals a,t,g, or c
  SITE (674): n equals a,t,g, or c
  SITE (701): n equals a,t,g, or c
  SITE (712): n equals a,t,g, or c
  SITE (714): n equals a,t,g, or c
  SITE (779): n equals a,t,g, or c
gcggccgcggagactggcaggcgggaccctcaagcagtgtgaggcggacccaggccattcggagacgccacaatgcaggcagcaaccccacccctccagcctctgtcatgggctcgccgcccagcagcctgcaggaagctcagcggggccgggctgcctcccactcccgggcgctgacgctgccctctgcgctgcatttcgcctcttcactgttgctcacccgggccggtgccaatgtgcatgaggcctgcacctttgatgacacttctgagggtgctgtgcactatttctacgatgagagcggtgtgcggcgttcctacacctttggcctggctggaggcggctacgagaaccctgtagggcagcaaggggagcagacagctaatggagcctgggaccgacactcgcattcctccagcttccactcggctgatgtccctgaggctacaggcggctgaacctgctgmasccraggcctgtggttctgcarggcatgmaggtgcsccgggtgsccctggagatcccggaggactycctgcacgaatcccagsgagtcaagtaactttaagccaggtgnatatgccggtgtcaagtcactggtcgctgccccaaggaatcgtgcgggagctgaaaagtcgaggaagtggcctacaaatccagagacacaggctatnaagacctagcaaggatgcaagggttgncagcattttgntnttcaacttctggctttgcttaattctggtctggaactaaatgaaccggaactttaaaaactttcna

SEQ ID NO: 360 - DNA, 467 bp, Homo sapiens
tctgtctcaaaaaaaaaaaaaaaaaaaaagatcaagtgctttggatagtaaatcagaaccacgaaaagtgttaattcctttgtatgttttctcccagttgcctaagagacctcctcagaatatctcctggtccctgactgcagggaggcaccatagcaagaaggaaattattgatttatgtccccaacatcagaaacgactgggaagctgcgcaggtctcctctgacctttctctttcaggtgtggagcagaggatcatgtggaagcagtgaaaaagctccagaactccaccaagatcctgcagaagaataacctgaatctgctcagagacctggctgtgcacattgcccatagcctcaggaacagtccagactggggaggtgtggkcatattacacaggaaggagggtgattcagagttcatgaatatcattgccaatgagattgggtcagaggagacctcctgtt

SEQ ID NO: 361 - DNA, 231 bp, Homo sapiens
  SITE (159): n equals a,t,g, or c
  SITE (196): n equals a,t,g, or c
cccccccgggggggggtcccgggaacccccccaacccggcccggttccccccggggggggggggggggggaaccaattttttggggaaaaaaaaggggaaagggggggaacccccccccgggccccaaaaccccccccaaaagsccaaagscytttggnaaaggggaaagggggggggaatttttcctttgggggnaaaacttttgggaaaatttgggggccgggcttttt

SEQ ID NO: 362 - DNA, 202 bp, Homo sapiens
  SITE (196): n equals a,t,g, or c
  SITE (198): n equals a,t,g, or c
acccacgcgtccgcaaaaaaaaaaattgttgttttggctgtagtgtcacaggcttatagtcccagctactcaggaggctgaggtgggagggtcgctggagcccaggtgaggtcaagcctgcagtgagccgtgatcacaccaccacactccagccttggtgacagtgagaccctgtccaaaaaaaaaaaaaaggggngncccc

SEQ ID NO: 363 - DNA, 435 bp, Homo sapiens
  SITE (147): n equals a,t,g, or c
  SITE (149): n equals a,t,g, or c
  SITE (422): n equals a,t,g, or c
actgacagtacggtcggattcccgggtcgacccacgcgtccgcggacgctggagcgtaaagtgaggctcgcctgcatagctaatcctgttaaagacaacttctcaaagcacaacgtgcttgtttcctatcgggctccctgcggggcnantctctcactacaagtcaagcttggggctctcaaagccctgcgcctgttaccacggatkccacarggcctgggcagttgctgtkgcgacaggaagagctaatcttcagagagctcagactctctaatgatgctgaaggagcaaaggctgagttcagaaccacacttaagagaaaaggattggccgggcgcggttgcttcacgcctgtaatcccagcaattttgggaggccgaagccggttggatcatgaggtccaggagatcgagaccatcctnggttaacaaggtg

SEQ ID NO: 364 - DNA, 436 bp, Homo sapiens
  SITE (410): n equals a,t,g, or c
  SITE (414): n equals a,t,g, or c
gaataatacttgacattttccaaaggcaaatctcattctgcaaggagattgtggcaccatcctgtttgactctcagaaacctcttgtaattctgatgtaaaaactgtagaatgaagatgagaaaattctcgcaatgagtggatcatgacaactgtaaattagaacaatcagatttaaaccaattccgcaatcttctatatctttgtaaaagacaaatccttgatgttgtctgtgtgcaaccttttcataaactctggttttatgactagtacaaaccaccaaaaaagccatgtgatcaatagtctgtgtcctgttataacatgctgtggttgagccatcttgtttataaataatagrgctctcctgratttgtggcatagacttcttggttcctggsttttgttttttgnatcnagagattgtgatattaaacagc

SEQ ID NO: 365 - DNA, 495 bp, Homo sapiens
  SITE (31): n equals a,t,g, or c
ctccgtgagacaagagatgctctcagggaanagacattggctttaggaagtgtacagctggacctaaggcaagcacagcatcgaataaaggaaatgaagcagatgcatccaaatggagaagctaaagaaagtcaatccattggaaagcagaactctttagaggagagaatacgtcaacaagaacttgaaaatctcttgcttgaacgacaactagaggatgctcgtaaggaaggygataataaagagatagtcattaatatccacagagactgtcttgagaatggaaaggaagatcttctagaagaaagaaataaggaattaatgaawgaatataattatttaaaagaaaaactgcttcagtrtgaaaaagaaaaagcagaaagagaagtaagtatgaagaaamctataamcttctggaaagaaawtttaaayattycattstggctatatgttgracctagtycaatatacaaataaatagatgaaaatgtgttt

SEQ ID NO: 366 - DNA, 496 bp, Homo sapiens
ccgtgaccgccttctgcaggttccararcttgagcktgccgtcctcggargcsgtgagcagarccgactggctgtgktggaaggccagggaacgaatgccgtcgtagtgcgagcgcagggtgaacttggggttccacgtcttcttaaaagcatctttgctgtcagacagatcgcagctgaggtcgttgtcgttggtgacggtgagatctgccaagtcccccaggctcacctccccgcccccgatagtgtccatgatgaagrcgtcttcatgtggccggggctggggtgtgccaggaggcgggccagtcacttttgggggcagcccatccacatcccgcaggtcagccagaatgccttggagtttgacccgacggctttccagctcatgggggctcccatccacagtgcaccgccgagggtctggagccccttccccatcctctcctgagcccaggaaatcaaactcattgatagcatcctcagagtcgtcttcctc

SEQ ID NO: 367 - DNA, 418 bp, Homo sapiens
  SITE (414): n equals a,t,g, or c
  SITE (416): n equals a,t,g, or c
  SITE (417): n equals a,t,g, or c
caagtccacggggagcatgttaaatgtccaaagaaacctatgtaaacctggtagatgttaattaactctgccagacaaaacagttgcaggattggataaatgaggaaatccatcatctaagaagttatatgcaagaacggaagggatgagaagtcattctcatacacaaaacttctcaattctcctgtgtctggatgaaggccatagacattttatgaatttaaagtgggagcaccaaaaatgtcattggagtgcttatttcttcaagcttggtgtgttataaatgtcatctagggacgatgccataccagtaggaagatatcatttacagcgtgttctagacactgaaaccatttcagtcacagataaatatcttcccaagggtttggtttgcaaaaaagacaccctacgtananna

SEQ ID NO: 368 - DNA, 978 bp, Homo sapiens
acccacgcgtccgcaagaaaagaataaatctctggagttggtgtcctttgaggaggtagctgtgcacttcacctgggaggagtggcaggacctggatgacgctcagaggaccctgtacagggacgtgatgctggagacctacagcagcctggtatcattggggcattkcattaccaaacctgagatgatcttcaagctagagcaaggagcagagccatggatagtagaagaaaccctaaacctgagactttcaggtggaagcaagaagcaagttttctcaggtatttgccacaggagcctggtggagctccaggaggtttgatctctcttgtgaactctggaactgtattcccaattgtcaattggacatccctacgtatgggacctcagatatttcaaacatgatgtgtccaagtctgtatcacttctggccatcatattgttcttttatttttccaaatttcacatcaccagtaacaaactagctgtgatcatggcagatagcctggaaataaaactcccctttttaccctttgcacagcaaattgacatcaaatcctgtttctactttttttttttaactattgcttccctattctgtattctcactgctccatcttctgatgtaggaggtcatctgttttcctcttttcctctcctctgactcttaagccctttcccattctctttctcaggaatggctgttaaaatgccaatatggtcttgtaactttcctgtacttagtgaacctccttatttacaccctgtttgtgaagtggctgtgttcaccctgggtggacacggaatgtttttggcatgtacaaagagaattttatgctgcctgtgtacagttattaatttgtaagtacactcagctttttgtatctgtaggtttaatatctgtgtatgtaagcaaacttggatgcaaaatatttgaaataaaatcagatgcttgcatctgtagtgaacataaaaaaa

SEQ ID NO: 369 - DNA, 1413 bp, Homo sapiens
  SITE (12): n equals a,t,g, or c
ttatttacctgnatgaaagcatttaggactcaaatctttctttagagaataaatctttagagaatatataataatagccatatccttttaattaataaaataacactttaaagacaggcatattaccattgtatatgacacctaatacacattgtcagataccacataaacatatttatcttccaataccaatgtttgttttattaaaacaataattaattaattaataggctcaatagtgaccctcaagttaatcccatgactttcccaggctctgcatgcataaagaaatcattgtgacagaaaaatatcaaccacatactgaagcatagcttgctagaacaaatcctgtacatatgaatgccagcaactggggacacatttagtattcacattttatgcaaacttacttggtcaattatttcttttttaagcacaggtttattttggaattcagataagaactgacacatcatagacagtcattgttaaggtaaccctgttatttcaattgcaaacaaacaataaacgttttttcttcaagacagttaccactttttaagatcttagtactaccctatgcaaaaacagttttttttaaaagcctgaacaggttaagatagataatagccaactatgttttctcaggtgaaactattccaaaagaactgtacatttcagtgatataaatcagatccagaaaggtggatctctgtttagttcttgaaatatataattcacaaaataagacccttgttgttctacagaggtcccctaaactgtcttttattctggtgtagtctctaaaacctcattaagagggaggggagaaaatttagtcttaccagaaatgctctgctttttagtagccatcagttttaggtcttctttatgtaactcagaagttcatctttttccatttggtaaccactttttttccactgttctcgcaactgttgtaatagagccccaatttcttttcctgaagaaatgcccacttttctgatgtcatggccacttacaggaaatggaggaatggaccactgctgcatttcctttaggagacagtgctctccttggtacttcagtagttcacatacacgagtagttgcatcaggttccctagactacgtgtcaaaatcaaacatttagtttcgtcacacatgaaaacatmcacttmcaatcttatcctaaaatttaaatactcaacataaattttttcatttaaaataagtaaaattcacagatttgtagatcttagttttaataaattaattctaaattcgtgacgatacttcatatttctgaccaagcctagcatatacttacatctataatgaagtcttgatagggtttcaatgggtctgaactatctgttgctttaattaaatctttcctatttttaactataaa

SEQ ID NO: 370 - DNA, 563 bp, Homo sapiens
ggcacagcctgaacgtaatactcatttctgtactttgttttgatgacatactattgagaaaaatttattgatacaaataaatagttaaatatgataactatcttattaatagtatagatctagcaatttcaggatactcttcaattaaactggatcacaacatgagaaaagagtaataggaaattttattctgcaacagaatcacaggcacctatagcctgcagtttttattattaatataaaatgtagcaaccagagtataataatcctcctaactatgcatgtacctttcacatttkattgcmaaactattaggctatwataagaacatgcatcaagcagggacaccaatatcttgcctggcatttaattatcaaaaacacctgtgctacaatagtatattcacgtgtataattctttatatgtagacatttaagtgcttgaattatttaaaaaatctactgtctggataaaacttccataaccaatgacaaatgtcaaagctgctcttaaatgagcacagcaaagtcaaatgatataaacaataactagcaaagtcaaca

SEQ ID NO: 371 - DNA, 343 bp, Homo sapiens
ggcacgagggacccgcgcccacgacctgcgcggcttcctcaacttcacgctggcgcgagcccgtcctccttcgccgccgcgcacaaccgcacgtgcaggtatcgggctttccgggaggacgatggacattattcccagacctactggaatcttcttgccatccgcctggccttcgtcattgtgtttgaggtagccgaggcacctgctggttctcccatccatggcatgaggccccgaccctgtgctttgcctaattcgagcacgtggtgaagggtcggtgccgtcattcctgctgtgtcatcttggtcaaatcagagctcttctctgcaactgcgttttccct

SEQ ID NO: 372 - DNA, 476 bp, Homo sapiens
  SITE (432): n equals a,t,g, or c
  SITE (455): n equals a,t,g, or c
  SITE (463): n equals a,t,g, or c
agctccacctcattctaaaataggtctagaaaaaaaaagaaagcgaaaaatggatgtaagcaagataactcgttataccgaggattgctttagtgattctaattgtgtacccaataaatcaaaaatgcaagaagtagactttctagaacaaaatgaagagctacaagcagtagactcacagaaatatgcattatcaaaagtgaagcctgaatcaactgatgaagacttagaatctgtggatgccttccaacatctaatttataacccagatragtgtggagaagagagttcacctgttcatactagcacttttctttcaaataccttaaaaaagaaatgtgaagagagtgattctgagtcacctgctactttcagtaccgaagagccatcattcyacccctgtacaaagtgcatgtgratttagggggaagnagcactccacagggtatgatgtntccattgnatggggatagtca

SEQ ID NO: 373 - DNA, 639 bp, Homo sapiens
cccatggtatgcttaaatctgctccctgaacttcctgccagtgcctccccgtaccccaaaacaatgtcaccatggttaccacctacccagaagactgttccctcctcccaagacccttgtctgcagtggtgctcctgcaggctgcccgttaagatggtggcggcacacgctccctcccgcagcaccacgccagctggtgcggacccccactctctgtcttccttcaacttcagacaaaggatttctcaacctttggtcagttaacttgaaaactcttgattttcagtgcaaatgacttttaaaagacactatattggagtctctttctcagacttcctcagcgcaggatgtaaatagcactaacgatcgactggaacaaagtgmscgctgtgtaaaactactgccttgccactcactgttgtatacatttcttatttacgattttcatytgttatatatatatataaatakaytgtatatatatgcaacattttatatttttcatggatatgtttttatcatttcaaaaaatgtgtatttcacatttcttggactttttttagctgttattcagtgatgcattttgtatactcacgtggtatttagtaataaaaatctatctatgtaaaaaaaaaaaaa

SEQ ID NO: 374 - DNA, 447 bp, Homo sapiens
  SITE (411): n equals a,t,g, or c
tcgacccacgcgtccgcccacgctccggcctgattgtaggctactactcatcaattaacttctacagtggagactacttctgggactggaatatraaaaagaatcaaaggttctgattttgagttgcaataaagggaaagaccatgctcatagcagtgccaacatctgaagtgtggagccttacccatttcatcacctacaacggaagtagttaactggaagagattaccaagagaataaaaagagactcattcagtggaagcaactttgtctcagcttatttcacataaagagagcgagtcttttgggatgaatgttaattaaactccckggtaactagaacagggackggcaaactagccctatctggaccaccggtttttgtaacactttaaggtgggtttgggttgnccttttttaaaagggttgaaggggggaaaaggatta

SEQ ID NO: 375 - DNA, 443 bp, Homo sapiens
cactttcttctctcaggaagctgttaaatactgtgagaagaggtcaaggtggctgtgggtagtagaagcccctagctagtgaagctaagctcctggagaattaaaacctaagtgggtctgggccgtttcccattgggacatgtcttccactgggctttgataggagctcagttacctggaatagcagaggcatctgggccaacctgaatgtttttgagttgtatctgcatcattggcaagccagttctatatccaatacccatctttctgtctttgttctctaagtgaagcattttaccactaaatcaaattacttaactagataacagatatcatggtcattttatcagatatcagtatastttgcactgaagttcattgttgcaatagacattccaatttctattttaccgctattattagagagacatattgacaaatag

SEQ ID NO: 376 - DNA, 523 bp, Homo sapiens
  SITE (523): n equals a,t,g, or c
ggtacgacggaggtcagaaggtctttacccctggcagtttagggaaacttggcatggagcttgtgcaagggattcatgcatcaaggaggggtgggattgggctagagggcttggctggcctcttccattcccagaattctctgattctgggttccaggagggcctgtgctcttttttctaaagaaagactacctagaggaatacgccacactgtatagcaactttatgtgattgctgaggcctccccagccacctgtgatctgtgaactggcctcttgttcttgcatcttttaaataagttaatgtccatgctcttaattttggttttggatgagttattatttctagatacttaaagcaattaggccttatagtgccagtattggttaagaatagtacatcaccaaggcaggagaatcacttaaggscaggagtttgaggctgcagtgagctatgctcatgccaccatactccagcctgggtgacagagtgagaccctgtctctcaaaaaaaaaaaaaaaan

SEQ ID NO: 377 - DNA, 680 bp, Homo sapiens
  SITE (334): n equals a,t,g, or c
ctggacggctgccgctgactgtaacatgtaaagcaggcactgagcaccacctgcctggcagtccagggcatggagaggcctggtacatggggctgaaggcacagacagcaccctgcttgtgacttcactggcccaactcatcctggaccccttgagcamgaccrtggctggattccaggaactggtggagtggaagtggatccaggaaaatgccgtgtgaagggaggactcagatgcactccctgtggtctgggctcaaccagccaaaagagcaacaaagactccagaacccactctacctcctcaatcccttggccatctgtggagccccagngcctgcggctgtggcaaggcctgtttctgcgctggacctgctcacctgagcctgcagaagctgcatgggggaagagtgtggcaaatagtgacaggaagggagaagacagaagcctctcagccaactgcttcagccgagcccctattctaagcactggctccttggatagcagctgagatgttcctgaaacctctgcaggccccttaggacctttacaccttggatgagggtgcctgcaacccaggttagccaaaagtactgagggtcttaagtttgaagtgtccaaagtatagggaggtctcaataataaaagtctccatgatcagcaaaaaaaaaaaaaaaaaaa

SEQ ID NO: 378 - DNA, 506 bp, Homo sapiens
  SITE (17): n equals a,t,g, or c
  SITE (22): n equals a,t,g, or c
  SITE (60): n equals a,t,g, or c
  SITE (459): n equals a,t,g, or c
ggatggccttttgaacncctanccggatatttggatgatattgggggaattattgtgaanttttagtgtagtaatgatattgtggtttgtataaatatatttagggataatatgatgccctcagatttgctttaaaataacacaggatgaggataagtggtaggactgcaagggaaacaagactggccatgagctgataactgttgaaggtgggtactgggtatataagggctcaccacaccattctcttgatttgtgtctatttcccataataaaaagtttaaagagagagaaccgatgaaggggagggagagagtcaagcacacaataagagtgacaaacagtgccaaatcagcccacagtattaagttttcacatatttacataaatatcacctggaatgcaatattgaaattaatgtatatmactagaataaaaaaagtaaagatttaataaatntgttttgaaataaaataagttgaaatacgaaaaagacagaaaaggtg

SEQ ID NO: 379 - DNA, 787 bp, Homo sapiens
  SITE (634): n equals a,t,g, or c
  SITE (687): n equals a,t,g, or c
  SITE (714): n equals a,t,g, or c
tcgacccacgcgtccgggagccaaagtgcctgtggcctgcggaatagggagcttgtggaatttctgaattttaatcagaaaagcaatctcttctcttagcccagaggttgtcccaaggaacacaagaaatgttccatctgattcaggaatttgcagaaagggaaggtttcgtttccctctaatgtgtggcggttagaaaattctgggccattatggcacctttggaaacaccccagtcaaaatcaccattccatggataggggcacagcactttgcaatcacttgctgttgaatccctttcagatgctactgatgggacttccagaaccacagccagctttcttaaagcaatgactcagtgcagttctcatagagttgatggaaatgccaatgagctgatgaaagttatctcccgtctataaataccttcagctttttaacacccgcttgctttagacactcaggagggacatgggctcactgtgcaagacgatttgcactgcccttgcttttcccagctttccaatctgctttttccagaaaagtctcactgatgtcatcaacagtgcccttaccccttaaaaaaattcacctcctagagggcttcatagatgactttaaaacatttttaganaaatacctggggaaggaaaagttactggggatgtacttcttcgtttactgtanctcaaatcttaacccaggcatttttgnaatcttggcacttatgggtccatttttgggacctgggtagttctttcgtcgtggggggactctcctgcatatt

SEQ ID NO: 380 - DNA, 366 bp, Homo sapiens
  SITE (336): n equals a,t,g, or c
  SITE (350): n equals a,t,g, or c
  SITE (355): n equals a,t,g, or c
gggtcgacccacgcgtccgtgaactcctaacctcaagtgatctgcccaccttggcttcccaaagtgctgggattacaagtgtgagccaccgttcccggccttagtacagtatgttaaattttgtgtgtgtgtgaatcaaattattttcaagtctgcaaaaaactgtatctccacaaagaggcttaaattgctgacaaatttctggggtgataaggcagcatatttaattaaataaaagtaatgtctccaaatataaagccttcagttaaatatatcttttgggaattacaaagaattaaaccacttgaatttatgaatataaattatattactttnaatatgtggaagtnaaganaatggatagtt

SEQ ID NO: 381 - DNA, 740 bp, Homo sapiens
acccacgcgtccggctagataaacctgtcagcggagaggtttggggggatgtttttttcctggctcaccgtccgtttgccagatccgtgccttctggtctacaggtttgattgacccgttgcgtggtgactcatgcttctgcttttcatagctcgcaggccagcgttgcttttcagaatttatacacaaacaagaactaacactcggagctttcgcctctttgtagagcttacccgtagagaaaggaaagaccacccggatccaccctaggacctcattttgtacagcttgaaattatgggaaggggttgggccggggggtaaaggtgtggagaaagtggaaggagaaagtgcttaattaagattgtctttgccttggatgtgccttgtgtctttggcttcttctgggcacattgttctgacataaaggttgcctccttgtgggggagaaggggaggatwagtttgttggcttgggcatttgatcataaattatggaggtgctggaccggagaaccacccaccagcccacggaggctaccgggcattcaggataagggccgccttcttcttcagaataaccatacccactccctctgaaacaaagtggagagtcttaggtctgagtggaaactctaaatcttttaattcttgggttcaactttcttcatctgttttcctgggttcagactaaaaccatctaactcagctgggagaagttataaccgctttgttgttgggc

SEQ ID NO: 382 - DNA, 438 bp, Homo sapiens
  SITE (418): n equals a,t,g, or c
ggccaggaaaattagaattgcyttgcatatcyggggtagcataaccmgttttatcagtggctagattatatcagatgacaaaaataacatgagacttcagaagtcctgataaataaagtgatgatacctattagaagtgggtgcaatctatagccatcaaaatgtgatgcattcatattcaggcatggtccyytagcattcgagtgataggcacttttatttgagtctttgaatgaaagataggcttttaaagtggattaaaggatagcagtttttacttgataagttgggacccatggtaacagcaagcatcccacttataactggtgtccattcagggaaaaacagatgtaaccattatgtgactcaatacaaagaagaagattacactkgtaaaaaatactaagtgaaaaaaganaaactagtaaaaaatactta

SEQ ID NO: 383 - DNA, 316 bp, Homo sapiens
  SITE (270): n equals a,t,g, or c
  SITE (276): n equals a,t,g, or c
  SITE (316): n equals a,t,g, or c
acccacgcgtccgcccacgcgtccgcccacgctccggtcccatctctactaaaaatacaaaaaattagccgggcgtggtggcgagcgtctgtaatcccagctgctcgggaggctgaggcaggagaatggcgtgaacctgggaggcggacttgcagtgagccgagatcgcgccactgcactccagcctggggcgacagagcgagactccgtctcagaagaaaaaaaaaaaaagakttcctttccttgaagtttagtctagtcaaggacagngatatnaaactataaattggcaataaaatatggttaatttaccatn

SEQ ID NO: 384 - DNA, 578 bp, Homo sapiens
  SITE (433): n equals a,t,g, or c
  SITE (530): n equals a,t,g, or c
  SITE (532): n equals a,t,g, or c
  SITE (567): n equals a,t,g, or c
  SITE (571): n equals a,t,g, or c
cccacgcgtccgggtgagtaaatggtagcagaactcagataagagtgggatgcagcagtcaggaatgacacccattcttttaaaccaagaccctgagtggggaaggcaagtcaaccaacactgactgtaggatcaactcaaaagctggtctttacatgggaacacattctggttactctaatggctttaagtcttagcaaccattactccgacatatactgcgtttttgactgtgactataactgccagcccatatctaaggtgcatttgcataccataccttttcctttttgatgtagccgtgataaccatcagcatgctttgctcaagtacttcatattcagtaggacttaccagataagaaactcaggagctgctcctctctgagccaatgagaaactcagttgctgctcctcccaggggcacttatctntagttgagttagcctttaatcagattgccattataactgggctctgttctgaaagaaagacctgataaatcttgttgatgatgccaagtaagtatgncnatttgcagatttcaaagatattgctaagaaatcanggcngggtgca

SEQ ID NO: 385 - DNA, 460 bp, Homo sapiens
  SITE (436): n equals a,t,g, or c
  SITE (443): n equals a,t,g, or c
  SITE (451): n equals a,t,g, or c
  SITE (452): n equals a,t,g, or c
cccacgcgtccgggcgggaggagcgcggacccaagatcggctacgctgcgtctgctcaggctgcgagttcccggctctggggactcaccttgcggacttacccaggcggactctccgcagcccctgatgggtgtgtgtgtcagaccgtttactaaacaccaggactgttgtaggcgactcagccgtgttgaaccatgaaaggacctcaggaatgaaacccacacacagcaaagcaacaaagtgaaagaagcgtggattcctaatgcaggaggcactgaaccaatcaatacccactgccctccagacctccacatgaaagaaaaaaactgctgtcctgtgaagaagacactccccagatgccagcaacttgatattggacttcctgcctttagaaacgtgagaaataaattttttaaaaaaaaaaaaaaaaaagggnggccgcnctaggggnnccaagtta

SEQ ID NO: 386 - DNA, 432 bp, Homo sapiens
  SITE (420): n equals a,t,g, or c
  SITE (421): n equals a,t,g, or c
agatttttaagtacgaagaatttgccagtatttaaaagacatgagatttcccaatctggatttccaacttttcttgagaagtcataatatctggcactagtaggtctacagtcccatatgttggcagctggagccgaagagcaccactccctgtaggtgggtcattctctctctcctaccataatccccaccgcttcctgtctcagcggacctacttaagttgttcactttacttgcctggtctctgaaggcatttgcagtttgcctcttctgctttaatctcatcctgacaggaggggtcgttgatttcaactgggattgagagactgtgaaggaactcggttacaaatccataacaaatgactgggaaaagccacacaactcttacatactggatatttakaaagtggcttttgtacnnccaggatgcca

SEQ ID NO: 387 - DNA, 437 bp, Homo sapiens
  SITE (373): n equals a,t,g, or c
  SITE (403): n equals a,t,g, or c
  SITE (410): n equals a,t,g, or c
  SITE (413): n equals a,t,g, or c
tcccgggtcgacccacgcgtccgagatcatgccactgcaccccagcctgggcgacagagtgaaaktctgtctaaaagaaaagaaaagaaaaaagagtctagaacggccgggctcagtggctcacacctgtactcccaacactctgggaggccgaggtaggcagatggcttgagcccaggtgtttgagaccagcctgggtaacatagtgaaaccctgtctatacaaaaaattagctgggcatagtggtatgtgcctgtagtcccagctacttaggaggctgaggtgggaggatcacctgagcccagggaggtcgaggttgcagtgagccatggtcgtgctcactgcactccaacatgagcaacagagtaaagantcttattcttaaaaaaaaaaaaaaaaaaantttggancanggggctttaaatggcctggtccat

SEQ ID NO: 388 - DNA, 514 bp, Homo sapiens
gcatccactaggggttttggaatggatcccctgtgagtaaaggggaactacgaggtaaccttttcctgaaagctgtgaaatcagtctgccaagataaataattataactgataataggcttatcagtgtgaccacagtaaataattccattattatatacatcataccacagcgtarttgctcacttacctgtctcttaagggaacctgcatctaattatcttttaayttttagggctgacatatacttgacctataattgttgaattagccaactcacaccaaactgttttctctttccccgagttcatctggactgtgacataccacagaaatgtgttctgagtttttcttaccaatctaaggcctcacacaggratgaaagtaatttgaaataattatcmggaacattmttgtactttatcacattttatgaaaatacttcagrttcctcaaacagtaatatattgatcygtacacattatcmaaaccmtcttagaaatacaaaattgcaa

SEQ ID NO: 389 - DNA, 591 bp, Homo sapiens
ggcacgagcccagcccggggctgccgctcgccttcccccggagtctcctggacccccggagtctcctggacccccggagcgggaggcagcggccgcgcggcgctggactggagcagaaccccaggactgcgcccccgggagcgggcgcccagagaagcctccccagctttctgaggatgatatctggctaaaaagcgagggagacaactatagtgccaccctcctggagcctgctgccagctctctttccccagatcacaaaaacatggaaattgaggtgtctgttgcagaatgtaaaagtgttcctggaatcacctctaccccacatcccatggaccatccctccgctttctattcacccccgcataatggcctccttactgatcaccacgaatccctggataatgatgttgccagagagatccgctatctagatgaggtgctagaggccaactgctgtgattctgctgtggatggaacgtacaatggaacatcctccccagagcctggtgcagtggttctggtgggcggcctaagccccctgtccacgaggcgacccagccagaacccactgaaagaacagctagccgg

SEQ ID NO: 390 - DNA, 810 bp, Homo sapiens
  SITE (765): n equals a,t,g, or c
  SITE (772): n equals a,t,g, or c
  SITE (807): n equals a,t,g, or c
catctgtgtctttagaagtagtgtcacctctagtaaaagagggccagtagaattgagtggtggcagcctgtgatgtatatgaattttggctgtacgtctctagcgactattttctccaactctatttagtaaaattctacctaatttcagctattgtgcttccaaagtccatgtttgttgaatatgatatggtaaaaaysaryayctatttggagacagtggaggggatggtagtaattgagagacagtgtcagatggagcagtgactttacaatttttttgactgcaatccacaattagacatttcacawtgcwcccccatgacaacatccctatcgacccctgcccaaaaacaagttatttaccaatcttgctataagcaatgatgactgattttttcttttttctactttatttaaaaagaaaattatagtctcaactctttatattaattttacacacattaattctacagattgttttagcacttagaactaaaagtgttcaagatttgattttgttaccttctctgtgtaagctaaagttgctgacttttctgagtttccattttattgattaaaactgggatagtaatagtattttacaccattttataactttattagaatgacataatctgagtgaagtggttgtgccaggcacttactaaacacacagtcaatgagtatgttctctcccgaagtttgttagcttagggaattgggaggatgccactgataataatggtgactcttattcagaggnaaactanttcagttttagacatgctagagtttgaggtagccnaaa

SEQ ID NO: 391 - DNA, 489 bp, Homo sapiens
ttcggcacgagagctttcctaggagaatgatttgtgatggagttttacccagagcaggaataggtacggctgtgagtcacaaggtggtaggactctttatttgcttttttgcccaaatgtcatggaggacacagagcagagaacctggaaaaatgtgccattgggagaacgtgatgcaccattttaggccagaatgacgcatggaagcgtaaagtaaaaaattgcggagacaccaaaatgcatctgtgtggattgttaacaaaaaagcatgaaaatgtttgatactggttgttatagggaatcattcaaaatttcttatgcgtgtattaaatctgaaatggcaaaattaaaagccactttatcaagagaaggtcctggtattttcatatcttttcaaaaactaggaattctaatacaaagtgccaattacctgacacacttatttgataagcagaggatggacgtgtccattctcagacataggcaagc

SEQ ID NO: 392 - DNA, 522 bp, Homo sapiens
  SITE (20): n equals a,t,g, or c
  SITE (55): n equals a,t,g, or c
  SITE (60): n equals a,t,g, or c
  SITE (514): n equals a,t,g, or c
ccgggaagggcgggaaaccncccaacacgccctttgcccacctttcccctttaanttccnggagatatttattggagtgtcctactgtgtgcccaggcacctatatcctatgtgccatagaaaaaccccggaaggcccatacaacaatatatatagagtgatcgtctctgccttgctgagcctaacaggggtgtcaagcttccattttggtatctacttctaaatacactcagaacaggagaaatttggactaattttcaaactacagacactttctaatcatgatgcatttcaaaagtggactcgaattaactgagttgcaaaacatgacagtscccgaggatgataacattagcaatgactccaatgatttcaccgaagtagaaaatggtcagataaatagcaagtttatttctgatcgtgaaagtagaagaagtctcacaaacagccatttgggaaaaaaaggaagtgtgatggagtatgattccaggttacaacctccttagggcatgtntggttttt

SEQ ID NO: 393 - DNA, 334 bp, Homo sapiens
  SITE (36): n equals a,t,g, or c
  SITE (323): n equals a,t,g, or c
  SITE (327): n equals a,t,g, or c
tgtaaaaaagatgcaaaatggagacagaggttatantggtgcttcttaacccagtgaaggcacaacttaatgtcgtctaggaacattggtttagggtcagtctgtattttcagggatagaactaaagaaccagatgatcaatagctaagccagccttagcctgtcacatgttatacaccttcattgaatcatagatgggcattagatctcatttatttattaaacttctctatgcttttggaagaggtaagattggaactaaataaatcttagggcattattgccagattaaatgcttaattggctgtatatacaggcctttnaaanctttgag

SEQ ID NO: 394 - DNA, 148 bp, Homo sapiens
  SITE (95): n equals a,t,g, or c
ctcggcataaacaaggcaagattctaaaagtggccgcccctggaagcagaaattattcttgtggctatccattggctcctgaaggctctaatcanagatggggcacctttagtaccaggggagtgaactgttgcccgtaaggtactgg

SEQ ID NO: 395 - DNA, 259 bp, Homo sapiens
  SITE (187): n equals a,t,g, or c
  SITE (228): n equals a,t,g, or c
ggcagaggttccctgaaracgtggtgacttggccgaratggagcagtgaaggtggagggaaatgcgtggttcgggaataggcttctaaaggcaggacctgtraaacttgctgatgggttggggatgggaaggcgtgaaagggaaaaaaaaaatcggacccaacttcactgtgcccaaaaggaaaaanttatgctgagcgcggaatcatggcaagaaactacctttgcnttactttttttttttttttttttttaaaaaa

SEQ ID NO: 396 - DNA, 114 bp, Homo sapiens
  SITE (105): n equals a,t,g, or c
ccgcccagccaactctaaagtttttaagtaggtctgtggtgctgcaggttatggtaaaggagaaagggggcaaggggaggaaaataaagaagctataagcaaganctggaagag

SEQ ID NO: 397 - DNA, 330 bp, Homo sapiens
  SITE (181): n equals a,t,g, or c
  SITE (208): n equals a,t,g, or c
  SITE (278): n equals a,t,g, or c
aaggtgtccaagctatagaggcaaggcactattctaaacagtggtgatattaaagagaccataacaggcacaaagtcgtgttttcatggagcttatgttttcgggaggaagcaagataaatgtaattagtaggtaaatcatatggtatattagaaaggtaataagcacgtggagaaaaggnaaatctaggaaagggagatggggaatntggtttccattagaaataaggtaatcagcataggccacaaaacaaagacgacatttaaacatgtccatgnaggaaagaaagcccaaagatcacactggaaagagctgaagcataaggggagc

SEQ ID NO: 398 - DNA, 353 bp, Homo sapiens
  SITE (308): n equals a,t,g, or c
  SITE (330): n equals a,t,g, or c
  SITE (348): n equals a,t,g, or c
ggcacgagaaacagctaagcagcataggaaatgtgtgcattgaacagtgcaaaggaatgtgcaccaaaacacaagcattgagcaagaaagatagggaagatgtagtaataaaaggatcattattagttgaatagcagaaaaacatttagagttgggttttttgttattggctggaaaatactacctaatgtaatttattactgtatttttatgtcatacatttttgacagttcctgtcatgtttttgggaagttagtgtcactgtctactcttaccccaccatatacacacacacacacacacaaatnccatcaccacacattcatgggnagctggtggggaatatgnccttt

SEQ ID NO: 399 - DNA, 257 bp, Homo sapiens
  SITE (29): n equals a,t,g, or c
  SITE (197): n equals a,t,g, or c
acaagtctctcttctgaccacctattttntggaaaatagctgaataaagtaaaacttcattaaccacgcctttcctccgacagaaataaaactcttgtttttaaagttccttacaatatgtgaacatttttaactgctctagatttatcaaagatttagaacccaaacttaaaaggggggggcccggtacccaattngccctatagtgagtcgtattacaattcactggccgtggttttacaacgtcgtgatggggg

SEQ ID NO: 400 - DNA, 475 bp, Homo sapiens
  SITE (466): n equals a,t,g, or c
cggacgcgtgggcggacgcgtgggtcgacccacgcgtccgacggctgcgagacgacagaagggggaggggactcgccgccrtctcaggtctcttggctttgccagggcccaccggagaaaactgacgacccgtttctgtaatccttatgggagaccaaccttgtgcctccgggagatccactctcccacctggaaacgcacgggaagccaagcctccaaaaaagcgctgcctcctcgctccgcgttgggattatccggaaggaactcccaacggaggtagtaccactctaccctccgcacctcctcctgcatcagccggcctgaarttcgcaccctcctcctccggaraartttaraaaatwaatttcttcccacccttaaaccakytttgagtgattgcagtatgactccatttccctggttgcattccatataataattcacttggttgaaaaacatgaaaaantatttacaa

SEQ ID NO: 401 - DNA, 505 bp, Homo sapiens
  SITE (452): n equals a,t,g, or c
  SITE (467): n equals a,t,g, or c
  SITE (499): n equals a,t,g, or c
ataattgttcttttcggaggctaagcttccaaatgaggaatctgctgcattttactaaagtgccttgctaagtggtaactgtggtggcaaaatgatgtatatgctctcaattatatatacctggcacacttgaactaccatgttaggaatatattaaggttgccattaataaaaatttctaacctttgaagtagaattgaaatttaattttatttactccatgtgcacattttcctcgtttagtcagttacttagattcattgaggagagatgtatttgataatgttctcacgttaaacataaaraaaaagtaaatttgaaatctagcttatagatttggactttattaactcagtcaaaacataaaatgaattgctgggaattcacatgggtgggaaaagtatcttaggaaataaggatagtagggcatttggggagcgaggttaaagganatatttaaaattttncatgttgggtttgggcctccttgttgggcccntttaat

SEQ ID NO: 402 - DNA, 399 bp, Homo sapiens
  SITE (383): n equals a,t,g, or c
ggcacagctgaagaacgagcaggagcttgaatttcagttttcttatgaggaattttccagaaaagatatcttcactgtgaaataactaaataaatgcccactcagtacaacaaaaatacctgctacatgcttccttctgtatgaatacatgagacctaccttcattcatgtttcctctatgaagctttccctgcactccaaacacagagctgagacttccacctaatgtagaaagctagcacgagccggcgctgacagatggaagactkgagatgttacaagattatatatggaaacacaaaaggagtggagttgctgggtcatatggcaattcatttgaggaactgagaagcttattccatggaggctgaactgttttatantcccaccagcaacgta

SEQ ID NO: 403 - DNA, 192 bp, Homo sapiens
ttttatttataggtwaattatttgagtgggtaatgcattcacatggttttaaaatataaaaatacactgaagagtatgcctcctgctccttcctcctactcctctaccccacccttgattgcatatatagtgcctttttttctttctttctttgagatggagttttgctcttgttgcccaggctgggagacc

SEQ ID NO: 404 - DNA, 249 bp, Homo sapiens
  SITE (223): n equals a,t,g, or c
  SITE (236): n equals a,t,g, or c
ggcacagggttttatatactgatcacatttggggatttttatatttttctctagattgaaaatagccttattgtttcattcttattatataattaggatgtgtttattctcagagtttccagagactgcagagtagtatgaagaagaatgtaaaaatcatttatgatcttgctatccagagataatcattgttaccatttaataagctatgcctttcaatttnttcctctgttcantcattatatgtgg

SEQ ID NO: 405 - DNA, 225 bp, Homo sapiens
  SITE (118): n equals a,t,g, or c
  SITE (196): n equals a,t,g, or c
ggcacagcacattttcaagttatttagtagtcaaagataaatcatgggttacagacaagattattttttgagtatctgtgtatgtttcctcccttgcagttagaactatatgttgtgnaatagtgtgcagagaatgcgctttaaaatattcagaacatttcaaaatgtcaattttgcaaagcaaaaaaatttgtanttttggaaaaagctggcatgggatgcatc

SEQ ID NO: 406 - DNA, 316 bp, Homo sapiens
  SITE (284): n equals a,t,g, or c
  SITE (290): n equals a,t,g, or c
  SITE (302): n equals a,t,g, or c
ggcacagcgatcacagcacttcgggaggctgaagcaagcagatcacttgaggtcaggagtttgagaccagcctggccaacatggtgaaacctgtctctactaaaaatacaaaaagtagccagccgtgatgacaggcacctgtraatcccagctactcgggaggctgaggcatgagaattgcttgaacccgggaggcggaagttgcagtgagcctggatcatgccactgcactccaacctggggcagcagagcaagactctgtctccaaaagggggaaaaaaaanattgcngatgtggacccnggaagggaactcat

SEQ ID NO: 407 - DNA, 570 bp, Homo sapiens
  SITE (480): n equals a,t,g, or c
gatggacgcagaaaataaagagcttgagaagaagctggcaaaccaagaagaatgtcttaagcacagcaatcttaagtttaaagagaaatctgcagaatatacagcattggccagacaactggaagctgctttagaagaaggaagacaaaaggttgctgaagaaatagagaaaatgtcatctagagagagtgctttacaaattaaaatattagatctggaaactgagcttagaaagaaaaatgaagagcaaaatcaacttgtttgcaaaatgaacagtgatccagagactccatgaaatctatttttttaattcccaagtgtctaaaagttgaaaacctaaaagattcaagrgttaaatgatttttggcatgcacaatttgattttattgccatcaaaagtttcatgacaacttagtcrgaacaaaacgtcgatcacctttaatttagcacaggccttccatttatttctaaacttttttntaactcaccatttgactttctgatattgtaaaatgtgtgtgctgtttttttgtgtaattgaagcctctggaaaaaataaatgaggtgggg

SEQ ID NO: 408 - DNA, 430 bp, Homo sapiens
  SITE (317): n equals a,t,g, or c
  SITE (408): n equals a,t,g, or c
  SITE (430): n equals a,t,g, or c
tttacgatcattatgcggcgaattgggtacgggcccccctcgagttttttttttttttttttcataattgccagcttagaactggccttgggagaagagacttctcctattttgtcagctgatgacttggaatgttgctgagattcttttgaactttcatatttactttgcttcctaggactgtagctctttctttcatctgaaacttgtgctgtttttactaggaagaaagaaaagattatggttgttgtttttggaaaatgataatctatatcaacttttctttcatttttcaactgagtaatcttagcacagantataccctgaaggccaaagtcctaaagtgtccagaccatctgtttatagtaaatctataaatacatttacttattggactaagatctctanactagccgatgatttgctttcn

SEQ ID NO: 409 - DNA, 313 bp, Homo sapiens
  SITE (292): n equals a,t,g, or c
  SITE (295): n equals a,t,g, or c
  SITE (296): n equals a,t,g, or c
gtgatccatgtcagaagtacttccagctgactcaggtgttgacacttggcagtgtttatggccagcagcggaactacagacgtcacaaatcggaacagcccagccacaccaccaaacacccttaacctccgatcctcccacaatgaactgttgaacgctgaaataaaacacacmgaaaccaagaacagcacacctcccraatgcaggaaaaaatatgcactaactaacatccaggcgggggtgtgtggactccaaggagggcatcctgaggcttacggagctcagattgtanttnnttgattaacacgttagc

SEQ ID NO: 410 - DNA, 624 bp, Homo sapiens
  SITE (52): n equals a,t,g, or c
tcggctcactgcagcctccgtctcccgggttcaagagatcttcctgcctcangctcccaaattgctggggattacaggcgtgacactgcgctcagcctcattctttttttttctattgcatattgttctagtgtatcaatgtaccttagtttacttaatcagcccagtatttaatgggtgctggggcctgtgttttcataaataaccttgtgtatgtggtcttttagttctgcgtatatctctgttccataaactcccagaagcaaaattgccgagcaaaaggatagactaatatggaatgttcacagattattgcccatttacactccaccaggaatgtccttgtttcttagccttgccaactgatggtattagtgaacttttggatatttgctcatctgataggtggaaaatgggaacttcttattaaaagcctccttcagctggatccatgttgcatcagcggaaaagaaggtcccacgtgtttgggagcttctttccactggccctgtgcctcgccttggttcaggtccctccagggttctcacccagcatggaaagagcaccagcattgggtggtgttacagactgggcttggagcagacctagtttcgagtcctgttc

SEQ ID NO: 411 - DNA, 585 bp, Homo sapiens
  SITE (174): n equals a,t,g, or c
  SITE (293): n equals a,t,g, or c
ggcacagtttgtctaagaaaaaaggactacttgacaggaactggccaagattcttcacatttggtccttgtgacctttaagaaggcagttaccatgacgagaaaagtcactattccaggcattctggttcctgatctgatagcatttaatcttaaagcccacgtagyaggtggncttccaacacttgtaatataattttgatctactctgtcattccatcttcagtcccaaacatccagcaaattcgattagagaacactgaaagaccaaaagggatatgtttcttgacaganccaactattactaattttggtaggaaaacaaaaactcactgatacaacatttcttccttcttcaaagtctgatcagtatgccattagcttgattgttagagaaataatgttggaagaagaaccttcaataacatcaggtgaaagccagactacctactctactttcagtgctccgttaaataaagcaaatagaaaaaagttaattgaaagtctttccccagatttttgtcaccaaaacaaagggctgttgctgacagttaataccagtagtcagaatggaaggcctggaaga

SEQ ID NO: 412 - DNA, 409 bp, Homo sapiens
aagtacttgattttatgggcacatttttgtgggatgattggagttaatcaaataaagcttgtcatgtgtgtagtttggtaagataacttctttaaattcatgttttctctgccttgaggtagtgagggaaagatcttaatcagtattttggtaattaactgattgaattcaagcaaatgagacatcatgaacttcagtggttattgatatttcagggtatatacctgaaatgcctagaggatacagatttctcatttcattctttggtctttcatttctctatatacagaaatgaaatgacacttctgggaggcagtagaagcaggaagkcaatgmattgagtagagggkcccattycctcaggcygtcatgatcagtgacaatttataaaaacatactgcaaagtctg

SEQ ID NO: 413 - DNA, 341 bp, Homo sapiens
  SITE (321): n equals a,t,g, or c
  SITE (337): n equals a,t,g, or c
ggcacaggggtaggagttaatggaattttaggagtcacacataaaagtcttcatgtgtaagaactgcactttgactccatccattcacttattcaacagatatataccaacagcctaatgtgtgacagggatcatgctgcaccttggaaataaaatagtgagcaaaacacagtcctgccctccagcactcatagttttgggggcagagacccttacaaccacgatacaacctgatggatctctttccaaagttcacagagccaaattcctttttatttttttatttttgttytttaccttatctgtgggacagagagccantttccaaagaggggantggc

SEQ ID NO: 414 - DNA, 595 bp, Homo sapiens
  SITE (581): n equals a,t,g, or c
  SITE (588): n equals a,t,g, or c
  SITE (595): n equals a,t,g, or c
actatgtatgagtaggcagccggtaacacaatgtctcccttgtgcaaagtaactctcttagtgagtgctcagatatgtgaggaaaaagtatttggtggagtgtgacaatatgaaccgctttgaccgaccagacagaaatgttcggcagcctcaggaaggtttttggaaaaggccaccccagaggtggagtggacaggagcattaccacctcagccaccctgaccactatcatcaccatggaaaaagtgacttgagcagaggctctccctatagagaatctcctttgggtcattttgaaagctatggagggatgccctttttccaggctcagaagatgtttgttgatgtaccagaaaatacagtgatactggatgagatgacccttcggcacatggttcaggattgcactgctgtaaaaactcagttactcaaactgaaacgtctcctgcatcagcatgakggaagtggttcattgcatgatattcaactgtcattgccatccagtccagaaccagaagatggtgataaagtatataaggtatgactatgtagtccaggctggattttccaaaatccttttnaaatacnaaaatan

SEQ ID NO: 415 - DNA, 421 bp, Homo sapiens
aaagtagactatgctaggcaacaatttctcttgataatctcacaatagccttggcatttgaagaaactttggcctagaaacatttatgcccccaagatcacacaactagaaagaagcagaagttgatttatctcctaaatctatgtgacttcaaagctggtcatcctaccactatgcctggttgcctatatcatttaatgtgatgaaggcactaaatgtgacmcccacaccgggctcaatttattagtaatccttctatatcacagcccacacaagtgcttagagtycckggctgagatcagtctatatrattatattacacttctcaagtttagtagtgctagacaaataggaagggagttttacattctttgtttatttgcaataatttcatgattgtcgtaattaaactatagcccga

SEQ ID NO: 416 - DNA, 315 bp, Homo sapiens
  SITE (297): n equals a,t,g, or c
  SITE (303): n equals a,t,g, or c
tttttttatcactcttatcagagtttctcagttgttttactctttataaataacctttgatttttaatcttttctattttgtgtttattacataattttattactttctgctctttgttacccctctcctttctttsatgttgctgttcttttttcttacttcttgaaatagaagcatggctcaaattttcacctaatgcatgcattcttcaatgttataaatttttccctatgtcttagctttagtatacgttttgatatacatagtactattatttaggttcaaattattttccntggggnttttctgaggac

SEQ ID NO: 417 - DNA, 499 bp, Homo sapiens
  SITE (27): n equals a,t,g, or c
  SITE (492): n equals a,t,g, or c
  SITE (499): n equals a,t,g, or c
gaatcctgaatgagaaacctgtttttnttctccaaaaatttgaaaaatatcttgaagagagtcttgctttagagaacaaattggaaggagcaccctgatttgcttttgtggccgtatccaagaggaattgagtgcaggtggggtgcagggaaaacacagtccactccccaccaccactccgctccttccacagcaaatggggactgctcagaaaaccctgtcctttcttttcctctcttcaaaggcaggcatgtgattgaggatgtgatggtgacttctggcctgttttattttgtggtaacttcactttagtcagggaaataattggaatatctttaatctgatgtagtttgacctttagaaattgaaagtgaacagctattgttgataattcacaaagtattaataaaacttctattacctgtacagattttttacttaatctgcgagaaaactatttagaatattatggaattgtgccatagcttcttnatttcgn

SEQ ID NO: 418 - DNA, 438 bp, Homo sapiens
gtgacaagaaagttcttgagtaaaggctaggaggaaaactatctgaggttacttatttgcctaatccttctatattagaattaggagatgtaaattagtctccagatcacttgtgttgccttcttagtcccaccgtagccatgacagacaaattctcagccctcgccctgctgactgtgtgcaaagttagagaacagcccccaaatccaccccccacttttggaactgcagagtttgggggggtccgcaagatcaccctcgggttcaatagtttactagaacgactcacagaactcactaaagctattatacttacagtgaagggagayagactaaaatcacccaagagaagagatatatgggcaaagtccaggagggtttcagatgctgagcttccagttttcctttcccagtggagtcatggatagtgtaactcct

SEQ ID NO: 419 - DNA, 504 bp, Homo sapiens
  SITE (450): n equals a,t,g, or c
  SITE (503): n equals a,t,g, or c
acttacaccacatcattaccattgctcaaaaaagaagttacaagaaaaatcaggaaatattttattttgaataataattaaaacaccacatatcacaatttgtgggatttaactaaagtagtcttcagcgggaaacttttgttttaaagaagtagatgagaatataggaaagataaaatcagtgatctctgcttttacattcagatgctagaaaaaggcaagttattaaacctaaagtaagtacaagaaaggaaataaataaaagcagaactcagtgaagtggaaaagaaacaatggagcgcccaaagctagaagataaatttttggtaaacattaataatattaacaacccttgagtaattaaacctatagagaaaaaaagagggacatcactgtatattttatagacattgaaaaggataataaaggtatgtttgtgccatgactttnacattttagatcaatggacaattcctttgaaagatatgtccaccaaatggacnc

SEQ ID NO: 420 - DNA, 388 bp, Homo sapiens
  SITE (218): n equals a,t,g, or c
ggcacgaggagaagaccgcggctgcccgcctgccccccagcgtctcatagtccctcacccttccgcggaaagagcccccttactccacctccccgccagcctgggccacccscyctcactgcatcctgggaaccttcscctgcaaggcgtttgctatcttcagccactgggcggagctgcagccctggaggagggggcgggtcgaggctgcgtggtgnatggtctccgcccccaactgccgggcagggctggagctggacagaagccagtgcctttaagtcatttgtgtcaaaacctctggggtccggaggytgtgcgggtgtcctcctggcaataaacactacccggttttcgcaaaaaaaaaaaaaaaaaaaaaaaaaaaaaaaaa

SEQ ID NO: 421 - DNA, 254 bp, Homo sapiens
  SITE (9): n equals a,t,g, or c
aaggctggnatgcagtagcccattcctgtgaatcccagcacttcgggaggccagttggraagccaggtgggcagattgtttgasctcagtttaagaccattcgggcaacatggcaaaaccctgtctacaaaaatagaaaaattagccaggcatggtggctcatatctgtagtcccagctacttgggaggctacaaaaggaggattgcttgagtccgggaggtcaaggctacagtgagccgtgttcaagccactg

SEQ ID NO: 422 - DNA, 724 bp, Homo sapiens
  SITE (585): n equals a,t,g, or c
  SITE (589): n equals a,t,g, or c
cattttctagtttggtgaggattcatcaacctccagtatgatgtctgtgaactttgatgttcaatcaaatcagagtgatatcaatgattcggtcaagtcttctcccgtwgcccattctattctctggatttggggcagggactctgatgcatatagggacaaacagcatattctatggcctaaaagagcagattgtacagaaagctaccctagagtccctgttggtggggaattgccaacgtattttctgcctccggaaaacaaaggactcaggcaagtggtgatggatttggcaaagcacctgattctgcatgattgtcatctagcggttctttgagagcaccagccttggacttgaaaagttaagtctttatcttgaagtcacccaaactttgaaaatatgaatcttgttcctttttcttgtgccaggatccacgaactcagcagtgatgattattctacagaagaagaggcccaaacccctgactgttccataactgacttcrgaaaaagccacactctgtcctacttagtcaaagaattagaggttcgcatggatctgaaagccaaaatgccagatgaccntgcncgaaaagtaaggctcacttaggctggtatttattgccgtccattctgggtgacttcagaagcctcttaaatggaacaaaaaattgatagaaggtagctgttgagctttaagtgtataaaatggaaggatagagtt

SEQ ID NO: 423 - DNA, 495 bp, Homo sapiens
aacctgcgccgacttgaagccctggggttggtcagcgccagaaatggtaccaggggctagtggacgagctggccaaggacatccgcaaccagcacagacacaggcacaggcrgaaggcagagctggtgaagctgcaggccacattacagggcctgagcactaagaccaccttctatgaggagcagggtgactactacagccagtacatccgggcctgcctggaccacctggcccccgactccaagagttctgggaaggggaagaagcagccttctcttcattacactgctgctcagctcctggaaaagggtgtcttggtggaaattgaagatcttcccgcctctcacttcagaaacgtcatctttgacatcacgccgggagatgaggcaggaaagtttgaagtaaatgccaagttycctgggtgtggacatggagcgtttcagyttcaytatcaggatctcytgcagytccaktatgagggtgtggctgtcatga

SEQ ID NO: 424 - DNA, 412 bp, Homo sapiens
  SITE (406): n equals a,t,g, or c
gtttcatgtgaggaactaaattctgagatgacagagcattttcctcaaaaacaaccacaaggaagtttaaaaattgctactaaaccaaagtacctaattcaacaggaagagtgtgctgagatgaagagcacagaaaatttatactaccagcatcaatcagaaaataccatgagaaataaaagccggtggccatgtatttatcctcacagagttcacctatacattcttctactgtagatgggaatgatacagaaaggaaacccaaggcccaggaagatgatgtaaattctaatttgaaagacctttcattacaaaarattatacagttcgttgaaacgtatgctgaagagaggaaaaagtataaatgttagaccagtcagtcggtaataatgatccatcctgggantcagga

SEQ ID NO: 425 - DNA, 602 bp, Homo sapiens
  SITE (30): n equals a,t,g, or c
  SITE (319): n equals a,t,g, or c
  SITE (594): n equals a,t,g, or c
aacatgtgtgcacatatatgtgtctctccnctttatatatacatatatttttcatattcaatgtagcttctaatattctattggaatactatagtcaattatacacacatatacacatatactccccctacccctcacacacacgtgcacacacacacgcgcacacacacacgcgtgtacatatacatacacatctgacatgaataaatgtaagaaggaacacagcatattaagaggaactgaaggaagtccagtgtgattggaatgcagagggcaagggggtgatagttggaagagaccgagatattgtaagaaatcnaagacttggtgattaggagctggttttactcatcattctgtctaggtggatgagagccctcctgattttgaaatacatataactatgtgtgatgatgatscacccacacctgaggaagactcagaaacacagcctratgaggaggaagaagaagaagaagaaaaagtttctcaaccagaggtgkggagctgccattaagatcattcggcakttaatggagaagtttaacttgggtctatcaacagtttacacaggcctttcctaaaaaaatagtnggtgagct

SEQ ID NO: 426 - DNA, 175 bp, Homo sapiens
  SITE (64): n equals a,t,g, or c
ggcagagcagaaattaatttcctaagttttggaggctgggaagtctccaatcaaggtgccagtncttggtgtctagtaagggccttcttgctgtgtcctcctgtaacagcaagtggaagggcaagaggaggacactgccgcatgaagcctctttaataagggccataatgccatt

SEQ ID NO: 427 - DNA, 325 bp, Homo sapiens
  SITE (241): n equals a,t,g, or c
  SITE (256): n equals a,t,g, or c
  SITE (302): n equals a,t,g, or c
gcggttttggggtcccggactctgggatcggcggcctatgagttctttcgaggggcagatggccgagtatccaactatctccatagaccgcttcgatagggagaacctgagggcccgcgsctacttcctgtcccactgccacaaagmttgaaggwttatctatgactgttcacctgtgaactaaggagttgttgttaacgagcccgtaaatacagattttggaagaaacgaattatatgtnttgaaatcgagactnctacccagatatctttagtggatgaagcatcaggagaggttttttnttttcagggcaataatgggaact

SEQ ID NO: 428 - DNA, 305 bp, Homo sapiens
  SITE (21): n equals a,t,g, or c
  SITE (250): n equals a,t,g, or c
  SITE (285): n equals a,t,g, or c
aggtgaaagtgcatggatttnagggggaatggggcatcacccatgcagtgagagaagtggtggaatccaagcagtcaagcttagctttractctragcaatgggaagctgtagaaaggtttgaagcaagggactaaccgggccagattggtatttaggaggaccactctggtagctggggtgaaagaaggttgggggcatgaaacactgacctaaagaatgtacttcaggctgggtgcggtggcccacgnctgtaatcccaacattttgggaggccaaggcgggnggtttcacctgaggtccagg

SEQ ID NO: 429 - DNA, 351 bp, Homo sapiens
agtctgttcaagctgttcaagatcttctcatttaaccccctcattttacagcgctggaaacgataacagagaaggaacgtaagactttcccaaaggcacatagctatttgtaataggactggcatgtgtacagttatatgaaaattctactaaaaatcattacaattataaataaaattgggtggagggtggagaatcaaagttgagggttcaggtacctgggataccttaggtttgattctccttcctgtcagtgctatatatgtgaacatgattgtacatctcctatacttactctcccatttacattttttcaagaaatcatcttagggactacctcaaatcctgtgc

SEQ ID NO: 430 - DNA, 295 bp, Homo sapiens
accttaaaacatgataaaaaccttatggggcattacctatcacacagtacttatgcataaacttataatagtaaaattactaatgtttgataaaataagatggaggcattacaaatagtctacagtttgtattttaaggaattggacatgaagaattctagatcattttgtgtctataaacccgactttctatcttgccttgggcaaactttctgtgcctcaatgtactctttaaatatgtgaaggatgctctttttgattaagtgttttgcactcctgaataaagggcatagta

SEQ ID NO: 431 - DNA, 404 bp, Homo sapiens
  SITE (361): n equals a,t,g, or c
  SITE (377): n equals a,t,g, or c
  SITE (398): n equals a,t,g, or c
tactcttcaagcatgaatcctaatttccctgactatatcttacctctgatctccataactgatggattcctatcctagactatgttactctaatattacccaagattttctccagcctgtttttactctcactttgaaacagctgtttaaaatgactcgtaatctgcttaaatctacatgctttttgtggttctcaatccagttacctaccttccagataattccctcactgtcctgtcctctccattcctctratgtttaagccctgtragccacctttcccccatcctttgtgcatagttaccattttactctttcttgttgcccrggaggaatgcagtgggtgccatcttgggttcantggaaccttccaactnctagggttcaagggatttctnccgcct

SEQ ID NO: 432 - DNA, 504 bp, Homo sapiens
  SITE (25): n equals a,t,g, or c
  SITE (55): n equals a,t,g, or c
  SITE (415): n equals a,t,g, or c
  SITE (418): n equals a,t,g, or c
ctagggttgtggtaattcctagaancctatgttggtcgtggtttggtgggccccntttgaacatatgccacagactgccctgtatgtccatcctccagtttccttggatatgaagattagttgaggaaatttttgccattagctttaggcatttaagtaatgataataaataatgctgaaatagaagaaaacctttttaggtcttacatctgatatgttcatttatttacttagttgctgatttattcctgaaaaaaatttttggagcctgctatgtgtcaagcactgatctaggcactagtaatagaaagccgaaagggatgacttcctagttctcaagaaggctatagtttgatagaagacacagaaaaatccaataatagtcacagggtatttatgggaatttcctgtaggngtnacttactaaagctaggagtgaggagagacttagggaaggttttccagctgagtattaaaaggtggaaggaagagccaagttccagg

SEQ ID NO: 433 - DNA, 263 bp, Homo sapiens
  SITE (30): n equals a,t,g, or c
gaaattagcatacaaagaaactgacttgtnagaagtcagagcaaggtattkgtggatccagggataaatcccaaacttcttaacccctagaccggtttttagtccattgactatgcagcctaatggtaagtatctttttaccctatcgttggaggtaagagggattaagagacctagcaaggacttgctttaaggattcctcacgattaattagactactcgttatccttttctttatagccatgatgtcattttttgtcatt

SEQ ID NO: 434 - DNA, 170 bp, Homo sapiens
gcaggacgctgtgagccaccatgcccagcatttttttaaaattattattattattttattttatttttttagatggagtctcactctgttgcccaggctggagtgtgcattggtgcaatctcagctcactgcaacctccacctcccgggttcaagcgatactcctgcctc

SEQ ID NO: 435 - DNA, 313 bp, Homo sapiens
  SITE (287): n equals a,t,g, or c
  SITE (290): n equals a,t,g, or c
  SITE (299): n equals a,t,g, or c
ggcacgagaaagagctgggattacaggcgcctgccaccgtacccggctagtttttgtatttttagtagacacagggtttcaccaccttggccaggctggtcttgaactcctgacctcgtgatccaccctcctcggcctcccaaagtgctgggattacaggcgtgtagcacggcgcccagcctgtatgcatagttcttatgcacaaagaccctttgaatgattgtttgtgaaattgctgcccctatggcacacgctgtacctgttgccttgaatcttcttgatctgtnctnaggtttggnaggcaggtgatgtt

SEQ ID NO: 436 - DNA, 358 bp, Homo sapiens
tccttccgcacactgaagagtacgtcttcgggtctacccctaatcacataatggctgtgtttaatcagaagtctgtctcggatatgattaaagagtttcgaaaaaattggcgtgctctttgtaactctgagagaactactctatgtggtgcagactccatgctcttggcattgcagctttctatggcagagaacaacaaacagcacagtggagaatttacagtctctctcagtgatgttttattgacatggaaatacttgctccatgagaaattgaacttaccattgraaacatggacgtgactgaccattatgrggacgttaggaagtttatgatgatttcttgaagaacagtaata

SEQ ID NO: 437 - DNA, 421 bp, Homo sapiens
  SITE (265): n equals a,t,g, or c
  SITE (394): n equals a,t,g, or c
  SITE (405): n equals a,t,g, or c
agtgaaccttttggtagatcgaaacctggattgctttctttttctaaatgctgattcttttctttgtggtgtttgtgttctgtgccgatgtccctcccccagccctgttattgtgagtggaagaaggggaaagggttcgcccgctactgtgagcccctcctctcacgctgggtgtccttggagaagcctgcacttcttcattgtacgccagggctgggtccctccctggagtggttctgtgctgctgggatggggccaacccctncagatgttttctgagtgtcacacacaggtgtgtgcattcatgggcctttgcgtgtcttcctgttgtgggagggcaaaaatgtgaaggaaccctagatgattttggggaccaggggctccattcacctgnctgtttcattngcaacaccgggagcat

SEQ ID NO: 438 - DNA, 478 bp, Homo sapiens
  SITE (375): n equals a,t,g, or c
  SITE (478): n equals a,t,g, or c
tgagtggcctcccctgatcgagaaagcatctttgtcattctttagcatcaaacctggtttctcccagtgtggggagagccttttgtctttggagttgggcctaacctgtccctgctgtcctttctcctctaggttgtgcgttgagacttggacacctgctgagggcactgtgcccctttcctgggtgtggacaacaggtcatagggaaaggggagggctctagcgggaaattcctttgtaaaccagtctgtgttcctgtcattttagatcgarcaccagggggacaagctggagatggcgagagagaaacatcaggcttcccagaaggaaaataaacagctgagtctgaaggtggatgaactggagaggaaactnggaggcgaccagtgcccagaattattcgagtttcctaacaggtgatttgccaagagggagggaggcaatccaccagttcccagctttcggctggagggagaan

SEQ ID NO: 439 - DNA, 291 bp, Homo sapiens
  SITE (85): n equals a,t,g, or c
aggacctcagcctgaccctgccagtgctctagtctgctgttcaggttgccccaraggcttggaaactgtgcccatctgccttgtnaccctctctgcattttwatttggccttcaggttctaactccaccacgtccgaagccatgtgcccaagcatttaacactggcttcttgctcatctacgggtttgctgtgggcttcctctgttttcgactcatgtctccaggcagaggtccttagggatcctcgtggagtatacacagcctacctgccccactgggccctgcactttt

SEQ ID NO: 440 - DNA, 729 bp, Homo sapiens
  SITE (231): n equals a,t,g, or c
gggtgccctttgcctggagcgggatagacagggcaggtccctgagcctggggtccgaggggctgggcttcactcctcctgtagtcccggcgctcctggcccaccccctaacgttgcttatctgtggtggaggaagcattagctcagctgcggcctgcacagctcccgggccaggcccacctcccttccttccccagcagccactgttaggtgcacggtagacatgatgaancgacgtcttaaagcagatagcatctcccgaggctgtccatccctaggttttgggggagcaccccttcccctwtgraggctgagcacggcatgtgtgggcaccttggtcacactccagagctcgcttcatccccacgagcggcacctgatctccagtgacggggagactgaggcctggcaaagaggacctgttgcctttgtgtaactggccccagcatgggggaggcattggccccagcatgggggaggcattgaccccaggcctgccaggcctggcagccacagcctggctaggtggaggttactgccttccgcaccactctggcttcctccccgtgcctgtgaagagctcggggcctgcttcctaatttgtaaacacggggcgtgtgtctcagtggctgtgagctagcgagggggtggcgagcgagccggtgcgcaggtcctgaggccccaggcctcattgttggccaacaggcagctgggggcgggctgcggccgc

SEQ ID NO: 441 - DNA, 512 bp, Homo sapiens
  SITE (406): n equals a,t,g, or c
  SITE (415): n equals a,t,g, or c
  SITE (456): n equals a,t,g, or c
  SITE (482): n equals a,t,g, or c
  SITE (493): n equals a,t,g, or c
caaccctaaacctaacacccccgttccctcaacccccacacccataacatctaccccaaccctaatcctaacatccccgccccctcacccccaacacccatcacatctactccaaccctaatcctagcgctaaccctaaacctaactctctccccgctcacccgccaacacccatcacatcgacccctaaccctaactaccatcctaaagaaaagcaactcatctccagaggaagacaacatcacccaagcccactgtaaatgtgtattcacaacgccaagcattcaatcaaaaatatccaggcatgggggtgacaggaccaggtaataaagccagcagcagcagcagaggaaagtcaatagaaacagacgcagcagcgacgggaggttaaaacagcagatcgggnattcaaganaatatgtagagggagaaatttatcagagaattggaaatcgngaaaaagaatatgggcattttaagantgaacacgcgnaagggggagtcaaaccccg

SEQ ID NO: 442 - DNA, 356 bp, Homo sapiens
  SITE (309): n equals a,t,g, or c
  SITE (317): n equals a,t,g, or c
  SITE (320): n equals a,t,g, or c
ggtttcccaggctggccttgagcttctggcttcaagcgatcctcctgcctcagcctcccaaagtgctgggattataggcatgagccgctgtacatggcctacattttcttaaggtgcacttttatgtgtgtgtactctggaaataccttgattacctgcagggtggccaggttctttaaatctaaaacactagcccctgtacactcgaacacacttatacgaatgagttttgwgtggttctgtggccgtcacccttgtcatttgaraactcacagtaggtaaaaatcatatgcctttctgtgctcattnccaactcntgntattacaaaagtttcttggggaatcaaatgaagaaa

SEQ ID NO: 443 - DNA, 444 bp, Homo sapiens
gcagagctgtccgcgggctgggcagcgtcgccgtctcccctgagccgcctcggtccggcaggagcggagccgaagcatcccttgctgcacgcagggcagagcaggcgagggctgggggccgatcggggaccccggcatctggcagtttccttgcaggttcaactttaattgccaagatttcacccctcctcctcaagcccagattatttatcctccctccggcctgggctgctggatgcagcagcggctgggcttggtcccaggagcagggagagtgcgctcccggccctcctagccgcgtgcccgggccatggtgcggctgagccccgcgcttgggtgaggcggcggcgcggctcggagcccggcggaccggtcctacgggacatcttcccctgaggaggagtcttcccctggggctgcgtgccgggggcgagcggcggtcgc

SEQ ID NO: 444 - DNA, 467 bp, Homo sapiens
  SITE (413): n equals a,t,g, or c
  SITE (448): n equals a,t,g, or c
  SITE (450): n equals a,t,g, or c
gagtgactcgcgactggtcggcgcggcgaaagcagagcggcgcgccggttccttggttcctgagggcgatggcgcggggtggctggcgccggctacgccgcctgttatccgcggggcagcttctattccagggccgcgcgctgctcgtcactaacacgctgggctgcggcgcgctcatggcggccggtgatggcgtgcgccagtcctgggagatccgcgcccggcccggccaggttttcgacccacggcgctccgcgagcatgtttgcggtgggctgcagcgtgggtcccttcctgcactactggtacttgtcgctggaccgcctattccctgcgtctggcctccgaggcttcccaaatgtcctcaagaaggtcctcgtggatcagctggtagcctctccattgctgggcgtntggtacttcttgggtaaggagcctcctaagcctangntttgcctttcataggtc

SEQ ID NO: 445 - DNA, 330 bp, Homo sapiens
  SITE (272): n equals a,t,g, or c
  SITE (285): n equals a,t,g, or c
  SITE (289): n equals a,t,g, or c
gctgccactctcactgccagaccatgccatcaactgcgtgcgcatgggcctggacatgtgcckggccatcaggaaactgcgggcagccactggcgtggacatcaacatgcgtgtgggcgtgcactcaggcagcgtactgtgtggagtcatcgggctgcagaagtggcagtacgacgtttggtcacatgatgtcacactggctaaccacatggaggcaggcggtgtaccagggcgagtgcacatcacaggggctaccctggccctgctggcangggcttatgctgnggangaccaagcatggagcattgggacccctacctttgggagcta

SEQ ID NO: 446 - DNA, 474 bp, Homo sapiens
  SITE (420): n equals a,t,g, or c
gctagtctcgagttttttttttttttttttgtaatttagaagttccttattgtcaagaataaaacctttgttatgctcctctctgccttttaaaaagtatacattttatttcattcatgtcattttttcccttacccattgaattaaatttaacaaagatattttcattttcagcaactgtaattaactgtagttttttactgcttttatttctgacccatttattggtatactgtcacttccctttttttaattgattctgggtcattcttgttwggctttagwgwtttctcacttttcatatatatttttatctttgtataatttggtttggcttttccttgccaattcagaatatggggactaaaaatttgaccgwtgaacttcaggttcactttccttttctttcacaaattttgntgttgttgttatggagtctcgctctgtcactccagtggcaccatctccacccac

SEQ ID NO: 447 - DNA, 413 bp, Homo sapiens
  SITE (223): n equals a,t,g, or c
gtcgaggtccgtttggtgttcttgtggaagaagaataagagttgaaagtgaggaagtaacctttgatttgtaaatcatttaaatttcaactcgaagggggtaagaaataccccaacagcaagccacagaacagccaccagagcaaaccacacaaggcttttgggatctcagcctaataaaggtctcccatggagctcaagagtagatcctgaggtacgatatnttcttggaaaaaaaaaacttgtaggtgtttgtagccggaccgggtgctgtgttagttttcagcttctagctcgatcctattccctgaaaattgccaaggcttttgcattaggcattggtccaactcctgcgtgaatggggcctacagaagtgacctcccccctctctgggggtcagggggtgtgtgtgtt

SEQ ID NO: 448 - DNA, 467 bp, Homo sapiens
  SITE (425): n equals a,t,g, or c
  SITE (430): n equals a,t,g, or c
  SITE (454): n equals a,t,g, or c
  SITE (463): n equals a,t,g, or c
ggaccagccctgggggttctcacatgggctggggaaggtttggacagggcaggaagggtcatcccgcaccctctgtctgcctcacaccttagccatcccagaagggtgacagaatgtcctactttaaacaccttccccaggcctactcagtgacctcctttagaaagaattgttctaagatttgaaaatcaatttggttaacaaagtgcagaatgaccttttggaaaccagagcactcaccggcctgtttagcattctgttctgccaggtgggaagtcagcttgttcctggtatttttgcactcagggttacaagaggtgagactccacacagaaagtgctggttggtgcgagaacccgtcgtactgcctctctaagactctggagttcgctcctttccccttcatcttctctcgtgcctggganaaaanacatgagcatgtgtgaaagatgtnggtgcctgnattt

SEQ ID NO: 449 - DNA, 666 bp, Homo sapiens
  SITE (594): n equals a,t,g, or c
  SITE (614): n equals a,t,g, or c
  SITE (625): n equals a,t,g, or c
  SITE (650): n equals a,t,g, or c
  SITE (656): n equals a,t,g, or c
gcctaagggcattaacctcctgggctgcctctgcacaccatgcacatccatgcacatccgtgagccgcagtggctgtagaactcacccaagccacctctcataccagcgaagaaactaaggcccacagttgttggagtgtgatgaaacatggtgcccagccactgtccaaggcctggctgaaagccgatgccagttcccacaagagaaatataggtttcttgcaactatggcagatggttcctgggagcctttggtggagaaagccagtggctgtgaccagggacctttgctggagtcctagtgcagcagacactttgtttgcttgcgtcccatgccctaaagccacctcccatttaggctgcagctgtagtaacagatctaggcatttcgacgctgcccaccctaagtacccactgcacacctctccactttcctgctcaaggctgatatggcctgaactagatcactgttgaataaacttaggatcttgacacatggtaagaattacattttatattgtgatcagtttatacaaataggaatatatatataatggaaaccaaagtttcgtgaaaatacccttactattgtgngacatactctggtatttttnattctcttctnaatttttactttaaaaaaaaaaggngctttncaaccaactt

SEQ ID NO: 450 - DNA, 602 bp, Homo sapiens
  SITE (520): n equals a,t,g, or c
  SITE (556): n equals a,t,g, or c
  SITE (559): n equals a,t,g, or c
  SITE (567): n equals a,t,g, or c
  SITE (574): n equals a,t,g, or c
gaaaaaaggttcttcatctgaactacagaataaagaaattatttgagcagctacttctcaattctcccatgagtggaatttcattgccattctagattcagaggaggcaaggtcgtttatcatatgcagtggatggggcccaaatccataaatatacggaacgcagggcagactgtatttcctggacattagcaatgtgctgtgtktggccaggtgtgatggctcatgcttgtaatcccagcactttgggaggcaggaggatcacttgaccccaggagtttgagaccagccaaggcaacatagtgacaccctgcctctattttttaaatactaaaaaaaaaaaaattttaacacatgctgtaaggaagtggagaaggaagagatttgttacataattgaatgatccaggaagctttcccagaggtgtggagatccgactgggtgtcgacagaggagagcttcaacaggaaggtgcagcaggttgatgaaaggggatcagacctgtgtacctacaggtgtnggtgcatggggtgggcatagcaaaggggaggttganaangtgggcanaaactgncctttggaaagtttttgaacattaaggg

SEQ ID NO: 451 - DNA, 328 bp, Homo sapiens
attcggcactgaggaagggggtcactttccctctcaccgagttaaatctggctctgttatattttttctaggaacacagtatgtctcttcccaatgttttattcggtttctggtttccccacttttgaccggaagtatgtgggaagaatactggctgttattattatgattattgagtgtccaatactctcctccaatatttccaccaagaattattatcgctgctctcctcattcatgttagtgttgctttgtgtgctttagatgacaatcgtcctctttactctccaagtttggagggtgagggttttktgttgtggtggtggtgg

SEQ ID NO: 452 - DNA, 512 bp, Homo sapiens
  SITE (130): n equals a,t,g, or c
  SITE (151): n equals a,t,g, or c
gctgaggtcaggaattcggggccagcctggccaacatggtggggccttgtcgctgctagaagtacagaaattggccgggcgtggaggtacatgcctgtggttccagctacttgggaggctgaggcagganaattgcttgagcccggggggnggaggttgcagtgagccaagattgtgccacttcattccagcctgggcgaaagagtgagacttcatctcaaaaaaaaaaaaaaaacagaaaagaaaatgaatacatttccaccagaaaatgtggtaggtaattggtgaagttcatagattcttgaaaacattagtacctctttttgcatggtaaatttgtgacagtgaatatttctagtctataccctgttatcttgatttctgagttttatgctaaattttatgagatgaaacttggtacctcctagaagtgtttccaaatgaataattgtttactacataatttttaatggaaataataaaataatacatttattatctaaaaaaaaaaa

SEQ ID NO: 453 - DNA, 858 bp, Homo sapiens
tttttttttttttttttttttttttttttttttkytcctcgaatgacaatcagttttattgcatgagttatggtgtccaaatgagttaatttgcttttttcaccgtctgagtcaaaataggccacctgcaggcctcatgcaaaatgtagaaactggatagatgatttaagcctcaaaaacgcaagtrattttttggggtgcacgcaggagagggcggatctggggtgtggtcagcagatgaccagccgtggccttgaaggcagtttccagtctctgcagctgcgggatgagggtgaagccccccatttgctctgctcagcctctctgttgagtatttaagaaatcctgattctccgtgttctgccagggaggatactgcagaagagtggactggtgtggccattatttcagcatcttcaccatgtacgggccttgtaatctgtagccgatctttctataataattcctggtgccgaccccttgcaaagtgcctagagtgaacagcttctgtggtggcctcccctctgcctctgccccaggacatccacycctgatatcacagcgattttcccagacccatgytcttctctagctattctttctgcttcctccatcacgcagcatgccaaatccctgatgctgaaatttagtaggatcccggctgctcacagggaccacactcccatacacatgcagctctcgtactatggagacacctccacccaattcgaaacggaaagtttcttctgaacacttgcgtaatcgtaggaggccaatcaaaatgtcttgatctgggtcttcgtatgacaagaatgtttcccagccaccatttgcaacataatctctccttaccaattc

SEQ ID NO: 454 - DNA, 434 bp, Homo sapiens
  SITE (48): n equals a,t,g, or c
  SITE (395): n equals a,t,g, or c
  SITE (402): n equals a,t,g, or c
  SITE (429): n equals a,t,g, or c
cggacccccaccgcggtggcggccgctctagaactagtggatcccctnggctttcaggaattcggcacgagctgactgagggagagagggcaaaagatagggaagagyggggagtctttttccagatcatgaagaagtcttatagattgatgccaaagagggtggatggaggttagacttcaaggagaaccacatggggagggcttcagagtagactggaggtggggaatagtagcagttgaggttagagaggggacctggcttgcagcttgcttggatgggggagcacatgcttgaacacaaggaaggcatggcagcatgtagcagtccaggcccaaagatttcccccacctgagcagccctggggtgagggctgaggcgccctggcaggccgnctgccgnctgcctgcctgcctgtctgagtctctnctttg

SEQ ID NO: 455 - DNA, 1471 bp, Homo sapiens
  SITE (1347): n equals a,t,g, or c
  SITE (1400): n equals a,t,g, or c
  SITE (1410): n equals a,t,g, or c
  SITE (1432): n equals a,t,g, or c
  SITE (1462): n equals a,t,g, or c
tgcataatccatgtaccgaaaatgtgtgttatagtgttggagtttccagatcaaaagatgtgccaccatttggcccaccgattcccaaaggtgtaacttttccaaagtcagccgtgttccgggacttccttttagccaaagtaatcaatgcagaaaatgcagcccataaatcagaaaagtttcgagcaatggccactcgaacgaggcaggagtacttgaaagatctggcggagaactttgtcacaaccgccaccgtggatacctctgtgaagttcagcttcattacgmygggtgccagtcccctctactgctcgaacaccagggctcaggccctttggaatgtgacggagccagggagagggaagacaccatggaagcaagcaggcacccggaaaccaaatggcatggcccaccttccaaagtcctgggttcctataaagaaagagctctgcagaaagatggaagttgcaaagattcccccaataagctttctcacattggggataaaagttgctccagtcactccagcagcaacacgctctccagcaacacctccagcaacagtgacgacaagcactttgggtctggcgacctgatggaccccgaattactggggctgacctacatcaaaggggcctccaccgacagtggcatcgacacggccccctgcatgcctgccaccatcctcggccctgtgcacctggcaggcagcaggtccctgatccacagccgggccgagcagtgggctgatgctgccgcgtctctgggcctgacgacgagccagccaagttatattctgtgcatggctacgcgtccaccatctccgccggcagtgctgcggaaggcagcatgggcgatctcagtgagatatcctctcattccagtggttctcaccattcaggaagcccttcagctcactgttcaaaaagtagtgggtctctggattcatccaaagtctacatcgtgtctcacagcagcggacaacaggttcccgggtccatgtccaagccctaccacagacaaggggcagtgaacaaatatgtcatcggctggaagaaatcggagggcagcccaccgcccgaggagcctgaagtgactgaatgtcccgggatgtatagtgagatggatgtcatgtccacagcaactcagcatcagacagtggtgggagatgctgttgcagagactcaacatgttctgtctaaagaagattttctgaaattgatgcttcctgacagccccttagtggaggaggggcsaagaaaggtttcgktctatgggaaccygtcttcaaggaggtcgctttaccgcacgcttgtcttgacgagagcattttgcagcaacagggangggggccctcctttgcaagtttcccgggaagtttccgtgccttgaaccaaggnccctggcccnaacgacaattcttggttcaagnaaccaaaccccaaacccttaaccacaaggnaacggcttg

SEQ ID NO: 456 - DNA, 420 bp, Homo sapiens
  SITE (58): n equals a,t,g, or c
  SITE (60): n equals a,t,g, or c
  SITE (361): n equals a,t,g, or c
gggcactaggaaaaaaggctttttaaaaatcacggtattgggcatttgcaattgcttntnttgaaaagagtagagtaatacattggaacggcctttgaagactgggttcgttgtcaccttgcctgtcctggtgggtatgtggcctgatgaccaagcttgtcctcaccctggtttcactctgggaactggagggaagccaccagaagaaacctggcgcccccactgagggacacggaagggcgtgtctagcagttacaccaccgkgcgctgtcgtttggtgctcataatgttcctctgtgttttaggagarcagagatgaagacaagacatgatgatatcagaaaaaaatatggtaaggacntggtcacgcctcctttttgtctggctgggaggcgatggcacgctgatccactagttcta

SEQ ID NO: 457 - DNA, 424 bp, Homo sapiens
  SITE (373): n equals a,t,g, or c
aagttacagtgagccagagggttctgcaggcccctctccagrggttgaagaaggccacgaagctgtagagggagatttgggtgggatgtgtgaagaaagaaaagtaggaaacaactcatctcatttcctacagccaaatcttcgaggtcccctgttcttatgtgaagactcagagctggagtcttccactgtctgaactgagcaaagaaaccatcatgctcatgactccaggcagctttctctctgagaggattcaggatgccctgtgtgccctagagggttcccagggctctggaacccaaagatggtgaggcatctgaaggagcagaggctgaggagggtccagggacagaaacagagacaggcctgcggnttctccacactggaattcctgcccagagatccatatcgacacagcagacag

SEQ ID NO: 458 - DNA, 398 bp, Homo sapiens
  SITE (398): n equals a,t,g, or c
tggattcactgaaaaaatgaattttggtctatatgcaacatattccttaactataatgtttcactatttcctaatagtatgacatcayctctactacctttaaattgtcctttggacatraggaaaagaaaagaactatggacccacagtacctcattagatgcccttgggaccagatgtgcattggaattcagaattttttggattttagaagagaaatatagtctgtgtacatacattatgtaacactccagactctgaaacattttttaaagcaaatatatatataaatatttacmttaaatggcccaaataaaaattataagtagtgtcaccaagtgaggtacggctttgttgccaaaagttctttttaaaaaaacttcctgaggctcacgacn

SEQ ID NO: 459 - DNA, 644 bp, Homo sapiens
  SITE (3): n equals a,t,g, or c
  SITE (30): n equals a,t,g, or c
  SITE (523): n equals a,t,g, or c
  SITE (526): n equals a,t,g, or c
  SITE (596): n equals a,t,g, or c
  SITE (630): n equals a,t,g, or c
ggncacgagtgttgaagtcctaaaattggncactgttgccataagccagggaactacctaggagatgctaggagagaggcctagaatggaaccctccctcccccgcccctggggccttcagagggagcggtgcccagctgacaccttgaccttggacttctagcctccaaactgtgagacaatacatttctgttgcttaagccactcagttagtgtgctttattttggcagtcttagcaaactaatacatcccccaatccagaactgtcctcctttggataataaaaacagcaataattatagtgtcattaccctgagtgactggtcccactgttggtcattctttgtagatgtgagttattgccctattgagatcagaagtcctctcacttagaggcatatctaagacttttttcttgtggagggagctcactcaactgtaggtaaggtttgactcatctgggttagtagtaagaacaaacttccaagtgggcaccatcttaaaggtgcaagcccatgtggngantggaccagggtctggtattattaagaggctcttgggtagcacattagaaacacccggggagatttttaanattttacaaagcctagccaaaccccagacccttnaaccccgactttct

SEQ ID NO: 460 - DNA, 493 bp, Homo sapiens
  SITE (425): n equals a,t,g, or c
  SITE (430): n equals a,t,g, or c
  SITE (459): n equals a,t,g, or c
attctgtggtatacatgtagtgaacacatttgtgactgagtttcctgcttttagctggagcaagaaagttttataattgtgatttgtacaaaaaaaatgataggcaagagaatgtgtgtaaaataaactttattgtcagaggtttctaaacgctcatccttcaaggaaaacggacatatgctgaagagctgataaacagtctacagcagtgtttttctaacttaatcttgattacaagtccttgccattttcctccagctgctgttgactccagttatatataggttggggggaaagggggattatctatgggatgtagggcatcactgtctcttgggggcagttatcacatttgcagggctggagggggatgtggatttttataatccaaactatcccatttgggggatacaaactggggagtnggccngttaaaatttgcttctcgggaggatgggnggcctttccaaatttgggggccttttccaattgg

SEQ ID NO: 461 - DNA, 800 bp, Homo sapiens
  SITE (15): n equals a,t,g, or c
  SITE (21): n equals a,t,g, or c
  SITE (747): n equals a,t,g, or c
ggattttaccaaaangaaatncctaggggccataaggttgggggaagmccccaattaatggaaatggcctaagggaccaatgcctaattaaatccgttaaccagtgattttgkccaccataattaccatgaccttatagcctaaaagagcaatatttaatccagtaagatttagagatgggtgtamcttggaatccctttgaaagcagccgtgtttagttttcaagcaaatgcctaatgttccttaatccctaatagtatattagacttcgttgtgttgaatatatcaaatgaacgaactatgaaccagagctttaaaatagtgatttgtaagactttgttacaatggtacttaaaaaattgctttgtataatttacacactgtaaaattcacccattgtacatgtacaattaattgtttttagtaaacttaagagttgtgcagtccaattttagaacatgtccatcagcccccaaaatttactcctgctgctctgcggttaatttgctcctgcctccagccccacgcagccacactgatctgctttctgtacagatttaccctttctagaaatttcacagaggtagaatcatgcagttagtcttttatatctgggcatctttcacttaggcatgtttttgaggttcatccatgttgcagcttatacctgcgtgtagttcctttagttgctgacttagtgttcactgtttgggrtataccacattttgtttatccattcaccagttngataggacattgggstgggcctacattaggtttttttaaatgcggattaatat

SEQ ID NO: 462 - DNA, 434 bp, Homo sapiens
  SITE (82): n equals a,t,g, or c
tcagcttcaggctctgaagggttaaatgtcagctctgggacaagagaccatttcaggaaatggaatttgattcttggttttnttgccccctcccctccagcgtaccatactttccccgcatttacttacgtttcaggtgtcaacatggtgactcacccaccctcagggcagaagggctacccgctgccccagtgaaattcggtttgaatagggataacctgggtccctccatgcagcccggaaatggctgtcaggacctgccaagggctttagtaggttgggaatgctagtgggacgtggccacatctggatctcatcccccmgcccccgtcagaggggattggagagatgagggcagctccccaagagtcagtgccgcctctggtctggccacggctttggttaccctcccagccttcccttaccatgttctg

SEQ ID NO: 463 - DNA, 451 bp, Homo sapiens
  SITE (19): n equals a,t,g, or c
  SITE (25): n equals a,t,g, or c
  SITE (51): n equals a,t,g, or c
  SITE (66): n equals a,t,g, or c
cgagccatgatcacacccncccgtnctcctagcttggatgacagagtgagncccctgtcctcggtnggtaggtagggtaggtagggtagggtaggtagggtaggtaggtagattatagatagatagatagatagatacagacaggcaataatttcatcaaaaaacaccctcacagaaacataataaggataatatttgaccaaataccctggcactatgcccagccaaggtgacacacaaaattaaccgtcacatcatacagcccagcagttgcatcccttgccatttattccagagcagtgaaaacttttttccgtacaaaaacccttgcatgattgttcatagcagctttatttgtaattgctaacaattggaaaaactaacatgtccgtcagtaggtgagtggttcagcaaagcagtacacatttcctkgagcactgctcccacatta

SEQ ID NO: 464 - DNA, 273 bp, Homo sapiens
ttttgtcagaagccagtcatactcaaccatagctcacaatggagcaagataatattttgcattgttgtgtgactgctttggtctggctctatcaagctctatttaatagtcgactaagtactttaccttcagaatatttcttccttttataaatgagaaataatcatttgaactagaagccatatctgattttcccaaataaaggatagttggagaactcgggttcaaagttatatatatgtctataccgrgaaatataattgtttgtgtatt

SEQ ID NO: 465 - DNA, 708 bp, Homo sapiens
  SITE (1): n equals a,t,g, or c
  SITE (5): n equals a,t,g, or c
  SITE (671): n equals a,t,g, or c
nggcnaattgggtaccgggcccccctcgagtttttttttttttttttttaccactcttaatatataatagacctggaaatacaatcaaagacctcaagaaacattgcacttagtttcaaggtagaatgctgtataaatgtttgattctccatggggagggaaaactacatctaaatcaaatatctaaatagagcatatattctctgctcttttagagaagctaactttaagccttttagtttcgaaattccattataagctccattcaaaagggatgaaaacagaaaaatgtagttgaaaattcaaattacaaataagtctccaatattgtagtaaagtcgactactaatagagagaaatcattattaaaagatgacaattattactactctaatgaaaaaaggttcatcttatgagarttctaattttctctttgggtccaaaaagttttcaaaagtagcatctaatctttctttaaccaaatcataatgttttcccaataattttttttttttttgagacaragtgttgctctgttgcccaggctggatggarttggarcgatctcagctcactgcaactctgcctcccaggttcaagcgatctcctgcctcagctcctaagtagctgggactacggtgcatgccacacgccccagcttattttttgtntttttagtaaaaacggattccccatgttttgccaaaa

SEQ ID NO: 466 - DNA, 435 bp, Homo sapiens
  SITE (317): n equals a,t,g, or c
aatggctgcaaaagtggttggatgaatcaacacctaccaaacctattgataatcacgcttgcctgtgttcccatgacaagcttcacccggataaaatatcaattatgaagaggatatctgaatatgcagctgacattttctatagtagatatggaggaggtccaagactaactgtgaaagccctgtgtaaggaatgtgtagtagamcgttgtcgcatattgcgtctgaagaaccaactaaatgaagattataaaactgttaataatctgctgaaagcagcagtaaagggcagcgatggattttgggtggggaagtcnccttgcggagttggcgccagctagctcttgaacagctggatgagcaagatggtgatgcagaacaaagcaacggaaagatgaacggtagcaccttaaataaagatgaatcaaaaaaaaa

SEQ ID NO: 467 - DNA, 405 bp, Homo sapiens
  SITE (377): n equals a,t,g, or c
  SITE (398): n equals a,t,g, or c
ggcacgagcggacgtcggcggtgaggatcttctcctgacccagcatcgctcatcacaatgaagaaccaagacaaaaagaacggggctgccaactggaagacatactgagcacatactgtgtggacaataaccaggggggccccggcgaggatggggcacagggtgagccggctgaacccgaagatgcagagaagtcccggacctatgtggcaaggaatggggagccttgaaccaacttccaktagttcaattggagagaaggaaccctccaagggggattccaaacacagaagagattccggcagagttgacgaagttcggagcaagggaaccattcgaaggccacaggagaagaaaaagccaaggtttttggggangagatcacgtttgctgattgnagacatt

SEQ ID NO: 468 - DNA, 349 bp, Homo sapiens
tcttgcatattgcacattcttcttatacttcctccctacctttatctgacacagaaatgctgtatgtccagaacttctatcagaggcacctatggaagtctaagggaagaccacatcgcttttaaaaaccctaaaattttgtagtcactagatgaaaatattcagccagtgacccaaaaaattgctaccaatgagactctccattttgccatgtagccagaacttactttgatctatgtgcctggggtagtgaccaagtaggtgggtaggagtaatctcagggaaacttgaggccccagcctcatggytagggtcataatttggaacccaggtctgtttgacatcagat

SEQ ID NO: 469 - DNA, 859 bp, Homo sapiens
  SITE (70): n equals a,t,g, or c
  SITE (847): n equals a,t,g, or c
  SITE (850): n equals a,t,g, or c
  SITE (856): n equals a,t,g, or c
cgtacctagggcgggaggcgacatggagacaggggcggccgagctgtatgaccaggcccttttgggcatncctgcagcacgtgggcaacgtccaggatttcctgcgcgttctctttggcttcctctaccgccttggtgctgcaggtattcaaaacctttgaccacatggcccgtcaggatgatgagaagagaaggcaggaacttgaagagaaaatcagaagaaaggaagaggaagaggccaagactgtgtcagctgctgcagctgagaaggagccagtcccagttccagtccaggaaatagagattgaytccaccacagaatkggrtgggcatcaggaagtagagaaagtgcagcctccaggccctgtgaaggaaatggcccatggttcacaggaggcagaagctccaggagcagttgctggtgctgctgaagtccctagggaaccaccaattcttcccaggattcaggagcagttccagaaaaatcccgacagttacaatggtgctgtccgagagaactacacctggtcacaggactatactgacctggaggtcaggtgccagtacccaagcacgtggtgaagggaaagcaggtctcagtggcccttagcagcagctccattcgtgtggccatgctggaggaaaatggggagygcgtcctcatggaagggaagctcacccacaagatcaacactgagagttctctctggagtytcgagcccgggaagtgcgttttggtgaacctgagcaaggtgggcgagtattggtggaacgccatcctggagggagaagagccccatcgacattgacaagatcaacaaaggagcgctccatggccaccgtgganganggaggnaca

SEQ ID NO: 470 - DNA, 713 bp, Homo sapiens
  SITE (651): n equals a,t,g, or c
  SITE (664): n equals a,t,g, or c
ttttaccttatttgaacaatgattcaactcgtactggatcccagacactaccccaaaagaacacccgcagcaccactggcttcttcactttacaagtcagcatacacttctgaaatgagagaaaataagtagtgataaaatggctacccaaatgcagattctgttactgatgctcaaaatctataaacacaaaccctactttagccctcagctttactccaaaaggacccargcttttctctcaaagtakgagatggtctgcctctgtctgacaggttttcattcatctaacctcctacagtatggaaagcaaaagccttccttactgtaacctgatactttcactggcaatatttcaggtgctaaggttttcattatgcaagactaattcacaagctccacaaaactcaacctggtgaacctgacaaaaatcagatgtttaaaataagaaagcaatgaacagaagtatattaaaatgaatttaacaaatgcatttcaaggtaaagtaaytytccgwacctacccataaaagcacaaaaattcccttctgctccagttgtctattcccagatctatgaacatggtcatacatcaaagctatgtccagcgttttccaaaacaaacagggaaaaacaagttcccaagaacagnaaagctcatgttnggttattaaaatgtccccactcccggccttatcaaaactttggtggttg

SEQ ID NO: 471 - DNA, 508 bp, Homo sapiens
tcgagtttttttttttttttttttttttttttttttttttttttttttttttttttgaagagaattcatttttattaagaggtgaaacaaaatgtcactcatgtacaactaggctttatgggaaggtggcagagtggctgtggacacatttgcccaaagcaggctgaccccctcttccacggaagaggcatcttaaagcagtttcaccagggccctggcagggagccccagggcaggatcccacattcctatagccctcacaacaggtgccttcctgctgcttatctgcagggaggtcttcgtggggtggagatactggtggttatttgactgttacctgtggcctgtcctctgcctccttccgttgaagaaggccttgtcagccactctgtataactctcctcgaatatttaccatgtttattctttacctataaaarggggaaaaattccatacattgttagctgactgcaattttaagaatcaaaagtcactgawtttaaaaagt

SEQ ID NO: 472 - DNA, 343 bp, Homo sapiens
  SITE (13): n equals a,t,g, or c
  SITE (14): n equals a,t,g, or c
cactggcagtttnntctacgccctgttatgttgtgaaatgtataactgaagaagaggacagctttggatttcataggtggctttgactcttatggctatcaagggcctcagagacatctcatttacaactacagcctatgtacatgtcaaaataatacagatgacttcagtatgtcagcccatggacctttcaaagaacttttttcgcatggcctcctgcatttcatgaagagcaagaagcaactgagtttaaatacatacacgtattaacaaaacaaatgcaaagcctctacmtrcacgacaacacataaaaaaaaaaaaaaaaaaaaaaaaaaaaaaaaaa

SEQ ID NO: 473 - DNA, 535 bp, Homo sapiens
  SITE (415): n equals a,t,g, or c
  SITE (441): n equals a,t,g, or c
  SITE (455): n equals a,t,g, or c
  SITE (458): n equals a,t,g, or c
  SITE (491): n equals a,t,g, or c
  SITE (501): n equals a,t,g, or c
  SITE (532): n equals a,t,g, or c
ccattatttgattaatgtcagattcatttactacttcatatataagccatcagtattaattttatggcagaaaactttgtcactctcaaatataaatgtgaatcacttaaaagacatttgttttcctgtaataaataaaagattagtaattagttttacgtttgctttcaagggattctggttgtatttattgtcaactaaataactttgatcaaatagccaagactctaacatataggcaagagtttgtagggaatcgtgagttgcttggcttatactgtgttcttggtgttaagtattaacaggaatatggcctgggtaattagaacttgtccatcagaattgccaaaagtggggattcgggggtctctgcctatggaggatgtggttcagaaataaagaatttgaatagggntaagctgtagggaggrtcttagtatngaggattgagtatnctngaagrtttagctgtkgaggagaggggcagagcnatgggagggnaccatgttgggacatgttgaaggctgtgatncct

SEQ ID NO: 474 - DNA, 657 bp, Homo sapiens
  SITE (19): n equals a,t,g, or c
  SITE (20): n equals a,t,g, or c
  SITE (602): n equals a,t,g, or c
ggggggggggggttggttnncataasayctccggatctctggccccagctcgacaccactttctagctatggcacgttaggtaagtcctttaaccactctgactctcacactgaatataggttagaacagtatctacgtcatagtgttgcttgaggattaagaggaataattcatgggacttggcatgagtctttactagattgtaagctccatggaggagctgtcttcccagtgcctccagcagtgtctggcatatagtgaggagctcaacacacatttgttaaattaacagtaagcattcagtcaatgttaattgttactgttgtcatgaataatattctcattattacttacattacccattttgagtcctccgtaccttctgttgataacagtcatcttcgtgaagcagctatggtgtcattgataggatgctgagttcaaattctaaccctgtcctgattagctgtgggcaaagtttcttaacctctctgaactartttccttgtctgtwaattgtgatgataatgccctcccacagaatctaagaaggtaacacacccctgccttaattttctcaaacgtwtggggtagaaattanccctggggaacctamtcccttaacaatgtcttaaaatttttcmcattgcccccta

SEQ ID NO: 475 - DNA, 137 bp, Homo sapiens
  SITE (97): n equals a,t,g, or c
aagctaccaacatgaggtcaccgagcacagagttggaagacgggtacaaaattagctctccagaacccgtatcaacagactccaacccatggctgcnatttctattaaagagaacgtcgctgcagatgaaggcggtg

SEQ ID NO: 476 - DNA, 402 bp, Homo sapiens
  SITE (316): n equals a,t,g, or c
  SITE (327): n equals a,t,g, or c
  SITE (384): n equals a,t,g, or c
ggcacgagggagttttcacaaccaacgtaaacagcatcgsggcttctgctgtctgcgccttcaacctcagtgctatctcccaggctttcaatggcccatttcgctaccaggagaaccccagggctgcctggctccccatagccaaccccatccccaatttccagggataatactgtaagagataatacctcacagatatgtgggaaggttcatatgcctggaatgtaggagatgctcagaaggcttccagctttggtttagaaatcataagaactttgagctggcaaggacacaggagagggacagcaggtttggnccaagtgtggncaccctgcctggggacccggtccccaacggggaaccttgcacacggagggagggcantatgtgccccacaacagg

SEQ ID NO: 477 - DNA, 441 bp, Homo sapiens
  SITE (5): n equals a,t,g, or c
  SITE (30): n equals a,t,g, or c
cctgnagtatatgttgccagacgggccacnggcacacttttcctaattgggaaaaatggaacagcaacagtattgtctgttgacagaatatataacagagatattatccaccctactcaggacttcggtggccttgatgtgcttactatatcacttggaggaattccacccaatcaagcacatcgagatgcccaaacaggtaaatgcctttattaagtagagtcacaagggaagtaaaattgttcttcaaaaagtaattgctttttcttgtggcaagactacacatttaacatgaatctcatatacagaacaatttcattcaataaaatttatgtttaaaaaagtagtttgatgtctgataatatcaattataaatatcctaagaatgtcataactatcttcagaaagtttgtaataaacttattagccaccaaaaaaaaa

SEQ ID NO: 478 - DNA, 507 bp, Homo sapiens
  SITE (108): n equals a,t,g, or c
  SITE (374): n equals a,t,g, or c
tcgagttttttttttttttttttgtatttttttagtagasatggggtttcaccatgttgtccaggctggtctcgaactcccgatctcaagtgatccccctgcctcggnctcccaaagtgctgggattacaggcgtgagacactgtacccagccaaaccttgacaatttgacttaaactgatttaaagagtgtcaagacatcagttaatagggttgctatattagagaaaaatttaaaaagtgtgtgtcaagacgatagtgttttggaaattgacagaaaaggccaggtacagtggcgcacacctataatcccagcactttgggaagctgaggcaggaggctcacttgagcccaggagttcaagaccagcctggncaaaatggcaaaaccctgtatctacaaaaaacacaaaaattggccaggcgcggtggctcacgcctgtaatcccagcactttgggaggctgaggcgggcggatcatgaggtcaggagatagagaccaccctgac

SEQ ID NO: 479 - DNA, 314 bp, Homo sapiens
  SITE (226): n equals a,t,g, or c
gattcggcacacggggggggctcagtgccagctgcttaaaaatgcccctgtggcagcgaggggcaccagttggctgggtctaattagttgagaagcagtgacacccccaaccactccccaaacaggctggctcccgtytccaggccccaaggagccacacctggaccagaccccaggaaagrcaagggcgctagtggttgggaagccaccccgccatgctgatgtnagagaaagcaagatttctggagaagcagcctcctgggaaccagaggagggccagcagcaggcagcccggaggacagaatttttaccca

SEQ ID NO: 480 - DNA, 450 bp, Homo sapiens
tgagagagagatttttcaactggctgcaaacaagatagggtagatcttggaaaccataatatagaggaattgaaggcacttggccatgagaagaaagaagtcattgcaggcaagagcactgtgttccaatgcttagggatacagaatgaagaacagaattattttgtgtggtccagaagacaaatctaggacaaatagttggcttttcatatagggatggtttcatcttagcataargaaaaacactgtcttcartttctcatcatttgagctagttagcaatagaatgaggcacctgcatcattgggcttatgaattaattctgcaaatatgtattgaatgcctactatatgccaagccctgttctggacatgagcaggtgwtcaatgagrtagtcakggatttgccgtaatagaatttacattctagtggggcagataaccaacaagc

SEQ ID NO: 481 - DNA, 324 bp, Homo sapiens
agctgagctggaaacacaatttgttccttaaagttctgaacccaactgttatccagcatggagtctgtctggagaggccagatgtggggcctctcacaggggaataagaagtgcctctcagggtcccacccatgratccccctttccttgcccacacaaccaccaactggcaagtagtaacccaggacctgtagcccccactggcttgacacagagcataatgcaagcttttcctgctccaggtmctggacaccactttgccctttgccccacacgtacagccccctgaccaaaagttggggtatctggtttgattagagggag

SEQ ID NO: 482 - DNA, 472 bp, Homo sapiens
  SITE (12): n equals a,t,g, or c
  SITE (460): n equals a,t,g, or c
cacacagtgatntttatgaaaggacttgaaattactgggcttctctgtatcccccatatcagtgagatcaatggtccccattgcttttcaaatggaatgaaaaaagtaaagaattaactcattgagtgttttgccatataaaggtcacctacttaatatctatatcctttatcattttgttttgtttggttttgtttttatgagtcttgtattatttttttgctttttgtattattattttcttacttattaaaaaggtaattaatattttcatattgttagacacttaaacccatatttaagaattactgtgatctaattaatcagggcgtagtgggttcgcacctgtaatcccaggctacttggggagggctcagggcatgaggaattgcttggaactcagggagggcagagggttgtcaggtaaggccgaggattttcactggctgtcactccaccnggggggcaacag

SEQ ID NO: 483 - DNA, 152 bp, Homo sapiens
  SITE (50): n equals a,t,g, or c
attcggcacaggtttgcctggcatccagccctaggagcaagtaacctgtntggccaaggggccctctccgggtgcaggagtractggtgggctggcaggctgcccgggwctctggccaaagcagtggcctcagcaaagccacccacagggtg

SEQ ID NO: 484 - DNA, 278 bp, Homo sapiens
agccagtgctgagttcccttcaattacacggaaacgaggtcttcggggtttccatctraggstgtatgagtttcctgtgtctgccataacaaataaccacaaacctgatggctggaaaataacagaaactcactctcccaaatttctggaggcagctggaggggacaatcgcttccccacctcttccagcttctagtgactggggttcctcgcctgtgtcttcatcactcatcactcaggtctctgcctctgtcttttctcctgtatgtctgttttta

SEQ ID NO: 485 - DNA, 524 bp, Homo sapiens
  SITE (443): n equals a,t,g, or c
  SITE (454): n equals a,t,g, or c
  SITE (500): n equals a,t,g, or c
tagttgcttatcatcttcttactttactccattctcaaaaccttaaattttcagaagcatgaaaacgttttaatattacaaggttatggaatctgaagttttgtattatctatgtctttccacatatgttcaaggccagtgtggtagcaataaaacctcaaaagtccagctgatattttctgtgtgcatagtagttattactgtagttaagttggcattaaaaagaatgtttgacacaactaaagaattgaggctcttgattacaagaattggacaggactaaatgtattttaaaatggaatttattagggcatttgatggtatatgcttggagcctagtgaacttaggtttgaattttagttctgcttcatggaacttggactttaagcmagtatttgaacctttttaaggctatgcaagttggggataattagtgtcttgncagggattgtncccgaagtttacataccaggactatgtaaccatttggcatttgctnggtatttaaaaggttccaaaatgg

SEQ ID NO: 486 - DNA, 678 bp, Homo sapiens
  SITE (598): n equals a,t,g, or c
  SITE (656): n equals a,t,g, or c
  SITE (662): n equals a,t,g, or c
  SITE (674): n equals a,t,g, or c
cttttcgatgttctagcatgtcttgcagtttatattgcatgcccttaaaaaccctctctcttgaaaatccgtgtgtgtcttcctacttgtagagaccccgcagatgtgtcttcagagagtgacagtgccatgacctccagcactgtgagcaagcttgctgaagcccggaggacaacttacctctcaggacgatgggtctgtgacgatcacaacggagacaccagcattagcattacagggccttggattagcctccctaacaatggggactactctgcctactacagctgggtggaggagaagaaaacaacccaggggcctggtgagaagcagcatatcctttgaaatctrtatatagagagagttataggtaaaattgacataacaaaatgaagagctttcaagtgaaccattcaggggcatttagtacattcacagcactgtgctcccatcacctccatgtcatttcaaaacattttgatcaccccagacaggaaaccccatgggcatggaaagtgttcacattttccccactcttccctttccccttcagctcctggggcaaccacacatttgcttttctgttgttctatagggnttttgccctgtttcttgggggcaggctttattattaaattggggatttcacagggacnttttangccttttttgtngttc

SEQ ID NO: 487 - DNA, 548 bp, Homo sapiens
  SITE (320): n equals a,t,g, or c
  SITE (326): n equals a,t,g, or c
  SITE (539): n equals a,t,g, or c
agcgatggtagtagaccgctgtgggtgctcatgagatttatattaagcgttcataacttcctaaaacatggaaggttttcccctcaacaattttgaagctgtgaaattaagtaccacaggctataggcctagagtatgctacagtcacttaagcataagctacagtatgtaaactaaaagggggaagggaatatatgcaatggttggcatttaaccatccaaacaaatcatacmagaaagttttatgatttccagagtttttgagctagaaggagatcaaattacatttatgttcctatatattacaacatcggcgaggnaaatgnaaagcgattctccttgagttctgatgaattaaaggagtatgctttaaagtctatttctttaaagttttgtttaatatttacagaaaaatccacatacagtattggtaaaatgcaggattgttatataccatcattcgaatccatccttaaacacttgaatttatattgtatggtagtatacttgggtaaggtaaatttccacaaaaatagggntggtgccgc

SEQ ID NO: 488 - DNA, 327 bp, Homo sapiens
  SITE (124): n equals a,t,g, or c
  SITE (267): n equals a,t,g, or c
  SITE (326): n equals a,t,g, or c
agcagcaacctagtgtatccccccaaggatggtgtctgggtccggggcctgtacctggaagtgctggctgggaccggaagaactsctgcttggtggaggcagagcccatgcagcttgtctcctncatgcccacgatccacttccggcctgcagagagccgcaagaagagcgccaagggcatgtactcctgcccctgctattactatcccaaccgggcaggcagctcagaccgagcctcctttgtcatcggcattgacctgcggtttngggccatgacaacttgatcattggatcaagagggggattgtttattatgaggcttggana

SEQ ID NO: 489 - DNA, 796 bp, Homo sapiens
  SITE (793): n equals a,t,g, or c
cctattttggctcggctcctgcccagcacctggcggcctttgtaggcctaaagcttcctcaagtcaagcgttccaggcccagatcatgctgcccaggggscttcacaggccagctactgcctgacgatggcttccccaggcccaggtcttgccttcccccagcctcccgaggcccagcccttgcctcacagttgctttcccagtccacgttacagcctgttacccgacggccttgacagaccaaactcttccttcacactggacagtttaggacaagctcatacgtcttccagcctctccaggtcaaagctcctgcctmacactkgcctctataggcccaggtgctgaatcgcaatggtctgtttaggtccatctcatgcctttctcagactctccaagcgacgatctggcctgacacttgcttctgtgggccatgtgatcactcacactggcctctttaggatcaggggatgcctctccacaggccgagatcctgcctgttgtaggccccttcaggatgcgccgctgcctgacagtggaccctccaggcctagatgttacgtgatcatggcctctgcaggtcaagaatttaaattttcgcagcctctataggccgagctactgcctcctgataatggcttctgcaggcccaaatcgtcctgaaataagcctcgccaggaacagcacgtgtgttggatgcccgaacaaccatagcttctcccgcacragtgccatgggggccggctcttgcctcagcctgccacctcaggcccagttctgtcctgttggcggncgc

SEQ ID NO: 490 - DNA, 578 bp, Homo sapiens
  SITE (511): n equals a,t,g, or c
  SITE (555): n equals a,t,g, or c
aaagaaaaccagcaaaaaataaaagtgccatctccttggtgctgtgttcatttaagaatcagcgttccaggctagactttatagtctgattaaaaccaaaactgttactaggttttaaaagttaaatttttttctttaaaatgatgagtcagctttggtataattcaatttttgtaaactgttttaactacataggtagagcttataggtatatctataataaaagcattttacttctttgggaggatgctggctgtttttgtgtctttttgtaagctttttggcatttgtcttgattgtcctctatgtgaccttgagcagaggtttctgtagatgttgattcttgctgttttgtctttgcagtgtcagatgtttgtttcagtggttgttgaggtaaaactgtattgattttgtgtcctcggttgctttttgttctgcagacamgtgctcccgagtcagaagggcctkgcactgggagccagggatgctgttaaggttctccccttttttnccaggttaaacaaccattggccccaaggtttctcaatggccctnaaggtttgccccggtttcccttt

SEQ ID NO: 491 - DNA, 662 bp, Homo sapiens
  SITE (213): n equals a,t,g, or c
  SITE (589): n equals a,t,g, or c
  SITE (651): n equals a,t,g, or c
  SITE (655): n equals a,t,g, or c
accaaatgtgttcttgtagagtgcgttattttcccctattttctctgtggtattgcaaacagtcatggtgagtgctgcaggttatatgaggataagtaagacttggtacagaaatgtccagaatactcaaaactggaaaaaagtgatccctgatagttaaatggtcaagataggcttcctgaaggtgatggtgtttagccagtcctggaaggnatgcgcaatacaatttccaacaggtagaaataagatgattaagggtaaaataagaaaggggaagattagtgcatcatatagagcaggactgttgaaccagaagtgtagascacaagttgagggtatgctaggaaataaggctagaaaagaaggttgagatcagattatggagattcytattaatactaaactwagcagtttagcttatttctggtaggcattggggtgccgctggagagagcagggaaggaatatatgatgctaactaaggttattttgacaatgctgtaattgaaagtgaggaagagagacactttactacaggtaataatttaaaggccttccatgtacagtcattgtgccagaaacttagggntaaaaagatgaatataatacaatgccacacctttggtccttgtagtctataatgggaaaggntaanggttaaa

SEQ ID NO: 492 - DNA, 427 bp, Homo sapiens
  SITE (332): n equals a,t,g, or c
  SITE (342): n equals a,t,g, or c
  SITE (395): n equals a,t,g, or c
  SITE (418): n equals a,t,g, or c
aattcggcacgagctccgaagagctagagctgacactcggcgatgagctaagacgctgtttcagagcgtttgggtcctctgaggccccttgaccaggagtgtctctgaagatacagtccaaagaaagttctccaaaacaaggagarcagtctgaagctggggatggcaacagcattggtgagtgcccattccctggctcccctgaatctgaagaaggaggggcttcgggtagtgagggaggatcactactctacttgggaacagggattcaagctgcaaggaaacagtaaaggcctttgacaggagccattgtgcaacaattcaggcagttncgtatgaagngaccacagacctcgagaagataagtcggtccggagtttgtcaacattggtaanccgagaccctaccagggcagtcntgggttttg

SEQ ID NO: 493 - DNA, 520 bp, Homo sapiens
  SITE (483): n equals a,t,g, or c
gaattcggcacgagtgacattcttgtttttgattgggtagtttgcctgttcattgatgttcatagtactatagaaggtagataaatggccacatacctaaagaaaatcaaaggggacaaaaagtgagagtctgttataaactaaggattataattaatgtaattcagtacaactgtggacaattttgaaaagataaagattgatgtcattttagtcattttatagataaactaaaaatgggacatttttaatatcccattttagcatttttcatagtttacacaaacgktcctatattgctagatagcctagtctgtgaactccctgaggaaggagcacatgtgaagtaaatacttgtcattatcatagtgggttcagtggaatatcttccggcttatgttacacttcatagactatataattaaacaaaacggttcaagcagggaccatgacataactgaaatcaaatctagaccaaacatnttaataatataattccacaaccatttttggtagttcg

SEQ ID NO: 494 - DNA, 441 bp, Homo sapiens
  SITE (323): n equals a,t,g, or c
  SITE (403): n equals a,t,g, or c
  SITE (426): n equals a,t,g, or c
aattcggcacgagctgcgaccccagtcatgggccagacctcggtgtccacgctgtccccgcagcccggcagcgttgacggactggacaaagcttctatagcaaactcagatggccccacagcaggttcccaaacacctcccttcaaaagaaaggggaaactatccaccattggtaaaatctttaagccttggaaatggaggaaaaagaagaccagcgacaaatttaggaggaaacctcgggcagtatttaggaaagggaaggatattccacacggacaaagtaggaggagggagcttgataaggaaggggggagtgcttttangggatttgccttgattcaagatgggagatgttaccagttttaccttttggaaaattttccaaccggggggcacattgttnaccccttcggggagaggggattnttccccccgaggagg

SEQ ID NO: 495 - DNA, 739 bp, Homo sapiens
  SITE (688): n equals a,t,g, or c
  SITE (693): n equals a,t,g, or c
  SITE (700): n equals a,t,g, or c
aattcggcacgaggaaattgctgcagagactgccatagctcacacttctcgaggttcacagtttttagcctttgatacttgtgctcagctgttaagtgaaagctttcaccaaacagacttgcagttacagtgtgggtgaaataaagatgaatgatctcatagaagagggtaatacagagtaatttttaataawaaaaaataagcagaggatacaaaatggttttatgtctaatccaaaagaatgcagattaaaacgaaagtacagtatatgatttgtcaaactggcagataaamcagtgttggraaaggtattatgatacagccagtctaccactatgtattgcttggtaaatattttatatccttcaaataattttatttaaaaagttaaaaattatctaaagaaatatttagaaatgtgcactgtcaaaagaatacgtaaattttagtgttataatacttaaaagtcagaagcaacctaaatgacccagtcggtgataaagtagctaagtgatagtgcatcttagtggataaaatgttttacccattagtcatgttttaacacctctttgaagggacacacaggaaaatgttttttatatagtacaactctaattttttcctatacatttcacatttgaatgccaaactrttggatgttatccataggctgttcagttaaaagggngactnaaaaacntacttttctggtaatttcccaaataggtcctacatgttt

SEQ ID NO: 496 - DNA, 338 bp, Homo sapiens
aaaataaaaatttctcaatggagggagaaaaacgcaccaggaaaatgtcmctacaaagtggagaaaaattggcagtactttcaacattcattttgtaacttagttaagcagtgagttcacaaagcggaggtaaagacattcagagcagagatggctagacagtaagagcatgtgaaataagaattgacagactaagaaaagaaatttaaagaaaagataaaaaatcatttcagaaatgaaaccaaagcgcaaggagccaaagaaagagctgatcccacagagagcaccggggcagagtgtccttgtgtctaggaagggtgtcataaatgtttgcttaa

SEQ ID NO: 497 - DNA, 265 bp, Homo sapiens
  SITE (217): n equals a,t,g, or c
  SITE (231): n equals a,t,g, or c
gcwatctgtaacagttttggtagtggtattacagaggatttgtaaaatggattggagtacttaccactatttcatctgctctgaaatagttcactaaccaaactactgacaacagtttaattttkgtyctttccttaaaattatacagactgcaccaagaacaccatatggacctagtaacacttcagatttttagaccttacaacctttgcaagtncttctatgatttcngggctctttagattttctactgcttgagtcactt

SEQ ID NO: 498 - DNA, 293 bp, Homo sapiens
gtcttagagtgacataaagtagtcttaaataaatagttcttagtttattttaagcagttgattgtactaacgagatgtaattatctgaagtatttatgattagcatattggtttttataagtatttctgagttattgagggtgcttaaaaatgctgaagaaactttaaaacatgattcttcttataattttatgtgattcttatagcacaatcatttttgaaaaaggaaaactaggctgggtgtagtggctcatgcctataatcccagcactttgggaggccaaagtgggtgg

SEQ ID NO: 499 - DNA, 342 bp, Homo sapiens
  SITE (293): n equals a,t,g, or c
  SITE (303): n equals a,t,g, or c
  SITE (328): n equals a,t,g, or c
gcttaaagatccaaaccccaaattctaaaaggtgaagctggctgtaatgagagtgtagtttaagcaatctataagtcatttcacaaaagaatgttcacacttctatcatgtagcaattatccagctagagtacaatataactattaatacatgtttattcccagtaaatcataccttcctcaaggacagggacttttgattcatccctctttttatttcagaggtaaagagtaggcaaggtactcaggtaaggtgttaataaattaaattttccccttttgaataaggcaggntaaaacaggngtttcaattcaaaaatatattaacnggaatatggtacta

SEQ ID NO: 500 - DNA, 557 bp, Homo sapiens
tttttattgtataatttatttacaatagtatttaaaggtaactttgtaaaataacccctaatgatataatctaaaataaaatagattgtatttaaatcacttttttattatataccacgaaaactactgaatgattaaaacattcttaagtggttcttaacattgtatggaactggaaagagcagttcaatcacagaggcatgggcactgtgttctaagtggtcactgcactgattcagaacagcaggggctggctctgtactgggtgggtgggtgctcaaggccagacctacacagtgctcctgtgtctgcagctgcagggaagcaggagaaacagtgacgatggtccaggagaggccacctgacatatggcagaaaaacaaaattcagggtacagacagtggctgggagcatcaactcaatcgctttctttctttactattttccctctttctaaaaaagtctgtgatttagatcagtggctgcaggagggagacaagagacccagtaaagatgttttcaaagatgatgcctatctggtgtgaaaagaaatgaag

SEQ ID NO: 501 - DNA, 401 bp, Homo sapiens
atctaaagatgatgagaaagtgtttcactaaaatatattttaaatatatacatataaaaagaaagtgggtgaaagaagaaaggaaagaatttagattggtcattagagaataacttcctgacaacaaaaattgagacatgaaacacattatcaaagaacattatgttggataaactgaagaaaatacaaccttgtgaacggctgtcaacacacaaatagtgtcaacatacacacaagatggggaagtacaaatatagtctacttggctcagccccacttataatttaaaatagaaaaataaaaaaaggaaagtggtaaaataagcttgacggcaccagtcgggattgcactacaattctgccagcttaaatacaagttagcaaaatgctaaccccagttgg

SEQ ID NO: 502 - DNA, 153 bp, Homo sapiens
tttgttttagttctttgtttaaaatttttttttaatatgccatgttaacctttttaaatgtgtaaaattcctgttgcatttaattacattcacgatgttgtgcaaccatcatcactatctatttccacatttttccatcatcccaaacagaaa

SEQ ID NO: 503 - DNA, 357 bp, Homo sapiens
  SITE (28): n equals a,t,g, or c
  SITE (166): n equals a,t,g, or c
actagttctctcccaagacacccctgtntgctctgggcctgaaacctcacaacccagcggacatcctgttgcaccccacaggaggtgagttgggaagagggaagatggggaggggggccagggggaggaggactcctgtggttctggacagaaacccgggtctcanaatctggtcagcagccagctttgtgcccacactgaggtcaggcctgggttggggctctctgtgtaggggttgggggtgacagatttccttgcagccttcctgtctgttgacttgtggagtttgcacaactyccagcctcctctagcttgaggctttggaggcctggtctcagtttccttggtggtgttgag

SEQ ID NO: 504 - DNA, 531 bp, Homo sapiens
  SITE (394): n equals a,t,g, or c
tcgctccctttcgcttacagaaaggatttcttccgacagacgtgaccccagaaggctgccgagggagactttaggacaagaggcgttgtttttgtgagaatgaatttttatactttaccccgaccccaccccctaccccccgyccaggtaaatccaagtaaatgattttctgaaggtcggtctcctagaaagcgtttaggctctggttttttgttttgtttctattttcgtgttttcccagttagggaaggaagaggagcctgtgcagagttgaactggggtggagaggtgccttgtaaagtatggtttccagagatggtgagacctcgtagctaagcgttgtttcctctgcacgtaactgtgagttgtgaacttgtggctcctgggggacggngacagggcctggcagtgcgggggagggggcaaggaattcaggaagttggcgagaattcttcgtttttcattcttcgttgtaaattgcttctaaacacttctgaattttaaattgctaccgagaaggtccagaaaccg

SEQ ID NO: 505 - DNA, 418 bp, Homo sapiens
  SITE (363): n equals a,t,g, or c
  SITE (400): n equals a,t,g, or c
gtaaaatggctgctccggctgctctttttggctggtcttaaggggcgcaaatagctccaccccatttggaaagcacttggcaatggctgctaagactttagtgtttttcatagcttctaacctgctaagaagtagatacttgttcccattttgctgctgtgcaaacagacttgtagaggtcaagtatctcgtacaaggttacattgatggtgattgatggcgccaagatttgaacttggttgtgagtccaaagtctaggtctcccattctacccatgtgattttacacacatgcctgatataattagctcctcctcctctccagagaaggggcagctgacctttgtttcccagttcagaaatnccgggggttgagttattcagctgggggtttgagggtnggattaggatttgtttcc

SEQ ID NO: 506 - DNA, 479 bp, Homo sapiens
  SITE (6): n equals a,t,g, or c
  SITE (135): n equals a,t,g, or c
cctttntccaaccgtgaaagtagtgaatacctgaatgtaccgtgtaccccaaaatgtataagttgcctagaagcttccaggcagagctcttgttgattgtatgtattatgtctctattgtaattgtacttgtttntctgtatctgtgtaatgcattctgcgtgtacctttcttataggcttacaacctacacatctccttaaaaaaataacctggtagttacatgtggcaataagatttcaaaatattttttattccagtgtaccctaggatcattttgcatatttatgtaaattgtgtggctgatatgaaaaaaatgtcataagagttgttgctgcaggtcctatctttgtgtatatgtaagaagtcaactagttccaaggtggtgatacaataaactgaaaaacaatatttcaaaaacactcctacactcttttataaattgttgtcagttactaaaatgtggtggtaatcataaag

SEQ ID NO: 507 - DNA, 256 bp, Homo sapiens
  SITE (238): n equals a,t,g, or c
  SITE (245): n equals a,t,g, or c
aaaaaagatccaaagaaagggtggtagacaaaggtctagctcctaggctgagggcctcagggcagaatgcggcttcatcctgagtcaatgatcttctcaggtagttgcttcatatatacccccttcccaacaccagagctgctcttagactgaggtcaagtgtgagccagagatggctggagatatgagaacaagagcaaagcggacaggaaagggctaggagggatcgcaccaacanacttcancctgggcgaca

SEQ ID NO: 508 - DNA, 473 bp, Homo sapiens
  SITE (431): n equals a,t,g, or c
ggtaagatttgcatacagtgaaatgcacaaatttaaaatataccatttggtgagttttgatctacaactgtgtagctcaaacctctgtcaagaattagaacaatatcacctcagaaagtcctctcttgcctgcttctaatcagtcttcttgcacgtcaggcaaccattgtcctaatttaaaaaaaattatagataagttttgcctattctagaacttcatgtaattgggaatcatacaatatgcatactttgtttctgtttttttcaccttagtgtttttaatattcatccatgtttatccatcctattagtagctcattgctttctgttgctgtgcagtattccattgcataaatataccacactttttatccattatcytttgrtggacttctkggcaatttccatactttggctattatgtataaagnttctatgaatattcttgtgcaagtttttcatggacataatgt

SEQ ID NO: 509 - DNA, 217 bp, Homo sapiens
  SITE (40): n equals a,t,g, or c
catatgttgaatattgagctagcccctattagatgccatncacaggaataaaagaatgagaaaccttctcttctttctcatacccctcaagtggcttacaatctaccaacatggagaccacacagtaagtcctctacttaacaacttcagcaggttctcggaaactatgactttaagcaaaacaatgtataatgcaatcattttttccccccaatca

SEQ ID NO: 510 - DNA, 605 bp, Homo sapiens
  SITE (464): n equals a,t,g, or c
  SITE (505): n equals a,t,g, or c
  SITE (540): n equals a,t,g, or c
  SITE (552): n equals a,t,g, or c
  SITE (576): n equals a,t,g, or c
  SITE (581): n equals a,t,g, or c
ctcgagtttttttttttttttttagtagagacgaggtcccactatgttgaccaggctggtctccaactcctgggctcaagcaatcctcctgccttggtctcccaaaatgttgggattacaggtgtgcgccactaagcctggttagtcctggggctcagaagctatcagaatagactccaattggctagttcacaccatccctggcacgtccatccttcccacctccacttctccttggaggcagcagcctctgttgtcctctgttcctgaaagctgagctgcatgccttctggattcctggctccgtgaacgttcatattatgttaaagaatcaataaaaggatcaggtgaatgaacccatcctgcaagacaagcatgatgcagcactgaccaagcatggctctaaatcaagggagcctggccctggcacatcgcaggtcactaccagcggtcactgcattgtncccacaatcctgcagagacacgaggacaataggggcgaggntctgtcctgggcaccagccgggtaatttctgtgtngcagacaacagntgttgccagccaagccgttcgtgntgttngttcagggcatttccccggactgg

SEQ ID NO: 511 - DNA, 553 bp, Homo sapiens
  SITE (59): n equals a,t,g, or c
  SITE (136): n equals a,t,g, or c
  SITE (456): n equals a,t,g, or c
  SITE (476): n equals a,t,g, or c
  SITE (484): n equals a,t,g, or c
  SITE (525): n equals a,t,g, or c
ttttgctcttcctgttgactggaagtctgtctacttgaattaacaagggctcttcttcncatgacctcatactcctctcagtttaaaatctgcatttgagcagtggatgcaaaacctaactggcaatataaatttncatcttcttgaaatgggctccaagaagcaggtttgtggccagtagagccagctcagaacccaggagtggtacaaaaagcattcagatatcaagattcccctcckggctgcatcttccatgggggaggccatgaaaggggcccctggtgaaccattgagtcatttatagctaatcttagtacactccctgaagtagggratgacatgggctgcaagaattcttcctaagcaccccagagagaacttcaccgatttaaaatatgagtttctgtaacctgagcaggagcttgcctgggtgcaagggcttatgcagcctgcctnccagggaggccaggagggtncgcacttnattgagctttgagcaaatggggggcttttggggaattcagncagcctccctggagcttttcctgggagc

SEQ ID NO: 512 - DNA, 669 bp, Homo sapiens
  SITE (567): n equals a,t,g, or c
  SITE (624): n equals a,t,g, or c
  SITE (636): n equals a,t,g, or c
  SITE (638): n equals a,t,g, or c
tggctggagtgtgggggtgagaagtgggtataaagtggagaggagatgagcttggtctctgctctggtctcagcctttatgtactgtcttggtgggatgaccgtggttgggtcctgcctccaagggtatcccagaggtttctagaaactcccacatggacaggcacttgaaggatagtgctggtgattgggcaggtgctggatggaggtgaggcctaaagcacacccggggacagaaggcagcacccacacgggagcccagctttcgtgccagggactgtattttaggtgctggatcttgtttaaatcttccggctggctatgattatcctctaagctggggaaggaagaaaagcattccagtactatacctctgtttgggttaaaggaggggaaagtattttaaataaaacctattagagttaaaaggatgagtagcmataaaaatatctttgaatctctgatggttctattgtagtcaaaagttttagataaattgtgaagaatctctaatcatgctatgtggagtttttctcttttaaaaaatacaagttattgtatatacttnaggtatataacgcgatgttatgaatacatttaggtagtaaaaaggttactatagtgncagcaatggacntnttcatcatctcagctgggcccaaagtaattg

SEQ ID NO: 513 - DNA, 578 bp, Homo sapiens
aattcggcacgagcagaattataaaactccttcgaaacttgctctgagcctgtcctccacaaatacattcagttccctacaaaataatgataaagcatccttcaaggacagataatggacctgttatttccctacagcttgagtagcccctgacttaagaagagcaactgaatcatgggatgctggtgtgagttactcaagtcatcaaattctatcattcaaagggatctcaaggtcgtcttgtccagtgcttcccatgtggtataccagtatgccaccacatacggctgggccactgcagagtggcgggtgagcctcaagtcactgactcccttcagctcagatgtaccttgtgtacaacttacaagrwtaatcatgatgatgtgtgatttttgctttacawgytaatgttagatccyaatgtgagtaagrgagatctcccctgaactacatggtactagacttcatgtgttaatattctggtgtattatttgttgttgtttggccagggatggaaaaactcattccaaatgtgcttattattaatatatttgttatttgcaagaagttacacaggc

SEQ ID NO: 514 - DNA, 450 bp, Homo sapiens
  SITE (12): n equals a,t,g, or c
  SITE (165): n equals a,t,g, or c
  SITE (327): n equals a,t,g, or c
  SITE (402): n equals a,t,g, or c
ggtgctgcctgntctagaactagtggatcccccgggctgcaggaattcggcacgagagcgaatcctaccttccaaacaggttacactcctggcacaccttacaaagtgtcctgttcccccaccagcggggctgtgccaccgtactcctcctccccgaacccctancagactgccgtgtaccctgtgcgaagtgcctacccccagcagagcccgtatgcacagcaaggcacgtactacacacagccgctgtatgcagcacctcctcacgtcatccaccacaccacggtgggtgcagcccaacggcatgcctgcaacggtgtaccctgnttcccatcccccctcctttggtaaccttattttttatagtaagtacttcttattaattttttttttcaaatcttnattttataaggaagtttagggatattttttgcatggatcatttgtaaa

SEQ ID NO: 515 - DNA, 316 bp, Homo sapiens
  SITE (297): n equals a,t,g, or c
tcatttcctgggtactgggttgctcagcactggcctctcaagttgctaactttttgaaatcctgaggtatagaattctttgttctattcctggtctagctggtataactcagcccatgcaaactgtcctggcccttcagtcttttcatgctccataactttcacaagatgctgtacacctgctacagacattggtctctaaggagttattctctagtgaatctctttctcccactcaactccatgtggggatatctgacccttctatcagtacaacgataagactcagattgggtcnttttgtttgtttgtttgtt

SEQ ID NO: 516 - DNA, 378 bp, Homo sapiens
  SITE (194): n equals a,t,g, or c
  SITE (200): n equals a,t,g, or c
  SITE (350): n equals a,t,g, or c
  SITE (365): n equals a,t,g, or c
ttaattatttgcagagatggtctccctgtgttgcccagcctggaaaatgtatgttctaaaaatagtacagcaccgcgatgtcttcagcatgaagccactggaggcagcatggcaggctccagtcaccccagcactcaccagttcttacaggccttcctctttttcccttccccacaagaagcagcccgcagaangctggnatctggcttcttcaaatcttctggatccagcagctcatctgagtcaatgagatcctgggagagtgttcaaagcaatgagtgatacagtcgtgggtctctgctaatgaaaagctaaagtkactgcaggcttcgagagggaactttggagtnccagggttaaagaanggttttcccccct

SEQ ID NO: 517 - DNA, 551 bp, Homo sapiens
ctcgagttttttttttttttttttgagagggagtctcgctctgtcacccaggctggagtgcaatggcaccatatgatagtcttgacgactgcttgagaatggtaagaatacagcgacaaaatacccccagtatgttaaaaagtggctatctttaagttttaccataccatagtacagaaactagatttaaataacgcccatacaaatataatgtattcttaaaacactaggttgggggaagttgtggagggcaacccctgaaagtaaatatttttacaaagccttttccctaaaaaataggtataatgcttttaaagttaataaaaccatatgaaaatctagtaattttgcaaatgtactgcagacctccaagtacatatcaatcaaatactctgcacaaaaaytttaggaaatggcayttaatatcacagcaaatgtcagcgagcatgctagratacgcgctctgaaagctggtgaatgggttccaataacataacaaaataaatagaaaccgtgctgagtaatcgggatatcaacgtccgagattgcgt

SEQ ID NO: 518 - DNA, 517 bp, Homo sapiens
actaacttttgtgctaatgcagctctgggtaggggggaagttttaaaaagtaggtaatgtactgaatcggatttcgtttcacccttagaagttaactctcttggtgctttttgggaaactttacacctaaccttaaaagatgtgagagagggcatgctacctaacaaatcactgctgtgcagtaaggcgaaaaacttcaaagttcgccgaacaaaaggattagctcactcttgcagccgctcttcattgaatgcatgagttttataaggcaaagactgcgagaacactgtaaatgtaaaggaagcagttacttaagacatatttgaatcaagtaacccttaaaagactctattacgtattcgccatgaccttagaaggtagaaaaacagttataaattattgaaaagaaaacgtgccaatcccacttcctgtagctttttttttttttttttaaagaaaaggggtggagagtggagagccaggcagttgagtgccagtttatactgtaacatgtagt

SEQ ID NO: 519 - DNA, 604 bp, Homo sapiens
  SITE (366): n equals a,t,g, or c
  SITE (499): n equals a,t,g, or c
  SITE (588): n equals a,t,g, or c
ttttaatgatcgcagttagcatgtatttatttagcgtttagtatatgccaggcagtttcaagcatgttacgtgaatacatcacattcaatcttcatacactcttccggtaatttggaggcaattttcaactctgctgcagtttctataacatgggactaatgatagtacccactttcagggggctgttgtgaggatggaatgagctgaaacatgttatttggkacatgtaaaccttagctgttctagcattattctgccacttaagctgtcttcgagctgcagtgtcttctgctgtaagggggcattaatactgycctcacagggttgttgcaagacatgacggtaagagtgacattctgtaaccnataatgtaagtgtgttttacagagttggcatttggcctactctagaggcaagttagggctmtttgctggtaggaaacttgaacagctttgaactkgaactttgaagtgtggaggctgagggtgatggaggaancggggaagcgccccaaaagccctgcatgctgtccataccccatcactgggggtttgttaaatggaaagattgaagccggcctctcccanattctccaaggcttgc

SEQ ID NO: 520 - DNA, 562 bp, Homo sapiens
  SITE (444): n equals a,t,g, or c
  SITE (472): n equals a,t,g, or c
  SITE (497): n equals a,t,g, or c
  SITE (532): n equals a,t,g, or c
tgctgatgtccaagttatttattaacagaggggtcatcacagttgttggttatattcacagactcagctgtgactataaatgctctccaacctgctcagggtctttaatgaatggaagtgggctttgtgagactaaaaacaatttggaaagttcatgaagattacactgaggccctattgagaagctggaagtgggagcaataagatggccctctgagagcaaaaacataggagcaataccagggtatagatgggcagaccagcagagatgcctcatgggaccacaaagcagcaaggccatcagggtctcaggaaggaaagagrgctggcctgatgtgggggaacagggcaaggagagtccctgggggatacattggcagaacccacacaagcccccggcagstgggttgcactcwtgggagctggggagaaagagtgttaaanccaaaccaggtcctggccctcacaaggnttggaacagtcttagtgggaaggtnaccgaaaaaccaaccaatccctagaaccacttttncatttttcaggtggacattcagaccgattc

SEQ ID NO: 521 - DNA, 461 bp, Homo sapiens
  SITE (455): n equals a,t,g, or c
atgtgtccccgcccggaatgtcccccagatgccccccgccttgtccttgcctgggtttcccttccccaacccatctccgtcaatttaaaaagggaaaaaacaaaaatcctgaagtcctccccaaccccagragscttctcccccagagaggacaaaaaagcccaacttgccaccagatgctaaatgagacttgacagctgcagagcttgggctgtgctcatagctaagggttagggttcaatattagaaggagattaacattataagtgaaataatatgctctaatagattgtggagggcaggtttgagggacttagtttacctattctacactaacaagtgttgttttggtccatgcctggaccatgtcacaaaaaggaggtgcccccctgtgctgtcactgtgaatggaaaggatgggtcacctctcttcatctgctgcttggaataaaaaantgcagc

SEQ ID NO: 522 - DNA, 375 bp, Homo sapiens
attaataataataaagattgagaggaaaacgtcacattttctgaatggttaattattatattagtgatagcagcctgagtcttaaaaattctcccttaaggacaagcatgtggctcacacttataatcctaacactttaggaggtcaaggcaggagaatcacttggctcagaagttctgagaccagcctaggcaacatagggaaacactgtctctacaaaaaaatttagctgggcatggtggcattctktggtcacagctacttkggaggcttaggtgggaggattgcttgggccaggaggtcgaggctgcagtgacagcctaggtgacagcaaccctggtgtcacctggtgaaaaaaaggtgaccctgtctcaa

SEQ ID NO: 523 - DNA, 714 bp, Homo sapiens
  SITE (482): n equals a,t,g, or c
  SITE (694): n equals a,t,g, or c
gcgcgtaatacgactacactatrgggcgaattgggtaccgggccccccctcgagttttttttttttttttttaggtataaatgaacatgatattttttattagatatttccaaattaccttccaaaaaacattgtaacagtttatacttataacaccaagtattctatcgttgctgcaaggtcttcatcattgtttagtctttgccaatctaataagcaaaaaaatgtttcacttttcagtttgtatttatttaaccatgagggaagttgagcatttctttatactgattactgtctttcctgtgaatttgcgggcatctcatgcttgtttgtggtgatgtcccttttagcccagagctgtagtctggatgcttccctttctgccaattttctgggagctcttcagtgcccttctgtgggagcccattgaggtttttgtggaagcagagctctaagcctgtgtgttccggtctccaccaggnkggccccaatgtcagtgtatgcttgtctgggcaatgatgcggctgccattcgtgatgccttcctgacccgattgcagagcaaaattgagggacatgcgcatcaaagtcatggattctaggagttcctcactgttgcagtaggaggacccagccaggggctcatcgaacttgttttckgaacccgggaagtttaaggatgggcagtgatgggntcaaaggtaaggctttaacc

SEQ ID NO: 524 - DNA, 559 bp, Homo sapiens
  SITE (177): n equals a,t,g, or c
  SITE (441): n equals a,t,g, or c
  SITE (457): n equals a,t,g, or c
  SITE (516): n equals a,t,g, or c
ataatttggaaaacagatcatataccttggcagaaaagaaggtgctggcagaaaaacaaaactctgtggccccattagagcttagagatagtaatgaaatagggaagacacaaattacacttggatctagatctactgaactgaaagaatcaaaagccgatgctatgccacagcacnttctatcaaaatgaagactacaatgaaagacccaaaatcattgttggttctgaaaaggagaaaggtgaagaaaaagaaaatcaggtatatgtgctttcagaaggaaagaagcagcaggaacatcagccttattctgtgaatgtagccgagtctatgagtagagaatcagatatctctttaggtcattctttgggtgaaactcaatcattttcattagttaaagctacatcagttactgaaaaatcagaagccatgctcgcagangctcacccagaaatcngagaacaaaggcagtaggaaccaaccacatcctttagaaaaaattaaattttggtgganaaaaacaagacttcctgccggtggctctttcttgtctgatgaa

SEQ ID NO: 525 - DNA, 402 bp, Homo sapiens
  SITE (94): n equals a,t,g, or c
tctaatccgcccaaaagcagcagcctgagcctggccagcagcgcctccaccatctcctcgctcagcagcctkagccccaagaagcccacccggnaggtaaacaagatccacgcctttgggaagagaggcaatgcgctcaggagggatcccaaccttcccgtgcacatccgaggctggcttcataagcaggacagctcggggctccgtctctggaaacgccgctggttcgtcctctccggccattgcctcttttattacaaggacagccgcgagagagtgtcctaggcagcgtcctgctccccagctacaatattagaccagatgggccgggagcccccgagggagtccgcttcaccttcaccgcagagcacccgggcatgaggacctacgttttggccgctg

SEQ ID NO: 526 - DNA, 489 bp, Homo sapiens
cctgagatgttgaaccagaagagtccgggtctgccctytacgctgatkacccccaccatgtkgttcacagggtccgtctccatgaccgtaaagctgtataggtytcatcaaagccagaaggattaagaccgcccggggccaagggatccactcaatgtgtagccggacactggctgagagtggtggctgcccactgtctgttgccttgatttgaaaggaggccaacaccaaaactgaggtttggggccaagagacaggaagacccaagcagccaggacaggaaccagagcgtcctgtgattctgaccaagcaggcctctcatccagtcattcattcatttgatgcatacttgaaggcttgctgtaaacaggcaccctgccagttgctgcaggcacggtggtgaacaaaacgtataacctgtgctcaagaacctcatggttagtataaaaataataaatccccctgttaactgaaaaaaaaaaaaaaaaa

SEQ ID NO: 527 - DNA, 576 bp, Homo sapiens
agagcatccagataagaactcagtccactcaacatcttcagctttgtgatattccaggcatattgtgctgaacttctgacttacagaactactgtacgcattgggcaaactagtttctgcggttacgctgtgcccacaaaggccttgtctccactcaagctaaaaaaaaaagaatccagaaagcctggaagatacttttccaagaatttattttctgtttagattctacccctgaaagtcagtcctgaaaggattataaaagcaagaaagaaacatggactctaagaattaacaacagtgtgggaagccacggaggagatttatgactaccctmaattggtttgtgtttggatggatgactatttcctgctctttattactagaaattggcagcarcatctcagattggataatggtactggtggaataattaccagaaagaaaaaaacatccccactaaagtgatgaaaacatgtacagattgtccaaccttttgcttttgtaccacttccccttccagatgtcagggttgtgatttatttctccctaagagtttaaaaataaaactctcatcat

SEQ ID NO: 528 - DNA, 551 bp, Homo sapiens
attagtagtaagtaataaataattggtagtaataaataataagtaatacataattggtagtaattggtagtaagtaataaataattggtagtaataaataataagtaatacataattggtagtaagcagcattctkagatgcatagttacagcattaatttcattattgggaagaagcaaacaagctaaacttgcagtctcacaagcagaaaacataagcaataaataaatgaagttatcactcttgtggcaacaatgaagaaccaatgatacatactttgacaacaaaaagttcttttttaactctaaaaggaatgacatgtggaagcaactgagtagaaaatttcagcaaaatgagctgtatacatcacagattcaaatgaaaaaaatatagatctgtacacaagaatgacatctatgcctggcaagaatgcagagatgggagttcagatcaaggctacttcaactctacttcctaattctttcttctaaaattcttggttaaaatagttaaagcatggaaagcatccttagtgacgactgagtcttac

SEQ ID NO: 529 - DNA, 461 bp, Homo sapiens
  SITE (417): n equals a,t,g, or c
  SITE (428): n equals a,t,g, or c
  SITE (461): n equals a,t,g, or c
tctaatccttagttttctcacctatgagataagaagcccttatcttataaggtgattgtgaggtttcaatgaaattatatatgtaaaatacactgcttaacaaatgttagctaatagtttatattaggctttatagcagtgtacttttattgttgaactccttatgtattcttttacttgtttaatccttttactttgagaaagtggtaacttgtagagaggaaaagatactgataaatgtaaataatccattgcaaatggctgagtgaaaatcctggaaaatgktttaattgaactttattgatgtaatataaaactattcaaatatctgtcaataaagggtmggaktgtatgaaggctcattttagaaacttgagactaagtgactgatctattatttaagaagtaataagttgnatagatatatnggctgtcaagctggaacaacatgtctaactttn

SEQ ID NO: 530 - DNA, 522 bp, Homo sapiens
  SITE (10): n equals a,t,g, or c
  SITE (481): n equals a,t,g, or c
  SITE (502): n equals a,t,g, or c
aatatacccngaagaggggccttccatacaaatagaccgttccataatttatgtaaattttattttaataaaatccagttttttgtttaaaaacccttgtttcactgtcacatatgaaaaaaatacctgcattgatatataattatttcatgttacataataacccaaaacaaataattacttgaatatgtttgtagagatactatttaatttattcatataaatgtgcagaaagattccaaaggagaatatatatcttgtgaaaatatggagatttgaaaatttgacatgatgcaaatagactgatacataatttggaaaggttmtttacatggcagaatacatgtatgaatattaaagtaatatgaatggaaagaataaaatattcttagaagaaaaatgttctggttctaaaagctttttattaaacctattttttgtatgttggaaatgttaggggggaaaagattttttttgctcntctgttgctaggttcatggcngaaactcccgttaccaaaga

SEQ ID NO: 531 - DNA, 467 bp, Homo sapiens
  SITE (453): n equals a,t,g, or c
agaaatgaaaaccagatggtctatgctaagaagtgaaggcattttgttgtcttcagaactgatcaacatggtcatgatcatcatcaaatttcttgtttccaaaggccactattgtagtacagtctccagcaggattttgtaccatgtgctgcctttggaataaagtattataatgtatcttgtcaccttcatcaacaccaccattaaatatgtaagttcctatatgtgactttttctgggcatatttgcatcaaaaatcacagtccttgcctccttgcttgcttttactccatgaaacgcttcatgaagcagagcatgattgtcaagtgaccagagggatggacatttgtaagtggaacgtgggtatacttcacacatggctattacttcatactacataacttagttttctcccaaatcaactggcagtccgttttwtctatggatattccngggtttcggtataa

SEQ ID NO: 532 - DNA, 732 bp, Homo sapiens
  SITE (680): n equals a,t,g, or c
  SITE (682): n equals a,t,g, or c
  SITE (728): n equals a,t,g, or c
aagtgtttacagttttgtctgcaggtcatccccagcacctagctcagtaatggacacttcatggcactcagcaagtgtttgaactggatttggtgtgtttaccccctagctcatggtcagtgactactgcttctgaattaaaaatagcaacacatgatcagatttaagtggggccagaaagaggctgttagggcataggatattttagcatgaagtggataggatcatgagtggtaacccatgttcttagggcccatgtgcctaatgtggtcactgcaaaacaataaaagtggaggcaagaattcaaattagtatatgggagtgagccacttagtgacccagtgcccatgtttcagtgctgctttgtttttcttctaacaaagggcatttttgcctatgtaaaaattggtattggccaattaggacttcacaaaggtctccatatcttcctcaaatgacaagggtcttatgctaaatgtgactctctactgccctgtttgttaacatatgatgcagtacmccaatgcagatcacactgcagttttaggtagtatatagctgaatgcataatttgtattagaaatacaacaaggacattagactcatgtctgcattgacatgggatacagcaaaaatcttgaaattaagtgtgagaaattacagtagtgagatttggaaanangggaataatacttgttgaataaatgcatattttccatttaaattanaaaa

SEQ ID NO: 533 - DNA, 444 bp, Homo sapiens
ggatataaccctatgcattaaaagccctttttgtaataagtttaatatcctaaaaggaatgccaattaagttttgttaactgggtcatcaacttatcctagtacctcagtgttcattcctgttacctgcatatttttttaaaagaaatagctgttattaatgcctttttgttttccattgagtgtacactactgaataagkgtaggagttttatgtttmccatgtgagtcctgcaacmctaaagatattttgaatatcagtcatgatggcaatttytgtataaaaragccttaaatggaacattgttttgagatcaaactccccmccctcmcaaaaatggccmcgttgcaataaaaattgtggcatattaaaaaaaaaaaaaaaaaaaaaaaaaaaaaaaaaaaaaaaaaaaaaaaaaaaaaaaaaaaaaaaaaaaaaaaaaaa

SEQ ID NO: 534 - DNA, 564 bp, Homo sapiens
  SITE (417): n equals a,t,g, or c
  SITE (553): n equals a,t,g, or c
ttcactttttatatatttagagtttttatatgagtgtgaatgtttctgttttgatttggtgaggcatgtcagaggtatatacttgaatatttttctaaatacagctgctggaggaatgcaaatggcaaaaatcatccagaaaaccaaacacggtgaaacatcacatccatttggcatgaagcaaagcattacaaatttggagtgatgaaagtgttccatatattttttatagtgatttttcgatctagagacccttcatattgtttacttactattacgataactttgagargtaaccagagaaagcatttttgccatttccaratgargaagcaggaccagaaagctcttcataaagctttaacaccatacaagtatccagcagtgatcaattgctctttataggaaaccaccttntcctctggggaagaacagtctgaattaataaaacatcagagtggttgagtagtaaaaataaacacagatgtattgctttcaagtcttagagtgacataaagtagtcttaaataaatagtttcttagtttatttttnaggcagttgat

SEQ ID NO: 535 - DNA, 607 bp, Homo sapiens
  SITE (31): n equals a,t,g, or c
  SITE (52): n equals a,t,g, or c
  SITE (514): n equals a,t,g, or c
  SITE (566): n equals a,t,g, or c
  SITE (575): n equals a,t,g, or c
  SITE (592): n equals a,t,g, or c
aactggccttggtaggaagtaaactgtgctntttagtacttacatggattcntaatatctaggaaaacaggaaaatagtgactcctagtgtatctcatatctttttattactaaacaatgccttgctaaaactgcatttcaatctttattagacttatattttgtgtgttgatattctgacaatatccagataaagttgagagtgttaggagaatttcatttctctacaggaaagataacatcttaattttatgcatactatgagtgggaaagaccatataggatatcaaaaaaaaacacaaagcaaatttatggtttaggcttaatctcctccatctcctgcattttaaaggaattgttttagagccagtatggtggtgcctatagttttagcttcttgggaggctgaggttgagcccaggagtttgaggccagcctgggcaacataggtagacacccctcttataattgaagcaaataaaaattttaaaaaaatgtttgaagccgggtgtantggccccaggcccgtaaatcccaacactttgggaaggccaaaacggttgggnccattggangtccaggagttccagtnccagcccgggccaac

SEQ ID NO: 536 - DNA, 608 bp, Homo sapiens
  SITE (33): n equals a,t,g, or c
  SITE (55): n equals a,t,g, or c
ccaagtcagccatttctatacttgtcctgtcancacgctgctggcccgtctcacnactctgctacctgtacatcccagaaagctgccttcccacagaattctgtgatgccattgaccgtctctccagtctctacagccagagtgaggcactagggagaggaaattggagatcggggtgagattcggggtggcaagagaggaagaggagaggacctttggacaggatatagatgtgaagaaaaatatcagctcctagcgagggatgagaaagcatgggttgtagtttcattaatttctgctctcatcagtttcttcaactttctatgaatttgttctgttttctttttctaacttcaagtgaggtgcttatttgatttttagtcttttcagacttttttccaaataaaagtgtttaagactattcatttccctctcaatactgctttagtggcatcctataaagttttaaaagattttttttctttattttttgacatggagtctcactctgtcacccagaccagagtgcagtggtgtaatctctgctcactgcagcctctacctcccgggttcaagcgattctcctgtctcagcctcccaagtagctg

SEQ ID NO: 537 - DNA, 556 bp, Homo sapiens
  SITE (16): n equals a,t,g, or c
  SITE (451): n equals a,t,g, or c
  SITE (486): n equals a,t,g, or c
  SITE (488): n equals a,t,g, or c
  SITE (536): n equals a,t,g, or c
  SITE (539): n equals a,t,g, or c
ttatgtttatatattntaaaaaatatttttatactcactagacccaattttatactcctaaacccagggaataactgtttttttttctcttacataggcatgataccatagacaatgattaaaattgtaattaccattcatttcttagttttgtggctgggacactgatgtcttcaaatgttagtttgcaaatacagtcagccctctctatccatgggttacacagctgtgaattcaaccaaccatggatccaaaatatatgggaaatacgctggggctgtgggtcacacctgtaattccagcacttagggaggctgaggcagatggatcacctgaggtccaggagtttcaagaccagccggcccaacatggcaaaaccctagctctactataagttacaaaaaatttagccgggccatggtagtggcacatgtggtaattccccgctaantcgagaaggttggagaccagccatttggctggaancncgagaagtagaggtttccctggagccgagattgggtcatggcattccngcnggggcaacaaatgtgag

SEQ ID NO: 538 - DNA, 341 bp, Homo sapiens
  SITE (302): n equals a,t,g, or c
  SITE (322): n equals a,t,g, or c
ggcacgagccaacctccctccctctttcagaaatcaacagcagtgatatgtcggcccacgtcaccagcccctctggccgtgtgactgaggcagagattgtgcccatggggaagaactcacactgcgtccggtttgtgccccaggagatgggcgtgcacacggtcagcgtcaagtaccgtgggcagcacgtcaccggcagccccttccagttcaccgtggggccacttggtgaaggaggcgcccacaaggtgcgggcaggaggccctggsctggagagaagagaagcgggarttccmagtgancattgcgggcargatttcanttggggagattagattgaa

SEQ ID NO: 539 - DNA, 1047 bp, Homo sapiens
  SITE (316): n equals a,t,g, or c
ggcacaggtggaggggccctcacgcagcagcccagccactttctgagtgttgtcctggggctctttggaacgccatcttcctcccacttacctgcctcccctccttttcgcaaatgtacagaagccatttgtcacctcagcattcgctgccgaaatgagcaactccattcagtaacgtgggagctgatcccacggcaggctctccctgctccaggagaagactaggaggaagaatgaggtgctcctgccgtgtccgccttgttccgggtcgcactggaacaggcagcaattcctaagtccggagcgtttgagcgtnttgctatctgactgctgatctgcgtgacagaaacaccagcatatttgcaacgccaaggatattggtcttaagtgcaagagcacaaatgagagtgtgagagaaagtaccttctattttaataataatattattataaaaataataaatctttttaacttttatattttatgcactagacaatggatctgcaactttggactaaggtcattcaatgtacccaaacttgaacagggggttcattgttttgctattgactttattatgccactttggggcagagacttggcatcttcgcagtttaagaaaccacgtttcctatccaatccgaagggaaggtgctgtacagttcattcctttgcaccattagccaatctgtcttttatggattctgtgacatgtttatattcacccatgtacattttctgtaaataccaaacgctactgattcccatgccaaaatacatgagtattatgggattgctacctgtataaacaatggcactgtgaaaatactgttagttttaatacaagagaatgcatttgtaaatatggtatagagtttattaatatactattgtttgcagataaaggccttaactttaaacatctttcatcttctgaaagctgcccaacttaaatcctcatagatgtctttctcaactgccttcccatgttcatctgtatgttttccagctaaggtcacaaaccaaaactgaataaagtctttgagg

SEQ ID NO: 540 - DNA, 142 bp, Homo sapiens
aaaacagggagagaaaaagcaaaccgcgccatcctgcttctttcttccgttcggcgttgggtgctgggctttgcttcagcccagcaggagaggacatccctgagctgacccgcatcgccgggcgccgaggctggagggcgca

SEQ ID NO: 541 - DNA, 1257 bp, Homo sapiens
ggcacgagggtggctgcccctggagcctgctggggagaggcctgtttgccagcatagggtggcggcggccggagtcgtctcaggccggtcggctcaagtctcaggggctggaactctgcctaagaggaagccaaggcccagcggccaggcccttctcccctggttaatccctgccgtgcagatttcttaggtggggacacaaggcctggcgtccggactgggcgcattcttttcatctttgaattacagcacctgaacaggagagttggccaaacttaatcagtgagggccaagtaaatgaaagtcctttttatttttttcccttctcacattttttttttcaggtgataactttatttatgtatttatttttctgagacggagtctcgctgtgtcgccaggctagagtgcagtggcgcaatctctgtaacttccgcctcccaggttcaagcgattctcccaccttagcctcctgagtagctgggaccatagacatgcgccaccacaccgggctaatttttatatttttagaagagatggggttctgccatgttggccaggctggtctcgaactcctgacctcaggtgatccacccacctcggtctcccaaagtgctgggattacaggcaataactttatgtctcccctcccttatctctgggcaaaccttgtttattctctactaacttggttgtaatctgttaatcaaagtaaacccttgaatttgttattctccacgctgctgggacacgttggagtggccttagaaggctgcaaaatggactgatggtttctgccttccactgacgtcccaatacgacttcctaatactagggctccagttcctgataccagaattacagggaaaaaatgtgggttctgcaggggtgtgtcaggtgtggacgcttcaggtgaagtcgtcggtgtggatgatcaatgtgcacagctctccttaaaaactggaggtggggctgggtgtaaccccagcagtttgggaggctgaggcagccggatcacttgagatcagaagtttgagaccagcctggccaacatggtgaaaccctgtctttactaaaaatacaaaaattagctgggtggggtggtgcatgcctgtagtcccagctacttgggaggctgagataagagaatcgcttgagcccagtaggtggaggttgtagtgagccaagatcgcaccactgcactctagcctgggttacagagcgagacttcatctcaagaaaaaaaaaaaaaaaaaa

SEQ ID NO: 542 - DNA, 417 bp, Homo sapiens
ttaagggctattgactgacaaacacacccaaacttggcggccgcccaggaggtggacactgggtttctggatagatggttagcaacctctgtcaccagctgggcctctttttttctatactgaattaatcacatttgtttaacctgtctgttccatagttcccttgcacatcttgggtatttraggagttgggtgggtggcagtggcaactggrgccacatcctgtttaattattttaaagccctgactgtcctggattgaccctaagctccccctggtctccaaaattcatcagaaactgagttcacttgaaggcctcttccccacccttttctccaccccttgcatctacttctaaagcagctgttcaacagaaacagaatgggagccacacacataattctacattttctagtt

SEQ ID NO: 543 - DNA, 847 bp, Homo sapiens
gccgaataaaatgggttaaccccrgggttttccccagtccacgaacgttgtaaaaaacgaacggcccagtgaaattgtaaatacgcactccactaatwgggccgcaaattgggttaccgggcccccccctagtcttttttttttttttttttttttttttttttttttttggagctatgcaagcctttattggggtccgcggggtgtggggtgagtggccaagactggcctctgtctagaaccctggagtctcactggagatccaggttgggggccacctggctgaggaaccatgagacaccaaagatgacgccgagggtcttggggatgtccgggtcgtctgcaaaggcctgggcgccttccaggggcaggtgcaccacctcaatgagctcaccctcctccaccaggcccccacctggaccgctacgctgggcatctgtcacctctgtgtagaacatggtctgtctggagccagtcagtcccactccagacctgatcacgttgtactcgccaggtggggtgggtgttgtcgatgtgattaaggaccctaaccggtgacttgagctcatcagaagggagagcatcctagyggcgcatggcccgatcacgaagccctccagagggtgtttcaacgccagaaagggaraaattcagccagtcctgctggycctgaaggggaagcaaccgccatgctgggaagggccaacagccagcagggaggtggacccartccccagccaccaggagctgaattctgccataacctcatgagccgggaagaccccaagcccccgtgagattgcagatccggctgacaacctgcctgcaacctgtcaaggccaagcag

SEQ ID NO: 544 - DNA, 432 bp, Homo sapiens
  SITE (369): n equals a,t,g, or c
  SITE (415): n equals a,t,g, or c
cacgtagaaaaagwkaatcaataataaaaacaaagccttaaataatgaatactaccactcccactaaatgtyctgtttcatcttaatagagatacagcttattgctttccataaaaagtagctgctaacaagwaaaaagaaaaagaaaaacaaacttactataaaatcttgaactaatttagtgaattaccttcactacatagagaggccagcccttccctgcctgtaatgtaaggrggtcactctttctactttgagggaagatctctccccagcctcctcaaatccatagtaaggagtagtttcttgaatcctgggtgcattattttttatgsccttcaggcttaattattttacctaaggacacanaatgctagcattgaatatcgcttaatactattcactatctgggagntaaacaccttcctcttt

SEQ ID NO: 545 - DNA, 509 bp, Homo sapiens
  SITE (401): n equals a,t,g, or c
  SITE (441): n equals a,t,g, or c
  SITE (483): n equals a,t,g, or c
  SITE (491): n equals a,t,g, or c
ggtgagggtgcagcttgtggtgagggtgcaggttgtggtggtgagggtgtaggcagtggtagaagtagaggtatcgtgctgctggtgtgtgtgcttatggtggtagagaacgtgatgggaatggtggtagtggcgatgatgatgtcctcatagttgtaaaacaaaattttggttattttcacttctctagtctggaaaagagaattttwtttttaagtcttaagcagattgcgactacccagattatgaaatgaactatcccctctcttagccaggtaggaccttggtatttagtactttacctcagttacctttctcttactattttctgaaaaactgacatcttttttcctcgtttaatttctttaaggttagggagaattactctctaagtgtamcgntccaattcatatggrggaatttycttwatttctggaaccntatttaacagtttttcctcagttgtttcccaaactctggccngttgttcnttttgcagggtacttctt

SEQ ID NO: 546 - DNA, 421 bp, Homo sapiens
  SITE (354): n equals a,t,g, or c
  SITE (370): n equals a,t,g, or c
  SITE (391): n equals a,t,g, or c
  SITE (401): n equals a,t,g, or c
caccgggctgactccaaccaggacagcaagatgagcttcaaggagatcaaragcctgctgagaatggtcaacgtggacatgaacgacatgtacgcctacctcctcttcaaggagtgtgaccactccaacaacgaccgtctagagggggctgagatcgaggagttcctgcggcggctgctgaagcggccggagctggaggagatcttccatcagtactcgggcgaggaccgcgtgctgagtgcccctgagctgctggagttcctggaggaccagggcgaggagggcgccacactggcccgcgcccagcagctcattcagacctatgagctcaacgagacagccaagcagcatgantgatgacactggatgnttcatgatgtactgttgtctncggaggggcntccttggacaacaccacacg

SEQ ID NO: 547 - DNA, 952 bp, Homo sapiens
  SITE (35): n equals a,t,g, or c
  SITE (385): n equals a,t,g, or c
ctgatatgaatcccagaaaaaaatttcctgttttnaatgttcttttcaatcccatctagataatttatagaaatataaccctaattggacatgtggtacaggatctataagttgctgtgtttttttgttactctgtattttgttccttttggtaaggtgaagtgtgtccaaagagttacttgcaacagtctttcatgatatgaggatgcccccgtattaccactctgattataagttctgagttctttgatttactcatgctgcatgacaaaatgtttactaataacaattcattataaagttatatccctctttacatcacttatcctttctcactgaggttcattcactgggaatttactcacgcaatctcagtagagtacancgtagatacagaacctaggagagtcaacatctggaggattttagtctttcttacacatatgtgtgattttaamcgaatattctcagaccacaggaaactcttcatccccctgtkgttaccagtaacagtatatcacagacctttccaaatgkttgkawatgtaatcagatgtacatttatatkgaaaaacaaatgagatggacttaaagagcacatcctgataaatactttctctctcacctgtactatatttctattagactaaagttatgtgattttttttttacattttttcagatgactagcaattttgatagtttataagataatgcaaagaactttctctgacaaactaactgcagtaacrgaaacctttcttttcagttactctttttcaagaatgaaagattattatacaaaaaattgtatactacttgatggaaccaactttgtacatcttggccatgtcactggtcattgtgtgaaataaagataatctggataatgactattagtccaatgctaagaaacatgatctttgctcattaaagagctaaaatgttaaaa

SEQ ID NO: 548 - DNA, 386 bp, Homo sapiens
  SITE (370): n equals a,t,g, or c
attttgaatgtgttgagctttcttaaaatgaaaacaagcattttttttttaaatgggaaagagactccagagaaatggggtcagtgttcctacaagcatgtatttttgaggtagtctgtattagattttcctgaattccattcagtaatgctcaagtgtttaatgacctcataatgtgttcactttgaatttaagggtaattgaaagaagccttctttagatttctttccatcttctgtatcttctctgaaatgtttagcctagctgttctttgtcctgcagttagtgacagaattcttagggagcttgtaaaaaacacctactgtgtgtcattgttggtttagagacttaactcataaatcagctgtcnctaggctagtttcaga

SEQ ID NO: 549 - DNA, 319 bp, Homo sapiens
  SITE (310): n equals a,t,g, or c
caccatatgaagttaatcatgtataattgcactacaggttatacacataaatattactgtattaaatacctggtggctatatgattggagaaagtaaactagggcctcttcggatgcatctagtaagaggaatccagtagaaaggcrctgaatcttggctgaagtcccataggtttttttttaatagakgtgratagtttttwtaaaagactgaaaatgggaggttaatatacctattgtttgctaatttttcataaaatacactgatgttatttttatgttcaagctgtttctcagctgggattacttncccaaaagt

SEQ ID NO: 550 - DNA, 463 bp, Homo sapiens
  SITE (421): n equals a,t,g, or c
ggcagagctcatagcttgttggttacctccatggggcacataaagctgacagattttggattatctaaggtgggactaatgagcatgactaccaacctttacgagggtcatattgagaaggatgctagagagttcctggataaacaggtctgtggcacacctgaatacattgcaccagaagtgattctgaggcagggttayggaaagccggtggactggtgggccrtggggattatcctctatgaatttctggttggatgcgtgccattctttggggatactccagagggctatttggacaagtcatcartgatgagatcaactggcctgagaaggatgaggcaccccacctgatgccaggatctgattaccttactcctcaggcagaatccctggagagctgggacaggtggtgcatatnaagyaaacagcatcgattttccgtctttagctggacagtttc

SEQ ID NO: 551 - DNA, 534 bp, Homo sapiens
  SITE (434): n equals a,t,g, or c
gaattcggcacgagtggaatgaaggccttattcagggcaggagggtgggagacagtcagagagaccttcctgcttctgctgttttctcaaattgtaactgtaataggttcattgcttaatgcacagtgagtaaatataccgagacaccaggggttgcaacagaaaaaaagtttaataattgtagggcagcttgacaagaagaaacctcaaatctaccttcccaagaggtttgagggtaggggttttaaggggtctggatgggtaataggctgaagtgtggggattgccagttggtcaagaagtgagatgtgaaatcatcggacagggtgatatagaaaccgcattcttgtgctgtcagttcccttgtaaggggagtcttcagactggttagcatcagccattctgctggaattaaggatttaaaaataccttangcaattcttkgctgagtgtggtggctcacgcctgtaatccagccctctaggaggtcgaggcaagatcacttgaggtcaggagttcgagaccaacctggct

SEQ ID NO: 552 - DNA, 334 bp, Homo sapiens
  SITE (1): n equals a,t,g, or c
  SITE (14): n equals a,t,g, or c
natttcggcacagngggggtggtatttgtgacaaaggctgtttattagaaatcaatagttttattggtaaaattcatcatacttttccattaaaatcagatataggatataggtacttatacacattatttttgaaggttctagtttgctaacacaaaaagatgatagttgggttgaaccttattcaggttggacacctctaatttgagtatctgaaatgctctaaaatctaactttttgagcaccgactcaacactcaaaggaaatgtttattttaagcattttgggatttcagattttgggattagagatgcccaaattggtaagtataatg

SEQ ID NO: 553 - DNA, 530 bp, Homo sapiens
  SITE (518): n equals a,t,g, or c
gagattttatcgggagcagtgaggtgactttggcagctaacaggccactagtatcctactaaagcttttgtctggataggagcaacatgcatgtttacagtcttgcagtgtgctgagagctggtggccagtgggactgagtgagctgtgtgccgtgtattgacccgcttcctagtcctgaattcctttcagaagctccggcaggaggatgatacagtcagacaaaggagcagatccaccagacaagaaggacatgaagctttctacagccaccaatccacagaatggcctctcccagatcctgaggcttgtgctgcaagagctgagtctgttctacagcagagatgtgaatggagtgtgtctcttgtacgatctcctccactcgccgtggcttcaggctctgctaaagatttatgactgcctccaggaatttaaagaaaagaaactagttcctgccacaccacatgcacaggtgttatcctatgaggtagtggagttattacgtgaaamcccctaaancttttttttttt

SEQ ID NO: 554 - DNA, 435 bp, Homo sapiens
  SITE (312): n equals a,t,g, or c
  SITE (373): n equals a,t,g, or c
  SITE (393): n equals a,t,g, or c
  SITE (428): n equals a,t,g, or c
caaccatttatcaggtaaagggttaatctccaaaatatacagggaactgacacaactcaacagcaaaaaggcaaataacctgatttaaaagtaggtagccctggcagggcgagtggctcacgcctgtaatcccagcactttgggaggccgaggcaggcagatcacaaggtcaggagattgacaccatcctggctaacacagtgaaatcccatctctactaaaaacataaaaaaattagctggacatggtggcgggcgcctgtagtcccagctactcgggagactgaggcaagagaatatgtgaacccgggangcagaagttgcatgagccaagatcgcaccactgcaatccagcctgggccacagaacgagantccgttcaaaaaaaaaaganagaaaaaaaactcggggggggcccgtacccattgncctatag

SEQ ID NO: 555 - DNA, 519 bp, Homo sapiens
  SITE (131): n equals a,t,g, or c
  SITE (181): n equals a,t,g, or c
  SITE (225): n equals a,t,g, or c
  SITE (233): n equals a,t,g, or c
aagttttttaaaatttattatttattatttctttttgctcttgtttcgtttctcttccttgagcttctttttggagactttgggtctattggcctttctgtataggtgatacccaatgaggcccaggaggntggcaccatggccatccctaccagaggcaaaatgccttcaccagctttancagtagttggctcggattagtgcaatcagctccacgtcatactngaacaatngcatccgctgggacagatggtggaaatccccgttttccataggccaagtgagaaggaatgattgcccttcgcttctctctgagggaaggaatgtcagtcacagccagaggmaggagargtaggccagcagcctcagtccagctgaagctccttcagcaaaaccccctgaatcttcacacccaaaacacgaatttttccaccccacacacatgtcgagaagactctgctccagacctggaatcacctgcttttgggccaagttctataaccagaggggctctggtca

SEQ ID NO: 556 - DNA, 654 bp, Homo sapiens
  SITE (588): n equals a,t,g, or c
  SITE (596): n equals a,t,g, or c
  SITE (608): n equals a,t,g, or c
  SITE (635): n equals a,t,g, or c
gaagttccactgtgttacagagtctttacaagttccaatcttgtaaactaggtatgattatccctttttatggataaggaaactcatgttcagaaacttaagtaatcttctcaatgatatatatctagcaactggtcgaaccaggattcaaattttatgtctaataattgtgaacaaaatccatcaaataaccatccaaaacccagcctgtgaacgcatttaaagaaattttgctctagaatcagcactgattttcaactctgctgtcttctgtgaacattgcataataaactaacactaagtcaaacacagaccatgttcccacccaagtcagccttggttcccaagcacaagtcgctttcagaatagcttgttgttgaagcaggaaaaaaaaaattgtgcttgatttggccttgagtagcaatgtgaattataaagggaagttaagcatggcttgctagaagagtcccagcggtgckggtggcttctatagrattaattggagagtctttttttttttgaagtcccagggcagccaatgagtgaaaatgcataatttatgcaagtgttggggaaaaggcacacctntgccaagntaaggttttccnattcttgggtgagtggggaagtttgantttttctgcaaaattaaat

SEQ ID NO: 557 - DNA, 524 bp, Homo sapiens
  SITE (211): n equals a,t,g, or c
ggcacgagcagcagcggcacggcggcgcggagtcccctgcgcccagcggcccggccgggctgcggcagaggcggcggcggcgccccgctccgggtgaggttgccggggccgtgcgcgctgatctgcgagtgaagagggacgagggaaaagaaacaaagccacagacgcaacttgagactcccgcatcccaaaagaagcaccagatcagcanaaaaaagaagatgggccccccgagcctcgtgctgtgcttgctgtccgcaactgtgttctccctgctgggtggaagctcggccttcctgtcgcaccaccgcctgaaaggcaggtttcagagggaccgcaggaacatccgccccaacatcatcctggtgctgaccggacgaccaaggatgtggagctgggttccatgcaggtgatgaacaagacccggcgcatcatggagcagggcggggcgcacttcatcaacgccttcgtgaccacacccatgtgctgcccctcacgctcctccatcctcaccggcaagtacg

SEQ ID NO: 558 - DNA, 1659 bp, Homo sapiens
agctcgaaattaaccctcactaaaagggaacaaaagctggagctccaccgcggtggcggccgctctagaactagtggatcccccgggctggcgctggaacgactgttccgtgacgatttgcaggacggcagtcttgaacaattgatgttgttgccgttacccttgcccgccgttgtgctggcgaaggtgatggcgcactggatggtaaccggtctgccgttactcatcctttcgccactggtagcaatgctactgggaatggatgtttatggctggcaagtgatggcgctgacgctgctgctgggaacgcctacgcttggctttctcggtgcaccgggcgtggcgctgacagtgggacttaagcgcggtggtgtgctgctcagcatactggtgttaccgctgactatcccattactcatctttgccaccgccgcgatggacgcggcttctatgcatttgcccgttgacgggtatctggcaattttaggcgcgttgctggcaggcaccgcgacattaagtccttttgcgacggcggcagcgttacgaatcagcattcaataacgctggattactgatttttgtccgagtctggtatcgaaactatgtggaaaacactgcatcaactggcgatcccaccacggctgtatcaaatctgtggctggtttataccgtggctggcaattgccagtgtggtcgtgcttaccgtcggctggatctggggattcggctttgctccggctgattatcagcagggaaatagctaccgcattatctacctgcatgtgcctgcggcgatctggtcaatgggcatttatgcatcaatggcagtggcagcgtttattggccttgtctggcagatgaaaatggccaacctggcggtggcggcgatggcccccattggtgccgtgtttacctttattgccctggttaccggctctgcatggggaaaaccgatgtggggcacctggtgggtatgggatgcacgtctgacttctgaactggtgctgctgtttttgtatgtgggtgtgattgccctgtggcacgccttcgacgaccgccgtctggcgggccgtgcggcaggtatcctggtgctgattggcgtggtgaatctgccgattattcattactccgtggagtggtggaacaccctgcatcagggatcaacgcggatgcagcaaagtatcgatccggcgatgcgttcgccgctgcgctggtcgatttttggcttcctgctcctgtctgccacgctgacgctgatgcggatgcgtaatttgattttgctgatggaaaaacgccgtccgtgggtgagtgaactgatactgaaaagaggccgtaaatgacccctgcatttgcttcctggaatgaatttttcgcaatgggcggttacgccttttttgtctggctggcggtggtgatgaccgttattccgctggtggttttggtcgtgcactcggtgatgcaacatcgcgcaattctgcgtggcgtggcgcaacagcgggcgcgtgaggcgcgtttacgtgtgcgcaacagcaggaggctgcatgaatattcgccgtaaaaaccgcttgtggattgcctgtgccgtgttggcagggctggcgctgactatcggtctggtgctatattggtgcgctcgaatatcgatctcttttatacgcc

SEQ ID NO: 559 - DNA, 373 bp, Homo sapiens
  SITE (294): n equals a,t,g, or c
  SITE (318): n equals a,t,g, or c
  SITE (323): n equals a,t,g, or c
ggcacgagtagacatgattttttcatttgctgcatattaaacatttgttggttgtagtcggtatttcttaaatagaagtttgtcaatattagattagtttcaagaaggacttagctcaggaaaaggatagttatttctgtggttctcagctttgatgcctacagagattctgatttaaattgctggmggagggcccaggcatacattttttaagtttcccaagtgattctaatttacatctagggttaaaaacagccaggcgcggtggctcatgcctgtgaatcccagcacttnggggaggccgggggtgggtgggancaccngaggtccaggagatcggagaccagctgggccagcctgggtggaaaccccc

SEQ ID NO: 560 - DNA, 360 bp, Homo sapiens
  SITE (2): n equals a,t,g, or c
  SITE (5): n equals a,t,g, or c
  SITE (344): n equals a,t,g, or c
  SITE (350): n equals a,t,g, or c
antcngaaacatctatattctgagaagagactccaagcaccccaagtactgcatcgagctgagcgcccagcctgtgggacttatccgggtacacaaggtcctagtggtgggcagcacccaagacagcctgcatggcttcacccacaaggggaagaagctgtggacagtgcagatgcccgcagccatcctgaccatgaacctcctggagcagcattcccggggcctgcagscgttcatggctggggctggscaatggagaagtccgcatttatcgtgacaaggccctgctcaatgtcatccacaccccggatgcagtgaccagcctttgctttggccggtaaggncggggnaggacaaaaa

SEQ ID NO: 561 - DNA, 790 bp, Homo sapiens
  SITE (84): n equals a,t,g, or c
  SITE (131): n equals a,t,g, or c
  SITE (748): n equals a,t,g, or c
ctccttcccacctgtgccgaaatctgaactatgcccttcgcttggcacgcgatgcaggatttgatgcgaaattgttgcccaagnttgaacgtccggaacccttttgccacccaggatgcaatggatgacantcatcctcgcctctgaacgtggtaatggttgcacgtggcgacctcggtgtggaaattggcgacccggaactggtcggcattcagaaagcgttgatccgtcgtgcgcgtcagctaaaccgagcggtaatcacggcgacccagatgatggagtcaatgattactaacccgatgccgacgcgtgcagaagtcatggacgtagcaaacgccgttctggatggtactgacgctgtgatgctgtctgcagaaactgccgctgggcagtatccgtcagaaaccgttgcagccatggcgcgcgtttgcctgggtgcggaaaaaatcccgagcatcaacgtttctaaacaccgtctggacgttcagttcgacaatgtggaagaagctattgccatgtcagcaatgtacgcagctaaccacctgaaaggcgttacggcgatcatcaccatgaccgaatcgggtcgtaccgcgctgatgacctcccgtatcagctctggtctgccaattttcgccatgtcgcgccatgaacgtacgctgaacctgactgctctctatcgtggcgttacgccggtgcactttgatagcgttaatgacggcgtagcagctgccagggggatccactattntagagcggccgccacggcgtggagtccacttttttactttgg

SEQ ID NO: 562 - DNA, 477 bp, Homo sapiens
  SITE (24): n equals a,t,g, or c
ttggagatggttgtgcagggaganccaggaagggagggagtcaggttggacacttagagggagggtagagagaggagctcctaaggcagacttgccaaggaagttagagaagccaggaaagacagatccatcacggaggacragggaggaggagaatatatggaagataaggagtgattcttgccagggacctcccaggccccaggaagggagcactgcagggtttgcctttgattgggcacctgggacgccctgagtgaccttcacagcagccctttatgtaaagtagtggggtacaagccaggctgcaatcagttcaaaagagatttacctttaatcttggtcaaaatcctctattttgaaaacccagccagtggaatccttattcaattagttatgttctgaactttttaagtcattgaattctgagatacaccttattatatttagtattaactatccaaagcttgttcttaa

SEQ ID NO: 563 - DNA, 456 bp, Homo sapiens
agcttaaccgtgcatagtgggccagtcatcatttatgtgtcatcttctttatctgctttgtgaacactcaccacagcacctatttttctctggtattttttatactaattttcttgttagaatagtttccttaatgtacagaaattgaactagataattacagttgttctaaatatatttttctggacatttaaagaratcattctaacaccagagattaatgttacctgttttagtattttatacaaattgattcctacagtgtaagctgtattgtactgtatacttcaattcatatgataaagaaatacaatgggctgtaacaatacactaaaaacaggaatgagtgaggggttaagttcacttggagtattacacctatcctttgcatctactgttttctgtgaaatttacagcagtgatgcccttccatataggtctccatataaaatgtga

SEQ ID NO: 564 - DNA, 463 bp, Homo sapiens
ggcacgagagagcttgcataagaacccaagatggctagaccaccaatcttctggtagtcaccacagggaaagtttgatgaaatgatttaaaagattggaaaactatttgaaataaacgctcatttgcattgatagctacttttggaatatttttcttctaatcaagagtttaagaaatattgttaaaatgtatcttactgaggaaagtaacttgcaaaaaacagtacattgccaaaagcagtatacacattgcctaaccaacacttaacccagtgtctatgaacttcacattgcctcacgccatatggaatgtgttgattcattcactgttccgtttttatctacaattttggtttaacaaggcatgtatttaaaataatttttaaactctttacaggtaagtcacttttgagttgtaaaattccaggaagtgacttttcttgaagtagggctttaatggaaa

SEQ ID NO: 565 - DNA, 635 bp, Homo sapiens
atgggatacgctctctccgaaactggccccagcggaagatgttcgtggggcgctggcgctggtcgaacgtaacgaagcgcctctgggcattgtctacggttctgacgcattgccagcaaaggggtaaaagtggttgccaccttcccggaagattcacataaaaaagtggaatatccggttgctgttgtggaagggcataacaatgcgacagtgaaagcattttatgattatctgaagggaccgcaggcagcggaaatctttaaacgttacggatttacaatcaagtaatgatactgaccgatccagaatggcaggcagttttattaagcctgaaagtttcttccctggctgtgctgtttagcctgccgtttgggatcttttttgcctggttactggtgcgttgcacgtttccgggcaaagctctgctcgacagcgtactgcatctaccgctggtgttaccgcccgtggtcgtcggttacttattattagtttcgatgggacggcgcggatttatcggtgaacgtctgtatgactggtttggtattaccttcgcctttagctggcgcggcgcggttctcgctgccgccgtcatgtcgtttccgctgatggtgcgggcaattcgtctggcgctggaa

SEQ ID NO: 566 - DNA, 321 bp, Homo sapiens
ggcacagcttggcctgaggagaactcagaggacagagatagttttcatgggaacacgtggagcatccggagttgtttatggtcatgagggaaagagatgtggtgtggaaaatacgatcttgtgaaaaagtagggatgcattagttctcaagtcaggaaaatgaggagtggagtcaagcgatgctacaggagactgtttgccacaaagagttgctgctgtgcctgccccasagcacttgggcccaaagaagccactctgcagcctcactamtcatcgtggctgggktttgtctccacagatgggcttttcactcacatggtg

SEQ ID NO: 567 - DNA, 405 bp, Homo sapiens
  SITE (361): n equals a,t,g, or c
  SITE (396): n equals a,t,g, or c
gaattcgggcacgaggttgcccaggccgcagtacagtatcacgatcatggctcactgcaacctccacctcctgttctcaagtgatcctcctacctcagcctcctaagtagctgggactacaggcatgcactgccatgtctggctagtttttgtattttctgtagaggtgggcttttgccatgtcacccaggctggtctcgaactcctgtactcaagggatctgcctacctcgacctcctgaagtgctgggataacaggcatgggcaaccgtgcctggccaaaatacactttttaaaaaacataraagaaactgatacatagctgtcgwaggccaatatagtggctccatgattgtcagggntccaggctacttttaatctgctggttcaaaagccnttaagtgtg

SEQ ID NO: 568 - DNA, 336 bp, Homo sapiens
  SITE (286): n equals a,t,g, or c
  SITE (335): n equals a,t,g, or c
  SITE (336): n equals a,t,g, or c
attttttatttttattttttttgagatggagtctgtcccccaggctggagtgcagtggcaagatctgggctcactgcaacctgcctccctggttcaggcgattctcctgcctcagcctcccgagtgaactgggattacaggcctgtgccagccaccacacccggctgaattttgtatttttggtagagacggggtttcaccatgttggccaggctagtctccatctcctgacctcgtggatccgcccgcctcggacctcccaaggtgctgaggttgcaggcgcgangaacggtgcccgccgacaaagggggtttcttaaaggggtcggttaacann

SEQ ID NO: 569 - DNA, 460 bp, Homo sapiens
  SITE (6): n equals a,t,g, or c
  SITE (46): n equals a,t,g, or c
  SITE (71): n equals a,t,g, or c
caaaancctactttgaacccgaccccggaaagaccgtactgaaagnatatcttcaactgtggtaaaccttncgggtcatcttgttggttttctttccttcaaacttggagaatrtaagggattgggccccttggctgctctgactgctggcaaaggcctcttcttcctcccgctggagtctgcaattcaagagaggattagaatgatctagatattctccaagatttctctrtayctgaaggttattactccattaattcaggaggatctaaagattttagamctagagactaaataygccaaatcagtctgaggtctcacatagctacaggatggacggctcttcatgcactacagatttcaaatggsatcytctcatgctcattcagcaactgstctaggttacatgaaagaaatcaagtctagtccttttccccaacaagctcagtgaaataaataa

SEQ ID NO: 570 - DNA, 570 bp, Homo sapiens
  SITE (292): n equals a,t,g, or c
  SITE (318): n equals a,t,g, or c
  SITE (497): n equals a,t,g, or c
  SITE (527): n equals a,t,g, or c
ggcacgagcaagaaatgcaggaggccagtgaccacttgaagaaacaatttgaaactgaaagtgaagtcaagtgtaacttccggcaggaagcatcccggctcactttggaaaacagggatcttgaagaagaattagacatgaaagacagagtgattaaaaagctacaagatcaagtcaagacactaagcaagacaattggaaaagccaatgatgtgcactcgtcctcaggacccaaggagtaccttggaatgctgcaatacaagagagaagacgaggccaagctcattcagancctcattcttggtagtgaacctgganctctgggtttttgtttctctttgagaacttgcatatcagtcagtgccaaagtcctgggcaggggtggtcctttttctaytttttcttccactgcttcttcccccagcccagagtttctcaacctcagcactgttgacctgttaactctgtgaatggggagtaacaaaggatggagcagnatccttgacttctactcactagaaggcagnagcaacccctagtgatgacaataaaagatatctccaggtattg

SEQ ID NO: 571 - DNA, 432 bp, Homo sapiens
cggctggccggactcaggtgtttcggacgckattgcccttcgcgccaccgtcgagtgggcagcagcgggactcagccgggcgccaggttcctgccaggcagcgcgsgsaagcsggsgcggccgagamctccttcctgctacttcgcccagcgccgctgcttcggcttcccagcgaagtgggagaccttcctccctgtttgcagacgtccgtgggagacccttattttttccaccgctaaggttaagagattctggaatagaagcgtcgaaggagatcaagtgaaccttctacaactcctcggatgtcgccagtctccctttcggggcggaagaytacgtttgagcatcttcactgaggtgcaggaatgggaagaacccacctttgcagtttttttgcagtgtgggtttgcttgattttacccttagggaatg

SEQ ID NO: 572 - DNA, 249 bp, Homo sapiens
  SITE (207): n equals a,t,g, or c
  SITE (246): n equals a,t,g, or c
ggcacgaggaagaaccaggccggctgggtgtggtggctcatgcctgtaatctcagcatttggggaggccaaggcgggcggatcacttgaggtcaggagtttgagaccagcctggccaacatggtgaaacctgtctctattaaaaatacaaaaattagccggctgtggtagcgagcgcctatgatcccagctactgccggtagtctgnaggccagagaatcacatggaacctgggtaggtggtaggnctg

SEQ ID NO: 573 - DNA, 711 bp, Homo sapiens
  SITE (702): n equals a,t,g, or c
  SITE (703): n equals a,t,g, or c
ttttggttcagccattctcctgcctcagcctcccgagcagctgggaccacaggcgtgcaccaccacgcccagctaatttttgtatttttagtagagacagggcttcaccatgttggccaggatggtctcaatctcttgacctcatgatccacccacttcaacctcccaaagtgctgggattacaggcgtgagccacagcacccggccttaaatwacacttttaatatacagctagtttctcatcatatttaagagtgcaatttttaagggcaatgctaccaaggcatagatcaattcagttcgcacttgtgttgattatgtgcttgtacaaggcactacgatggccccgaagctgattaaaaagaaaacaccaaggaaaattgtttaaaattggacacacttcctgtcttcatggagctatgggacttgttggggagcaraatttccaatttgarttarattttttcaatatggcatcaggtggtactgacccatccatttgttctcattgattagccatcattagtgtggcctgaacacagtgccatcagactgagtgtaggtgatgggaaagggattttcctcatgtctgttccatcacggaccatgaagtgggcaagtccatgagcaccaggtcagtccccatgaatactcattccatactccactagggaaaagcagtatagaggagtgatgcaaacnngagttcaa

SEQ ID NO: 574 - DNA, 547 bp, Homo sapiens
  SITE (41): n equals a,t,g, or c
  SITE (98): n equals a,t,g, or c
gggcagtaggtgatctggtctcgtgattcgcctgcctcggncctcccaaagtgcctgggatgacaggagtgagccactgagcaagagagggagactcnatctcaaaaaaagaaaaaaagaaaattaagtcccycccatgctcccgagtcttcttactcctcataggtgaccactgttcagtctaccgtttcttcccagaaatatgtgcacatacaagcatatacatatgtctactctttgcttagcaaaccatttattcagccaaattacaattgttgtctttgataaagcaggctacagacctccagatcctaaattggtggcaccaaaattagagaacttactttgtcttgaagagaacacttgcaaattgaccaggaacccctactgccagtgtacgatgaattagacttccataaagattataacttaggtgccagaatacacattttgaaatgaatgtaggccatctaaaggcatttttagcttctaaacattaactttatgggggcataatttacagacaataaatatacctgcttacagt

SEQ ID NO: 575 - DNA, 377 bp, Homo sapiens
gacattttagctttatggaaacaaattattaagaaatgaatagaaaggtgtctttttctttgtgtagtgcaaaagcctaaagctatcagtcaaaggcctaagaaatccacatttgaaaaacgtaaatcatgattggtaagaatacattcatctgatagtattgagaaaagttgaaaaactgttagccttccataacacattaaacattttatgtatggatggctgaaagtattgagaaaagctgaaaaactgttaaccttccataacacattaaacgttttgggtatggatggcttaggacaataaacaacatcattaaagtaaaattatgtcagtctgttcatattaacttatttaaatcaatgaaaattttgatg

SEQ ID NO: 576 - DNA, 1008 bp, Homo sapiens
gaatyggcacgagcagagatgcccacagttacagtgcaggmggaggaaggcagtaagagagatggggcaagaatattggaagaggtcaggaggaaatcagaattttattattattttttttggagacggactctcactcttttgaccaggctgcagtacagtggtgtgatctcagcgcactgcagcctccgactctggtgttcaagtgattctgcctcagcctcccgagtagctgagattacaggcatgtgccaccacacctggctaatttttgtatttttagtasagacgggatttcaccatgttgtctaggctggagtcgaactcctgacctcctgatccgcccacctcggcctcccaaagtgctaggattacaggtgtgagccaccacacctggccctaatttttgtatttttagtaragacagggtcttgccaagttggccaggctggtgctgaactcctgacctcaggtgatctgcctgactcggcctcccaaactgctgggattwcmggrgrtgtcmatktctgargctatttggtwtgcamcaagrtccycaagtgtcaagaaaaagaaaaggagaaaatgtgtgaagataaatggggtagttaagaggcaaaggagagggaaaaawtaaatatgtggaggcaagrggaaatgaatgcagggccatatttcttcaagagttgggagataactgaagctttcgagtaaattaggcactcctcttccaagattggaatgctccaatttggccaactctcatccagccttgcttcctgggatcatgagttgtattctcaagaagctagacaaacaaaattagcagggtatggtggtgcgtgcctgtggtcccagcagttcaggaggctgaggtggttaagattgcttgagcccgggaagttgargctgcagtgagctatgattgcaccactgcactccagcctgggcaagagagtgagatctttttttttttttaagaaaaaaaaaaaaaaaaaaaaaactcga

SEQ ID NO: 577 - DNA, 643 bp, Homo sapiens
  SITE (38): n equals a,t,g, or c
  SITE (79): n equals a,t,g, or c
  SITE (514): n equals a,t,g, or c
  SITE (561): n equals a,t,g, or c
  SITE (600): n equals a,t,g, or c
  SITE (623): n equals a,t,g, or c
gaaatgattgagcagcttcctatggatctgcgggaccnattcacggaaatgcgcgagatggacctgcaggtgcagaatnaatggatcaactagaacaaagagtcagtgaattctttatgaatgcaaagaaaaataaacctgagtggagggaagagcaaatggcatccatcaaaaaagactactataaagctttggaagatgcagatgagaaggttcagttggcaaaccagatatatgacttggatctttggaattagacactccttcacagccagtgaacaatcaccatgctcattcacatactccagtggaaaaaaggaaatataatccaacttctcaccatacgacaacagatcatattcctgaaaagaaatttaaatctgaagctcttctatccacccttacgtcagatgcctctaaggraaatacactaggttgtcgaaataataattccacagcctcttctaacaatgcctacaatgtgaattcctcccaacctctgggatcctttacnttggctcgttatcttcaggaactggtgcaggggcattacctggcagntgctcaggcagttcaggtacagttcagttggaggagggncgaggacctcaagtttaaaggcngtttggagctttaggttatg

SEQ ID NO: 578 - DNA, 771 bp, Homo sapiens
  SITE (668): n equals a,t,g, or c
tccatttaagttcatataatataatctacagtttagatacttggacatatatcctgcccaaggactaagtgtaatataggaaaaggatagaaagccattttctctatcttcaaaataatgtgccatctccrttaaaattaagactttaaagttctataattttttctttgtattcaactttttaatacctccaaattacaaacatctatttttttcactacatagatatataattacactatgatagacagaattctagagtgattctcaataatccatgccttggtataatcctctcccccattgagtgtgggtgggacatgtaacctgcttctaaccaacagaatatggcaaaagtgatgggatcatctctcccatattatgttatgttatataacaaaagtgaagagaagttgcagatatacataaggtttctaatcagctgactttgagttaatcaaagagatcccctgggtgggcctgacctaatcagactagtcctttaaaagagagtgaaccagtcagagactctctctcctattagccttaaataagcaagctgccatgagctctacggctgcaaggaaataagttttgtgaacaaccatgtgatcttggaagaagcatctgaacctcagataaaagcccagccccagccaacgccttsnttgcagctttgtgaaactctgagcagaggacccagctaaatcacgtttggactcctgacccacagaaactttcagataataaatgtatgctgttttaaatcta

SEQ ID NO: 579 - DNA, 262 bp, Homo sapiens
  SITE (50): n equals a,t,g, or c
  SITE (254): n equals a,t,g, or c
ggggtgttacgtccaggcagggcatcggcgggggaaaccagatgcttttnatcaaataaactcatggtgtcgctctcccgaaaatcggtcattggggttaaggttgtaacaagaggcgtatttgcacacaataaccaccgtgaataggtctaaagtaaaacataagaaatatttggggtttagtctgctttttaatccatattactggattttgttaagccgtttaacggtgttccaggggcaggaaaaaaggntattcagg

SEQ ID NO: 580 - DNA, 373 bp, Homo sapiens
  SITE (350): n equals a,t,g, or c
  SITE (366): n equals a,t,g, or c
ctcaagggtaactacttgctgttaatgtgattgcaggacagwgtgcagttaaaagacctgtggaaaaaaatctgccatcacagcagtggaatggagtttcaggatcaccgctactggttgagaacgcatcccaactgcattgtaggaaaggaattagtcaactggctaatccgaaatgggcatattgccacaaggtattctgaatcttagaaggtttcaatattatttgtttattttggaatgagaaaacatatttgcaagatagtaagagttacagatttctttgtagagttagggtgctctttggtttatgtattgctggtttagggtgctaattaacttaaaccctnctccatctgagttttnaaccagc

SEQ ID NO: 581 - DNA, 512 bp, Homo sapiens
  SITE (476): n equals a,t,g, or c
ggcattttcatatgtttatatttttactacttagcaaaaaaatacttagaacttctctagtaactcctgagttgkagattttattttctcattgaagctggaaaaaagtagtcccaaaacctaaattcaaaataaaactatgcaacataatttttgagttgacaactaggcttgatttagagaaagtaaacatattttcacctctatcattattcttttgaatttcttatgagatcgagaatgaaaatgtataatggtacaatattcttcatgttataaactctttctctactgtacagaaatatatcttataactatatgtcactttacagtatttaaaaatagtttcacataatctcctttgatatatgaaagcacaaaatattagaaatgttctagactaatcaagcgatataacatctatttgccatgaaatgcaagttagtattttatcaatagccaatatttagtatccntgcactccacagtacaacaataaagattatatattg

SEQ ID NO: 582 - DNA, 436 bp, Homo sapiens
  SITE (1): n equals a,t,g, or c
nttctttaaagagacagtcaccaaatacttggtttaactcgactattgacttgggcattgagagagatgatatatacatctttggaaagtgaagtcaatgttcaagaggtgatagaagctttactttttagtgatcagaaatatttagtgcatcttttcagacaggaagaattttatcatcaagtattcccttataaaaccaagtaacacttctttatcagtaacttttagaacttaaaagaaagcaaaaagtaaatggaattgtaggcaatttatgaatcctagtagattttacaatatgtaatttatgttgtttacagtatataaacactaagttttgtgttaaatgtgatcaggaataaaagtatcccacaggcatctgacaccaattccagaattagcccaagaattgtttatttgaggccaggccatcccc

SEQ ID NO: 583 - DNA, 545 bp, Homo sapiens
  SITE (517): n equals a,t,g, or c
  SITE (531): n equals a,t,g, or c
cagggcccaaataacttcactgacacctgtttccaggagggggtcttcagagcctccttaggctcttgtcagtatcataaataattcctcttcttatagcggatggggttaccaaaaaaaataaaaagtagggaagagcttctccatgggatcagatcacagctttggggagtgggatggggcctctatgctttgatctatgcatgasctggggtgagaagttcccacctgcacctgactgcaatgactgtaatggctggaattgtcacctcttctccctgataggctcttcctcacctggaggatcggggctggtgggagggcagggaaggggaggccatcagccagaatgtattttctttcagttccatttcctgaggaagaacttgcttttaaaggaggaaagggacagaatcagacctaaataaaattcctgagtatgcaatatttctctttagtgtctcttkcacctccctttctgagtttcttttcctacatcctggcttctttcattttncccaatggccccantataatcatgggtt

SEQ ID NO: 584 - DNA, 965 bp, Homo sapiens
  SITE (312): n equals a,t,g, or c
ttttttttggttttcacatttttattgggagccgtgggagggcatcattaccttgggcacaggggcagaagagagcawagtctgggactcagacagagggaagcttgtcctggcctcagggggcatagcaggcagtgctgcaggagactcaaaactctcacctccactgacccccagtggagggacacctggaactgtctgtaaaacagtggctggctgtattgkgtgaggaatccggagcaccattttgctcggaggggcttctgaatgagttgattgggctggtgttttcccagggttgaagctgggctnggagagaggggctgggttggataaggaggggtttcaggactgatgaacgcttctgtctccaagccttcttggggaaacggtcggcaactggcttcagtttcaggactacacccttaggcaatagcagtgggtaccgagtttcactccccaactctgagttgtctttttctaggccttgatctgagttgatctcagtggttccagtcatatttcctacctctctagcaccatcagccatgtgccgcagttcttccctggatggatggcagactggcctattggaaatgagaacactctgatccagcacatgtcagaatttgggaaaaagaataggactttctaagtttagggacctgagacaagctcaaggcatctttccaagggactctgcatatgaaatttctacaaagaccacagtccaattatacactttagaaactcttctctgaatttcctttagcaaattaccattttacccattattttgaaaatgttgtagaatcacccggagaagggcagaaaagtaagggaagaaaggtgaatcaggaagattcctgaagtcctagttctacaactaaagcattagacgattaaggaagtccttgatattctctcagaactttcagtgaccttctgcctcctacagacttcga

SEQ ID NO: 585 - DNA, 542 bp, Homo sapiens
  SITE (530): n equals a,t,g, or c
agagcttgttatcatccaaactaaaaccctcactaactcgatgtgtccctggatgactccctagtttatttcttcccttccctccactaagtcagttgtctccctatgcaccccaggagtagccattttccacagcggccaccacctctcctccagaaaatgggcggctcaaaatggagcccttcctctcctccggacctcaaatctgccacctgtctgctccattcatcattagttagctatagagcctgatttttctccaaactgtatgtatttaatccctgatttcttcctcacccccacgatgtgacatcctttcagcattttacctgctgggaaccagcgctctcttgtttcttttwactgtgggtcacttgctagagtttgaaggaaaactttttgatgtgaacacatttcagttttttttccaatttacatgggagagrggaatgaaggggagagggggctttggcctcgttaatttctgttttgtttttgttctgggagaatgtaggaccatctgtggtctntcagaggtattt

SEQ ID NO: 586 - DNA, 211 bp, Homo sapiens
  SITE (207): n equals a,t,g, or c
tcatgcagtaaaatcctttaagaaaaaatcgattgccgacgagtattgtgtgtagtctggttcagtaatgcttgtgcacagtaaagcttgagagtcacttagctaaagaaaaccaaaaggaagtctgtattttgggcatctatactattttgtctttaagatatttatccagtccttagcaatgaaagggagatgggtatacaactnaatt

SEQ ID NO: 587 - DNA, 342 bp, Homo sapiens
  SITE (81): n equals a,t,g, or c
  SITE (83): n equals a,t,g, or c
cctgcactgtgtccytggttggtgttgatgcccaaaatagagaaggtgcttgcwagcttttccttggtacattttccgggngntgcaaggcaacaagttttcttttgttttgtttgtttgtttgtttgtttgtttttgagatggaggtgggtgcaagcaggacagatagtgcctggggktgggggcggagggttcgcctctaggaaggggctagaagggatgaggaaatagttcatagcttcgtgcaggtgatccctattctgcgtgtatgtgtttgcacatgagtgtttgtagaccatagaccattaaaaaatacggaattcaaaagttaaaaaaaaaaaa

SEQ ID NO: 588 - DNA, 504 bp, Homo sapiens
  SITE (3): n equals a,t,g, or c
  SITE (12): n equals a,t,g, or c
  SITE (17): n equals a,t,g, or c
  SITE (191): n equals a,t,g, or c
aangatatccgnaatcnactgcctacaatcggcttcaccctgatcatctgtgaattccaggtgttccagagccctcctggtatgatgttattccaggtagtgtccagctatatgtgtatgtgtgtgtgtacacgtgcatgtacacacagctgtacagtgtgtgtatatatgtatacatatatgtatgtgtnatgtgtatatagagagagagctgagagttattctatttattccttttctctcctaatctgaaaatgggtgtyctgtattttgggtggaagaggcatagaaggggatgtgtgttgtctcttaagatttctatatcatgtggattggaccaaaaacttctaatcacttatttagaaggtatttataagtgtctgtccatgtgtagcctattcgtgcatgttttgtattatataactaaggaatagatgtagaatgtgctatttctggttgagaaaaatcaccagaatgtttggtgtatctataaaaaaaaaaaaa

SEQ ID NO: 589 - DNA, 278 bp, Homo sapiens
  SITE (59): n equals a,t,g, or c
tccttggggcagatcaattctctgggtttgatgaatctttgggttcacaattgtgactncatccaacaaacactgaggcagactgctttagtgtcaaatatttgctaccccatccttgrcaggcctgtccctaccagttctgcccctttaaaatgatgatccacttcattaacagccatgtcaatgaaacatgaatggcagtgactttactttccaagcagaaactttaaaagccactgtgtagttccatcttccctcttttcggtcaaaacattcag

SEQ ID NO: 590 - DNA, 464 bp, Homo sapiens
  SITE (284): n equals a,t,g, or c
  SITE (402): n equals a,t,g, or c
actacctcccatctagttctcgtttctaaacctaggggagatgctatctttgctgcaataatcttagcctacatcttggaatggaaatggccttggtggaaatggtcttcaactcctctggtccaagctcaggccctgtgaccctggaacaatccccttcctggtcctccatgtaggagcaataacattcccttgccagcagcaccagccattctgatgattaaatggtatcggactctgttttccaaactcagtcattcagatgccccctattttatttcttncatgtctgcaaatgcattataatatttttaaatgtaggatgagtcctttttattacacatagaaatagctactgtaaatagcaaactctaacactgtgcctaattaggaaataaaggnaaccataaatacagtaaaaatgaaacaatgttattatggtttaacctgatagtgtgggcttg

SEQ ID NO: 591 - DNA, 611 bp, Homo sapiens
  SITE (437): n equals a,t,g, or c
  SITE (506): n equals a,t,g, or c
  SITE (539): n equals a,t,g, or c
  SITE (579): n equals a,t,g, or c
  SITE (585): n equals a,t,g, or c
  SITE (611): n equals a,t,g, or c
gagaagccagggcaagaaaggatttatgtgcttgggattcttgaggggttttccagagtcagtccccaattctgatgtttttatacgcaacactaggggtccttctgaagttatcccggcccctgggaaactcacgtggcatggggcccccttctgccctggtctctttcatcccatctgtcccggccccagagcctgtccagtctggtcctctctgtcctgcttggtttgtcaccatgtgatgttgggatggcttgtctttgccgctcacttcctaagytgacagacgtgtctkctagggaccaccagytcccaagccgcatgacggtgctttccttcaaggttcagaggcttccctttcaagtctggcccatctcccacatcctaatggctctgcttgcttaaggggcaagctcttccttttaacttaatggcanaactgggaatgacttaatagggcccctggcttaaatgaagtaacaaggttaaaaaacttgggttttggnccattttggtcccttaaggctcaacctttggangccaaccggggaaattactggccaaatttaagcccctacnttttanaagttaaaaaaaaaaaaaaaaacttn

SEQ ID NO: 592 - DNA, 419 bp, Homo sapiens
  SITE (136): n equals a,t,g, or c
aattcggcacgagaaagaatcaggcagactgaagagaggtctgtacttatatgccatgtatctctatccctaactttgttcctttcagtaccttaacgtcagggtgctgatggcatggtgataaaatttgtgagtnacccaagcctgggaggaatttgtggaattaactgattgatttaatcagagtccagataaatcctgactgactggaatggtgaatcatcttttacaaagaagaggcacaatcctatactcagctgcagaaaaatcagtgataaagtgtggatgagggagaagtgtacaaggccagtkttcgtgatgggractcagtgtgatcaccagtttaatgtgggtgccagtatagtagtgtcatggggttctgcagtttgtctccaaaatgggcaagttgtagcctgttg

SEQ ID NO: 593 - DNA, 564 bp, Homo sapiens
  SITE (530): n equals a,t,g, or c
acgtggacctgcagaacttctcctccagctggagcgacggcatggccttctgcgccctggtacactccttcttccccgatgcctttgactacaactccctgagccccacgcagaggcagaagaacttcgagctggctttcaccatggccgagaatctggccaactgtgagcgcctcatcgaagtggaggacatgatggtgatgggccgcaagccggaccccatgtgtgtcttcacctacgtccagtcgctgtacaaccamctgcgtcgcttcgagtaaagcccctgagcctggattgccaaagagcagccccaggaagaggccgggggtccgcttgcrattccccagccaggatgcccccaggagccttgccgtttggtgtgagcgcgctgtttgtctgtggcatgtgacggactycccttcgagcccagctgtgttactgattaaaagtactgctgagctgtggtccgacagsactgatacagccaaggcttkgaggaaaaggaaaaattagagagagagagagacatnggtgctaagtaatgatcttcctaaagaaatgctt

SEQ ID NO: 594 - DNA, 416 bp, Homo sapiens
gagaaatgtgactaagaagctagagattagaccatttaatgaacacccaagggaaattaaccttttaaaggaatcctttttatatagcaagtaatgactaactgmttgctgtccatcctcagttttaacctgaaaagagtccactgcaaggatcctagtgcccggggaggaggaagacggggcaggcctgcggtggagcgggcagtagtggtagagaacagggggctgtgttgcagaaactccagggaggcatttttctttcccgtgggcttgactagggagtaataacatggtcgtgtcacttttgcccagggagctgtgccggcctgtgacagaggtgtcctttgtccgtgtggcgcagtgaagacactgggttgtgccaccgtgttcttccttcagtgcaaagacggacagtg

SEQ ID NO: 595 - DNA, 487 bp, Homo sapiens
  SITE (1): n equals a,t,g, or c
  SITE (452): n equals a,t,g, or c
  SITE (480): n equals a,t,g, or c
nggcaactctgccaaggcgcctatgagagcctcttggtctttacctggtctgcgagaaatcaaactttgggcacaagtcatgaagccgacaagcccgggagacacagtgtcagaattacaaggtgagatcagccgcccggccaagctatcttctcgctagcaggaacactacaaggcctgttagagaagaaagggtagaatcccgagaatgttttccccacagtgctgataaggagagaccactatcccatctactgctacagctctggagacagagctctcccacctgtcatatagaacacaaggaccaatctgcagagaaagagcatccaaacctgatccagtggacatgggggaaaaactcaccacagctgagtgtggggaaaaaacaagggccaacacacacatytctggcacagrtacatctcccwtaaagaaactaaagtgtttanttttacaggggcactgttgcagacccanttcagct

SEQ ID NO: 596 - DNA, 213 bp, Homo sapiens
acgaggccttccagagacacacatctcccagtagccaccaaacagctggccactgattagggcattaacttcctccggatggctcacgtcagaccagaagcacagaacgggctgtttctggtgcttgggcattgggaggtrgggagctggcgggcarggggcttgccactycctggcactggacattgargcctgcagaacargcagggtgat

SEQ ID NO: 597 - DNA, 633 bp, Homo sapiens
  SITE (12): n equals a,t,g, or c
  SITE (15): n equals a,t,g, or c
  SITE (17): n equals a,t,g, or c
ccgaattcgganagncncatacgccagtcagcaggagcagcagcataatccagcatgttgggctgcccttagcgccaggcacacacagcgcaccaacaagtctaccacagtctgacctaagccagtttcaaactcagacccagcctttagtcgggcaagtcgacgatactagaagaaaatcagaacccctacctcaaccaccactttctctcattgctgaaaataagcctgttgtgaagccgcckgttgcagattccctggcaaacccccttcagttaacacctatgaacagtctggccacctctgtattcagcatagctattcctgttgatggtgatgaagacaggaatccttcaactgctttctaccaagcgttccatttgaacacgttaaaggaatcaaagagctctgggatagtgcatctkggggargtgttgtwgccattgacaacaaaatagaacaagcaatggatctggtgaaaagccatttgatgtwtgcagtaagaraaraaktggaagttttaaaggaacaawtaaaaattgttgaaagaactctttacttgaacgagaaatgcactgttaaaactcttccaagcatgatcattatccaattccaacccaacaggcaatctgg

SEQ ID NO: 598 - DNA, 401 bp, Homo sapiens
  SITE (53): n equals a,t,g, or c
ggcgacctcacgaaatgcccctttgagctcaaaggctagttacccccaggggnccttccactctcggggacaggcgaaacctctttgtctctgcctcggcctgcggcccccagcccagcctccgcgctttccctccrccagtccttgtcaatcaaacctggtgccaaacgcggcagtgaagttttcagggacacatttgcttctccccttgaagaaccagttacaaagcgtgatgtcctctctggggtcccatcaagaacaaagaaacaggtctaaagaccctcattccagagagcatcctgccccatatccagaatgaaatccatgctcagagatgccaagaagaatctaggacaagacagggctttctaggagtcaaggaaattgttttttttcttttt

SEQ ID NO: 599 - DNA, 542 bp, Homo sapiens
  SITE (462): n equals a,t,g, or c
  SITE (515): n equals a,t,g, or c
gtcgaattaggggcactgtaaccagggtttgggttttgaagtagtgggtgttcgactttagagttgttttcctggaagcgctgatactggacttagtggaggagaacgacggtatcaatgtgtttctggatgactgcctggacaagggagttcagcttttgggagactgactgggctatgaagtgtacctttctactctgcagaggctggaaaggcaaaaatgatggctaaggcttccttgcaggagaggctgcccctccagaactagactcttccttggctttaagatgtgaagtcgagcagctggaaggacagacacctcatctgaccactgttctatggaccaaaggcaggatgagcatgccgctgatacagaagcctgagggaacacactccccmctacgtccttctccaacacagcagagccaggaaggacccggatggaagttaggacaaagaggnccagaattggcacagataccaacagaccattcgttgaagaagaaatccaaatngccataaggaaatgccagagtggacag

SEQ ID NO: 600 - DNA, 337 bp, Homo sapiens
tggctgtgactgcaactcccctgccttaaaaatktaaatttaatgatcactttcaaactgtccctgtagtacattatttatgaacataggaccttgcctccctgaatagcaccaagcgcccatggctcagacactcatcagtggggccgtgcccaccamactgcctggatttcctccctcctcctccttctccatctctccactctctttctgctgccctctctccccaccctaacgtcatttctttacctggttatttttaaaatccaaaaaacaatttgaagtgacatttgttatacttaagaaacaattttatgtcaccaatgtttggtcactt

SEQ ID NO: 601 - DNA, 473 bp, Homo sapiens
  SITE (381): n equals a,t,g, or c
  SITE (462): n equals a,t,g, or c
ggggactgagggcaagagcagaggcagcagcagcagcagcaggtgcctgtgaacatacctcagacgcctctggwtccaagaaccaggggcctgaggatctgtggacaagagctggtttctaaaatcttgtaactcactagctagcggcggcctgagaactttagggtgactgatgctacccccacagaggaggcaagagcccaggactaacagctgactgaccaaagcagccccttgtaagcagctctgagtcttttggaggacagggayggtttrtggctgagataagtgtttcctggcaaaacatattgtggakcacaaagggtcagtcctctggcagaacatgatgccacggrgtatcacaggcaggaaaggtggccnttctttgggtagcagaagtcaggggggctgtaccctggggggtggccaggaaatgctctctgacctatccagtaaaggganaagcagtgaaa

SEQ ID NO: 602 - DNA, 530 bp, Homo sapiens
  SITE (339): n equals a,t,g, or c
  SITE (454): n equals a,t,g, or c
  SITE (486): n equals a,t,g, or c
ttttaaaacaaaagaaaacattttattgcaatttgattaacaaggagacaggagcccagctcaaatctgtcccattgtacttattttaaagagttattttagtagaaaaggtgtagggagtggattctgtgattagtaggtgattgayagaaagaaaaggaagggctggaaaatcctcgggcatgggcagttacctcttcatgcctcctcatgggtcccatgtgcaaactcagagggagttagtatgaaacatgcggtacaaatttaggctgtgtgtcagcaagctcattctgtacaaactctggttttatctctttatcttgacacctgaagggtgtngcataatcccatcactccccaaaatatgccctacatgcagaatttaaattcatcctgcctccytgactctgrgggccacttcctaccacagytagggkcccttttctgtcagcantctttctggagcttgcttatatcaaacctaanaaaagcaactccaggactccagacaaaacagatctccacccatc

SEQ ID NO: 603 - DNA, 560 bp, Homo sapiens
  SITE (479): n equals a,t,g, or c
  SITE (492): n equals a,t,g, or c
ccagtaccaaagccaaggaaccggcccagcgtgcccccacccccccaacctcctggtgtccactcagctggggacagcagcctcaccaacacagcaccaacagcttccaagatagtaacagatgtatgacctgccatattcagtaagaactgagattggaatatttaatgactccaattccagggtttcagaaccgcatcgcagcatctttcctgaaatgcactcagactcagccagcaaagacgtgcctggccgcatcctgctggatatagacaatgataccgagagcactgccctgtgaagaaagccctttcccagccytccaccayttccacctgggcgagtggagcaggggcaggcgaacctytttctttgcagaccgaacagtgaaaagytttcaktgggaggacaaagggagggscttcacttgtgcggggacctgggcctttttgcacggcccaaggagaacctgggaaggncaccacttaaagnttgaatgaacctgtgtttttgaaagaagttggattttcttttacatggggaagggaattcattgcttt

SEQ ID NO: 604 - DNA, 323 bp, Homo sapiens
  SITE (301): n equals a,t,g, or c
gaaaaaaaaactgaaggaaaattgaagacaagagcctaagagacctgtcagacatcatcaagtagaccaacatgcattgtggaaactttaggagaagagagagagaaaggtgcagagagattatttgaagaaataatggctaaaaacttcctagatttgatgaaagataggaatataaacatccaagaagttcagtgaactccaggtaggataaactcaagtgagatcttgccaagaaagacacattataatcaaactgtagaaagccatagacagtgagagaatcttaaaaggagcaagngagaaacatcttgtcacataca

SEQ ID NO: 605 - DNA, 572 bp, Homo sapiens
  SITE (8): n equals a,t,g, or c
  SITE (15): n equals a,t,g, or c
  SITE (51): n equals a,t,g, or c
cttggcgntgaacantctgtggctggggtgggaacgtcagggagtggggcntgcctctttsctgggaatgccgtgcactcccagcccacttgccccatgccagcactcgaggcaggtgaggcccagccatgggtataaggtgctccccagggcgggattagcctcaaaggaggcaggggttccatgtttctgctcctctcccattactaaacgggtgtctgctttaggtttgatctccctcccttctgcccctctcctggtaaagggatgaataatgaaggccttccttgggaagtctgagatggattaccccaaggaggctcgaacatgggaggacatgcgagaactattgtcacatgagttttctttctatcctgtctgcaggacttcgcaggtgagcagtaacggaaatcagccccgtttattcctcccagcacctgccttatccaactcccccacgctgtggctgagtcccagcctgctatggaagcatcactggactcccattgaactctgtgcagattcgctgttcgtagacatggtacctgatggacaccaagctacgtacagct

SEQ ID NO: 606 - DNA, 649 bp, Homo sapiens; identical to SEQ ID NO: 69

SEQ ID NO: 607 - DNA, 259 bp, Homo sapiens
gcccagttcctctgcttccaaactatgcaacctccaacctgctccagttccagactgtataacctctgacctgcactggttctagaccacacaacctccaatgtggtctgctttagatcaccttcttcttcttccttcttcctcttcctcttcctcctgctcctcttcctcttcttcttcttttttttttttgacagagtcttgctctgtcacccaggctggagtgcagtggcgcgatttcagcttactgcagcctccg

SEQ ID NO: 608 - DNA, 510 bp, Homo sapiens
  SITE (338): n equals a,t,g, or c
  SITE (420): n equals a,t,g, or c
  SITE (441): n equals a,t,g, or c
  SITE (489): n equals a,t,g, or c
  SITE (509): n equals a,t,g, or c
ttgaaatttcatagccataaggtcaagatttakacctaccaaataaaaccttgggccagctgtgttaaggatttgctcaccttttcccaaactataccttgataattatttccttgataccctacttacaaaatgaagtasatgacattaaggcaaacagagactggccacgctggcttactcctgtaatcccagcaccttgtgaggccgaagcgggtggatcacctaaggtcaggagttcgagaccagcctcaccaatatgatgaaaccctgtctctactaaaaatacaaaaattagccgggcgtggtgacatgcgcctgtaatatcagctactcangaggctgagacaggagaatcacttgaacctgggaggcggaggttgcggtgagccaagattgcaccattgcactccagcctangcaacaagagtgaagctctgnctcaaaaaaaggcaaacagaatcttacatcttctgtaatctgtgaagnatctctttttctggcttggnt

SEQ ID NO: 609 - DNA, 1099 bp, Homo sapiens
  SITE (448): n equals a,t,g, or c
  SITE (1058): n equals a,t,g, or c
  SITE (1067): n equals a,t,g, or c
  SITE (1069): n equals a,t,g, or c
  SITE (1096): n equals a,t,g, or c
  SITE (1097): n equals a,t,g, or c
tacgggcccccctcgagttttttttttttttttttgattaaaaaaatagcaaacatcgttgttttgagccattatttatggtgagtactgcttgctaaggtaaaggcatttactctgattgtgaaaacagggtaactagagacttgcttaatgaagctcattataaaatatgcaaaatctcttttttttttcctcctctgaaaatcagttcaacacaccatcgatcaattcacatctccagagggcactatatagttcaagaagtacatgaaaaagtactgctgagagtaaaacaactttgcaagttgaaataggctgccaattcttgataactctataatggagcttcccaacaacagaactaagtttatggtaattaaactcctggctccatatgcaaaagaattcttcctgcaatgtatcaatactggatggatatccactctanatgtcacagtgttacatgttatttagacccattttggttcttggttagttcctgaaaacggtgctggtaattcctgtgttcaaagataaktagttcttcatagcatattaaaaaggtgagaratgagcgaagatgccactgtcattttgagaaattgagtgtacagtctacctcatgaaatgttatagccttcagtagtgttaattactacactgaagcattccgggaaaaacaacctgtaaggaggccgtgagccctgaragccaggaragaaatttagatggccycctcagagggcaattctgtactcctgttactatgacttagcttcttgacagcctataaaaagcaattcataaagtaaaaattaaatcaatgataagttaaaacccaataaaggttaaaagttataaaatagaaatagatgagatttaaaacagaagataaaaggctagagccaatgagctaaaaggttaccattttattttgaaaagacaaaaaaggttaagataaaaggctaaagcccatgagatgcaacactgaaaataataatgtaaattttatcaagggtcaagcaaagaaaccttaaggaatggaacctaggcactcnagattttgnanacttgacccggaagggaccacagatannat

SEQ ID NO: 610 - DNA, 390 bp, Homo sapiens
  SITE (390): n equals a,t,g, or c
agaacaaccattcattaagctgacagactgtgtctgaattcacacagcttgtctgctgatcattgtttgtgttcttagctasaagacatakaagctgagggcaggaartatctggaaacttggttactcactgtctgatagttgatgctggtgagtactggaactyarctagtattgtcagttagaatgtctacatacggccttttcatgtggctgcttggcttcctcatagaatggtggcctggttccaagggagaacatccctcctgagaggagatgggagagggagagaacttartgtaagaagtcataacacctttcctatattcttgggtgtagcagtcacaggcctgtccaggttcaagaggagggcaaacagatttctctctn

SEQ ID NO: 611 - DNA, 232 bp, Homo sapiens
  SITE (48): n equals a,t,g, or c
  SITE (70): n equals a,t,g, or c
  SITE (221): n equals a,t,g, or c
catgagcttctgtgcccagtttaccttttccttactcctttatcatangagttcttatgtacttgttcanaaaataatgctcataaaaattcttttggaacacaagtttaataacttcagtattaatcactgtcttttcaggaagcacagttttgtcagttctaattagttaactctaagatctatattatgacagtctcatataataatgagtatatttngaggaatcttt

SEQ ID NO: 612 - DNA, 436 bp, Homo sapiens
  SITE (233): n equals a,t,g, or c
  SITE (413): n equals a,t,g, or c
  SITE (436): n equals a,t,g, or c
tatgcctgggataatatagtattttataaccagaccacaaaaatcagtttcacttaatagtgctaaaggggcttctttctttacatatgaattgtattgatttttgtgttttttttaaatggagtgttgcttaacagattgagtactatactaaatctgtaaaaataggtttactaatatgaaaaggtgcttcagtatcatagttatacttctgacatttatagaatatgtancytaattcaggctgctttttaagaaatggaatatcatactctttctggaagtaccttactctataacttgatattaagcctgtgttaaaaaattgcctgtgctcccttactctgtttcttccttttgggccacagactccttarggargargtgarggaraatgaatctacttcatcaangaactaaaatattatgttactan

SEQ ID NO: 613 - DNA, 282 bp, Homo sapiens
  SITE (267): n equals a,t,g, or c
ggcagaggaggaaccatggaggagaaatagggatgcacttcttgggtttgtttattatgaaagcttaatatttagcatcttgcttcagaagaacttaaattgtaaaagcctgttctgataattcatcttttccttggaaatttagaaggtgacattaattcttgggttaatggtgaatgctttgtcttattcattgtgtagaacctagcttgcctcttctcttcctttatttctgtttcagtctttttttttttttttttttttttngggaaaggggccccg

SEQ ID NO: 614 - DNA, 818 bp, Homo sapiens
  SITE (380): n equals a,t,g, or c
  SITE (628): n equals a,t,g, or c
  SITE (774): n equals a,t,g, or c
gaattcggcacgagcaggaagtcacatctcccattatttttgttttgccccaattttttttttatttttagagacagggtctcactatgtcacccaggctggtgggcagtgagctatgatcatgccactgcattccagcctgggtgataatagcaagaccctgtctcaaatacataataaatgaaaagaaaacaatgcttgagcttacagatacttcagtgatccttgttttagttctacttatgccatcaaaatggtggcatattcaacctaagtaattgacttttgggtttaggaacaagatattccaacatctgcaaagaagaaaaggatcacaaacagcagagagcacaaactgtagtagtggggactaccaaggnagctggtctcgaaagcaacccacatgaagccaccgcagaccccgccaggggaagctgaacacasaaagcggagtcagagccttgcaatatgtcagtggaacaagaattcccgttagactaagagccctgaggatctaggtaaagcagaatggctggaaaggggcttcctaaggactcctcacatgggtcttagaccttttgggtcacatcccctttgagaacagtaaaacctatgacccttgtcctanaaaaatgcacatwccctcaattttgcatgtaatttcagaargcttatggaacccatgaatttaatcacaggsttcttgggggtgcaargatccccgtttaaatgaccctctgttctatggtattgggtaggggtctgctttattangccctctgaatatggagtctattcctcactaagaatgataatat

SEQ ID NO: 615 - DNA, 550 bp, Homo sapiens
  SITE (325): n equals a,t,g, or c
  SITE (347): n equals a,t,g, or c
  SITE (385): n equals a,t,g, or c
  SITE (482): n equals a,t,g, or c
  SITE (518): n equals a,t,g, or c
gaattcggcacgaggaacttggaaggcacactagactgtgggaaagtttgggtgggctgctcaccaccctgtgattttcagaggtcctagaatgttctttagagtattcctgcagtttttgaatggatgtcaaatctcttttggtttggggctacccgaaatgtttacattctgagtcgttggtccattttcctccaacaatgcacatttaggattgctattgggtacctaatgaactggattgrtcataagattctcaggatctctggccccagctcgacaccactttctagctatgggcacgttaggtaagtcctttaaccantctgactctcacaactgaatanaaggttagaaccagaatccaacgtcaatagggtgcctngaggattaagaggataattcatgggacttggcatgagtcttaactagattgtaagccccatgggaggagctgtcttcccaagggcctccagcagggnctggcataaagtgaggagctcaaacacacatttgtnaattaacagtaagcattcaggcaatgtaatgg

SEQ ID NO: 616 - DNA, 335 bp, Homo sapiens
  SITE (245): n equals a,t,g, or c
  SITE (334): n equals a,t,g, or c
aattcggcacaggttttctaagcactcaagatgatgacaagatttctaatccttacattctatctggagatgatggagaggagggtcttctcttgcccactctcccgatccttgtggggacatgaggaatactagagataacacaccctccaccctttgaacattgcaatgccttagaagtctcatgttagcctctgggcctctgaactctgaaagccattcttagggaggtagaacctcggatnaaccaacaaaacttcattgggatcttcctgaaagcagcttctgggatgggaaaaccaatggacttcactcacaggaaaacggcccatgng

SEQ ID NO: 617 - DNA, 607 bp, Homo sapiens
  SITE (600): n equals a,t,g, or c
cccctcgarttttttttttttttttttttttttgagatggagtttcactcttgttgcccaggctggagtgcaatggcgcaatctcagctcactgcaacctccgcctctcgggttcaagcgtttctcctgcctcagcctcctgagtagctggaattaaagacatgcaccaccatgcccggctaattttgtatttttagtagagacggggtttctccacgttggtcaggctggtctcgaactcccaacctcaggtgatcccccacctcagcctgggattacaggctgggattacagtgctgggattacagtgttgggattacaggcatgagccacaacatgtggccacattgatctttactctcctgacaaagtttaataaagacaatcccaatcatgatgtccattctgtggaatataggacagtgtgaaaagcatgagacaatcactccatkgaatttccatagatttaatataccaaatctcccytttaaataaattgcaggggtgcagaaatgaatttaatcataaaactgatcatcmatccattcatatcactggttgggggccttgggcccttttccttccaatttaaaccatggnaaccata

SEQ ID NO: 618 - DNA, 500 bp, Homo sapiens
  SITE (500): n equals a,t,g, or c
ctgtctgaatcaactgtacgagttaaacagttttatttcgaaattaaccaacataaacaacaacaacaacaacaacattcactacccattccctcgttaggttggaaaaccagtctgaaaaaataaatacaatctgtgaccatgaaaaggagcaatcacttatttttcccatatgttttgaacattatttttaaaaatagattgggaatctggagggtaaaatgccgggtcccttcccgagcccttagagcccgaacgttgtcgaatcggtcaatgtccaccccgctgctcacctctgtcccagcagcgccggggccagcgcgccctcccgccgcgtctgggagctggcggggaaaagcaggtccccggggggtatcgagtgtccagggatatccacgcagacatccttgtacttgcaaatacaaagaaacacacaggacagagatcaggctcgcgcagggctcgatctcctcggggctcagggttggagggccgtacan

SEQ ID NO: 619 - DNA, 498 bp, Homo sapiens
  SITE (483): n equals a,t,g, or c
  SITE (487): n equals a,t,g, or c
  SITE (495): n equals a,t,g, or c
  SITE (496): n equals a,t,g, or c
ttgcttggctcttggtagtgggaagtgcaggggtttcggctttaggtgtggctagatcgagggctcatgcagtattttcatctcatctctcagttctgtttttctctggggttggcgtcaggcagcctctgcacagccaaagaaacggtccatgctatggtggtccctctgggtcaggatcccagaagagagaggcctctttcctcagtgtccgtcaatctcttaagaggaccctgattggcccagcttgggtcacgtgcacacgcctttgggcagggaggcggggtttcatgattggcagctccagcgtgatcccagttgttagagaaagggatgctggtgaatgaagaagcgcagatgtgcattgcagtgggggagctggaatactggcctgaactacaggtgcaggctcatattttgaccattatcatttgcattttccacctctccaattacgaatgttaattatctgaaactgctacnaaancttacatnnta

SEQ ID NO: 620 - DNA, 657 bp, Homo sapiens
  SITE (549): n equals a,t,g, or c
  SITE (596): n equals a,t,g, or c
  SITE (603): n equals a,t,g, or c
  SITE (636): n equals a,t,g, or c
  SITE (645): n equals a,t,g, or c
gcctaggtggcatctgattcccatacaaggctatttcgtctacattgaaaatctatcattgaattcagccaccttcttcagttatcttagctagatcttctgaataacttgctgcagcttctccatcagcacctgctgcttcaccttgcacttacatgttatggagatggcttctttccataaacctcatgaaccaaactgccagcttccaagtttccttctgcagcttcctcatctctctcaaccttcataggattgaagagagttagggccttgctctggaataggctttggcttaagggaatgttgtgactgtttgatcttctcttcagaccactaaaactttctccctattagcagcaaggctgttttgctttcttatcattgtatgttgactggagtagcacttataatttctttcaacaacttgttycttgccytctcaacttgggtaaagtttaccacagaggtctagttttcgggcctgtctcagctttccacakgccttctcataaccttaatcatttctagcttttgatttaaagtganaagcatgcaagtcttcctttcacttgcactgttagaagccattgtangggtatnaattggccggattcaaaatgtggggcccgaggnataggcagnccaaggaaagaa

SEQ ID NO: 621 - DNA, 329 bp, Homo sapiens
  SITE (240): n equals a,t,g, or c
  SITE (315): n equals a,t,g, or c
aaaagctccttttattaacaaagatggggtgccgccatgttagacaggctggtctcgaactcctgacctcaggtgatccacccacctcggtctcccaaagtgctgggattacaggcaataactttatgtctcccctcccttatctctgggcaaaccttgtttattctctactaacttggttgtaatctgttaatcaaagtamacccttgaatttgttattctccacgctgctgggacacnttggagtggccttagaaggctgcaaaatggactgatggtttctgccttccactgacgtcccaatacgacttcctnatactagggctcca

SEQ ID NO: 622 - DNA, 1036 bp, Homo sapiens
  SITE (34): n equals a,t,g, or c
  SITE (417): n equals a,t,g, or c
  SITE (1034): n equals a,t,g, or c
ggcgtataaaagagatcgatattcgagcgcaccnaktatagcaccagaccgatagtcagcgccagccctgccaacacggcacaggcaatccacaagcggtttttacggcgaatattcatgcagcctcctgctgttgcgcacacgtaaacgcgcctcacgcgcccgctgttgcgccacgccacgcagaattgcgcgatgttgcatcaccgagtgcacgaccaaaaccaccagcggaataacggtcatcaccaccgccagccagacaaaaaaggcgtaaccgcccattgcgaaaaattcattccaggaagcaaatgcaggggtcatttacggcctcttttcagtatcagttcactcacccacggacggcgtttttccatcagcaaaatcaaattacgcatccgcatcagcgtcagcgtnggcagacaggagcaggaagccaaaaatcgaccagcgcagcggcgaacgcatcgccggatcgatactttgctgcatccgcgttgatccctgatgcagggtgttccaccactccacggagtaatgaataatcggcagattcaccacgccaatcagcaccaggatacctgccgcacggcccgccagacggcggtcgtcgaaggcgtgccacagggcaatcacacccacatacaaaaacagcagcaccagttcagaagtcagacgtgcatcccatacccaccaggtgccccacatcggttttccccatgcagagccggtaaccagggcaataaaggtaaacacggcaccaatgggggccatcgccgccaccgccaggttggccattttcatytgccagacaaggccaataaacgctgccactgccattgatgcataaatgcccatygaccagatygccgcaggcacatgcaggtagataatgcggtagctatttccctgctgataatcagccggagcaaagccgratccccagatccagccgacggtaagcacgaccacactggcaattgccagccacggtataaaccagccacagatttgatacagccgtggtgggatcnca

SEQ ID NO: 623 - DNA, 451 bp, Homo sapiens
ctggaacgactgttccgtgacgatttgcaggacggcatcttgaacaattgatgttgttgccgttacccttgcccgccgttgtgctggcgaaggtgatggcgcactggatggtaaccggtctgccgttactcatcctttcgccactggtagcaatgctactgggaatggatgtttatggctggcaagtgatggcgctgacgctgctgctgggaacgcctacgcttggctttctcggtgcaccgggcgtggcgctgacagtgggacttaagcgcggtggtgtgctgctcagcatactggtgttaccgctgactatcccattactcatctttgccaccgccgcgatggacgcggcttctatgcattgcccgttgacggtatctggcaatttaggcgcgttgctggcargcaccgcgacattaagtccttttgcgacggcggcagcgttacgaat

SEQ ID NO: 624 - DNA, 615 bp, Homo sapiens
  SITE (513): n equals a,t,g, or c
  SITE (520): n equals a,t,g, or c
tcgagttttttttttttttttttaatgagacaaagtttcactcttgtcccccaggctggaatgtaatggtgcaatatcagctcactgcaacctccggctcccaggttcaagccattctcttggttcagcctcccaagtagctgggattacaggcatgcactgccatgcctggctaatttttttatatttttagtagagactggatttcaccatcttggccagactggttttgaactcctgacctcaggtgaaccacccacctcagcctcccaaagtgctgggattacaggcatgagcctcaggtagttctttacagcagtgtgagaatagactaatacagaccctaaaagatttcttgaaagatagtgaggtttaagctgaagcctgaacctgcaaagagggtggaagagtattttatgcagagggaacagtatatgcaaaaatcttgagaggagagagaatgtgctagaaactacagggggttagggctttttgaagctagaagtgagagtnaacaggnggaatcccagaatggaagacagatgaagtcatttaaggatttgatttatctagagggaaggggamactgaaggcttaagcagtaccattttatgc

SEQ ID NO: 625 - DNA, 178 bp, Homo sapiens
  SITE (166): n equals a,t,g, or c
gaattcggcacgagccagtgattctaattaagaaaaggagaacagtcttacctactgagaagaatcatgagcatttctccagtttgcaacaacgttattctgattcataaacacactatgattgagtgattagtattgagtggttagtggttagtgattattaagnacatggttcttg

SEQ ID NO: 626 - protein, 118 aa, Homo sapiens
  SITE (61): Xaa equals any of the naturally occurring L-amino acids
  SITE (69): Xaa equals any of the naturally occurring L-amino acids
VDLICIHHVHLAWKTFPSKLQRSCPTVEHKLYFHHSEVMGMGMGLGQSTAGETHSSEQTDXNSVGERSXKQHRSASKYNSINLYMHTPVSSYLTTKSIFQNIKNFNLLSWPSEWVQKE

SEQ ID NO: 627 - protein, 134 aa, Homo sapiens
  SITE (79): Xaa equals any of the naturally occurring L-amino acids
  SITE (84): Xaa equals any of the naturally occurring L-amino acids
  SITE (87): Xaa equals any of the naturally occurring L-amino acids
  SITE (98): Xaa equals any of the naturally occurring L-amino acids
  SITE (110): Xaa equals any of the naturally occurring L-amino acids
  SITE (134): Xaa equals any of the naturally occurring L-amino acids
LFETCPMSELAEKQGSEVTDPTAKAEAQSCTWMFKPQPVDRPVGSREQHLQVSQVPAGERQTDRHVFETELFRLKPPCXKTAVXYCXGWNPSRQFLVXKSFPGLEQQKKXRPRYRGHPGFCQIPLVLKLSMVPX

SEQ ID NO: 628 - protein, 53 aa, Homo sapiens
  SITE (37): Xaa equals any of the naturally occurring L-amino acids
  SITE (38): Xaa equals any of the naturally occurring L-amino acids
RSIISNNGFLVRGKGNGEGGLFTQQFGNANDYLWFSXXNSSYLLASFYGTAEF

SEQ ID NO: 629 - protein, 78 aa, Homo sapiens
  SITE (60): Xaa equals any of the naturally occurring L-amino acids
EKEHSWVLSTEVAPETSLAFLRCYHGRCREEHETCLNTKLTRDIPKNTAPHLEAPSRRKXLTPLRGHVAVKTMDCSLP

SEQ ID NO: 630 - protein, 63 aa, Homo sapiens
  SITE (43): Xaa equals any of the naturally occurring L-amino acids
  SITE (63): Xaa equals any of the naturally occurring L-amino acids
SELQACWATLERSGHKLMRRMQTLLPSEIFTCVLDRALQRGSXKWPWCLITLPKLGPVSTSCX

SEQ ID NO: 631 - protein, 87 aa, Homo sapiens
  SITE (57): Xaa equals any of the naturally occurring L-amino acids
  SITE (61): Xaa equals any of the naturally occurring L-amino acids
AGPILVSVHSAHSSPTMFLVLIATEELKEFFAKARAGSVRLIKVVIEDEQLVLGASXEPVXRWDQDYDRAVLPLLDAQQPCYLLYRL

SEQ ID NO: 632 - protein, 42 aa, Homo sapiens
  SITE (39): Xaa equals any of the naturally occurring L-amino acids
FYHLNIPPQFSSPPLHSISTDSTFLWAKSPSSFPQKNAXPGS

SEQ ID NO: 633 - protein, 129 aa, Homo sapiens
  SITE (25): Xaa equals any of the naturally occurring L-amino acids
  SITE (106): Xaa equals any of the naturally occurring L-amino acids
GTPAPAEAEQGKSQCPSGSTAQSWXAMDILVPLLQLLVLLLTLPLHLMALLGCWQPLCKSYFPYLMAVLTPKSNRKMESKKRELFSQIKGLTGASGKVALLELGCXTGANFQFYPPGCRVTCLRPKSPL

SEQ ID NO: 634 - protein, 115 aa, Homo sapiens
  SITE (1): Xaa equals any of the naturally occurring L-amino acids
  SITE (101): Xaa equals any of the naturally occurring L-amino acids
  SITE (102): Xaa equals any of the naturally occurring L-amino acids
XLHRIRHEPSHASVVLEKSATQRLGPVYVPQGTVVHLAGLVSSLPSPSHPLSPGNWDLGPSYSPYFLLSTSPMQQSQDAILSEHPIPHRNQEPFTVMPTTXXTYNSLGASDWHCK

SEQ ID NO: 635 - protein, 140 aa, Homo sapiens
DKEEEQKHAPTSTVSKQRKNVISCVTVHDSPYSDSSSNTSPYSVQQRAGHNNANAFDTKGSLENHCTGNPRTIIVPPLKTQASEVLVECDSLVPVNTSHHSSSYKSKSSSNVTSTSGHSSGSSSGAITYRQQRPGPHFQQ

SEQ ID NO: 636 - protein, 46 aa, Homo sapiens
RACQQLLGRNREVFGNRAASIPNKAGEVSPKNKRQAHVQGEDFLLC

SEQ ID NO: 637 - protein, 80 aa, Homo sapiens
GRQEGKKSPTTVRNGAPFPVPKQSSLFPLPSPAPAPCPPQHLVRKTVRGRESHGQMLTRPLCEASSGFNFIHQFILMSKQ

SEQ ID NO: 638 - protein, 29 aa, Homo sapiens
  SITE (13): Xaa equals any of the naturally occurring L-amino acids
ETRKPSAQLRAAXVLRKDLRRPLAFTSGL

SEQ ID NO: 639 - protein, 239 aa, Homo sapiens
  SITE (10): Xaa equals any of the naturally occurring L-amino acids
  SITE (216): Xaa equals any of the naturally occurring L-amino acids
  SITE (217): Xaa equals any of the naturally occurring L-amino acids
  SITE (221): Xaa equals any of the naturally occurring L-amino acids
  SITE (239): Xaa equals any of the naturally occurring L-amino acids
WIPRAAGIRXENFVSHQKKPYCHAHNPKNNTFTSVYHTPLNLNVRTFPEAISGIHDQEDGEQCKSVFHWDMKSKDKEGAPNRQPLANERAYWTGYGEGNAWCPGALPDPEIVRMVEARKSLGEEYTEDYEQPRGKGSFPAMITPAYQRAKKANQLASQVEYKRGHDERISRFSTVADTPELLRSKAGAQLQSDVRYTEDYEQQRGKGSFPAMITPXXQIAXRANDWQVMLGTINNIKMX

SEQ ID NO: 640 - protein, 91 aa, Homo sapiens
  SITE (82): Xaa equals any of the naturally occurring L-amino acids
  SITE (90): Xaa equals any of the naturally occurring L-amino acids
HWVSEVLQALLAPGLSLDTQDHPDSGVLQEFTARPASHHLTSISSNPTCPRASAPPVPTGPLTLRHPGWMISLQMEHSMSMXLNLPSPLXP

SEQ ID NO: 641 - protein, 46 aa, Homo sapiens
  SITE (37): Xaa equals any of the naturally occurring L-amino acids
VSTYGIVMWNILLPVGHSPNNVENTYKLWPQYLHSIXPWLRPTHHP

SEQ ID NO: 642 - protein, 57 aa, Homo sapiens
RRPLTSKQLFLLSSSKPLSPGTVILTLGSPETLPDWDSCSRGGNPGLGQHCGCGQVG

SEQ ID NO: 643 - protein, 99 aa, Homo sapiens
  SITE (83): Xaa equals any of the naturally occurring L-amino acids
CFSYNFRGFKNTPHPTCLSQTTGFQIALPIDTETPTEASKALHAGPPPPSPVSPFSPVLFPPRHVSLFVLAGNTTSGPLSRLXPLPGMLSSCHLYFLLS

SEQ ID NO: 644 - protein, 146 aa, Homo sapiens
  SITE (26): Xaa equals any of the naturally occurring L-amino acids
  SITE (38): Xaa equals any of the naturally occurring L-amino acids
  SITE (74): Xaa equals any of the naturally occurring L-amino acids
  SITE (136): Xaa equals any of the naturally occurring L-amino acids
  SITE (140): Xaa equals any of the naturally occurring L-amino acids
  SITE (145): Xaa equals any of the naturally occurring L-amino acids
QAARTLPKAQSQGPRATPKQGIKALXFMRHQPYQLKTXMFCFDEVPPTPGPIASGSPKTARVQEIRRFSTPAPXPTAKPLAPTVLAPRAPLHWMNPSGKTKWAQPLFLTHPSSQKLPGLGGFSHSCGFQVPGPDFXPPEXDCKLXF

SEQ ID NO: 645 - protein, 52 aa, Homo sapiens
  SITE (38): Xaa equals any of the naturally occurring L-amino acids
IKEHCSKNQNNADQLVSAHNSVDCLRTVLFLFAPKLLXYLHLYHQDSLGVAC

SEQ ID NO: 646 - protein, 19 aa, Homo sapiens
  SITE (18): Xaa equals any of the naturally occurring L-amino acids
KVISPLSICRTELKKKKXK

SEQ ID NO: 647 - protein, 80 aa, Homo sapiens
  SITE (44): Xaa equals any of the naturally occurring L-amino acids
  SITE (57): Xaa equals any of the naturally occurring L-amino acids
  SITE (67): Xaa equals any of the naturally occurring L-amino acids
  SITE (76): Xaa equals any of the naturally occurring L-amino acids
CKVFPVIWSFGNRFHCQHHMPLLLKTQTLLQCRRASPLYICTIXPSAKLYADLLLCXKGYSALLSLXFSGSPDGVXSSWY

SEQ ID NO: 648 - protein, 72 aa, Homo sapiens
RKKRKVPKMACKVLCDLVFVTPVLCDLVFFTPLTLSSTKLLPLLNPLWRWWPPCLSLPQGLGPDSSPAANFH

SEQ ID NO: 649 - protein, 58 aa, Homo sapiens
  SITE (5): Xaa equals any of the naturally occurring L-amino acids
  SITE (38): Xaa equals any of the naturally occurring L-amino acids
NSAEXQTEFHAEFEEENIPEKYILFLWCTYEIVSNIPXATEEIEDRETLALLAARSEN

SEQ ID NO: 650 - protein, 104 aa, Homo sapiens
  SITE (67): Xaa equals any of the naturally occurring L-amino acids
  SITE (100): Xaa equals any of the naturally occurring L-amino acids
SPEKKLITRNIAEVIKQQESAQRMYQNGQKKKKGKKVKKQPNSILKEIKNSLRSVQEKKMEDSSRPXTPQRSAHENLMEAIRGSSIKQLKRVEVPEALRXKHDL

SEQ ID NO: 651 - protein, 57 aa, Homo sapiens
FGRALVSWVLFLDRIINCGKEVMLTITKVIKVTPSGVLTVIQRVVLSAEDLPNINLV

SEQ ID NO: 652 - protein, 68 aa, Homo sapiens
  SITE (15): Xaa equals any of the naturally occurring L-amino acids
CSRNEPGSFHLNSFXQMAQKGSTRFHKEELMCQSGLIQVPLKYIFVLFCFLTSKFNMSMGHWALVSPR

SEQ ID NO: 653 - protein, 46 aa, Homo sapiens
  SITE (31): Xaa equals any of the naturally occurring L-amino acids
LHSILSLLASLYLAISLCGFWCAFVYLSLFXCLLLPSPLFSLSLSL

SEQ ID NO: 654 - protein, 70 aa, Homo sapiens
  SITE (30): Xaa equals any of the naturally occurring L-amino acids
  SITE (46): Xaa equals any of the naturally occurring L-amino acids
TMNLPRTRDIKQNANRQTNHKAKKTGYEGXLPAFPITATEPAATCXGFRTLTQLPLIFNMVFPGSPGNGG

SEQ ID NO: 655 - protein, 73 aa, Homo sapiens
  SITE (68): Xaa equals any of the naturally occurring L-amino acids
NFIRHHKSRTLTSSPFFFFFIIPTTSSYITFFFFFRGTGSHSVVQAGAHGRDPNSLQPQTPRLKWILXPQSPE

SEQ ID NO: 656 - protein, 45 aa, Homo sapiens
  SITE (5): Xaa equals any of the naturally occurring L-amino acids
  SITE (12): Xaa equals any of the naturally occurring L-amino acids
VLVPXRVEDARXRGLDWSHGYQPYSSSMAFFFERYYLRNKVHSVI

SEQ ID NO: 657 - protein, 54 aa, Homo sapiens
LLSPTQDENCHLLSTCFLLSIPTGLSCKSSHLFFVGIPLWDGISLSPLEKDVGK

SEQ ID NO: 658 - protein, 43 aa, Homo sapiens
  SITE (11): Xaa equals any of the naturally occurring L-amino acids
FFTSMTLFSSXHYSDWRASNLGPFRLGKFVESSSGCLNDVFAT

SEQ ID NO: 659 - protein, 65 aa, Homo sapiens
SSYFISYSRDSYMEAYTWEFSKVFYPLEYQMFSVELTSVWSMNFQVNTFLMFLKDGNNKFESYLM

SEQ ID NO: 660 - protein, 56 aa, Homo sapiens
  SITE (44): Xaa equals any of the naturally occurring L-amino acids
SQNLNKKGRWQCCGTAAVAELRITSSVVRYSVMSYRRIFEMGDXGEVQRGAKKCSL

SEQ ID NO: 661 - protein, 37 aa, Homo sapiens
AELNHPFKDPVSNCMPFFFLRQSLALSPRCVSPTSHF

SEQ ID NO: 662 - protein, 45 aa, Homo sapiens
  SITE (6): Xaa equals any of the naturally occurring L-amino acids
RCLRRXEQILFGQEMRYVLKQEHTSSWRQPTNQSHLGKVLGPGTW

SEQ ID NO: 663 - protein, 40 aa, Homo sapiens
RFDLTGLFWGINETVYVKPGFRLYERRNKIRSLCLPPRRL

SEQ ID NO: 664 - protein, 47 aa, Homo sapiens
  SITE (4): Xaa equals any of the naturally occurring L-amino acids
NYGXSWRFMTTSNHSNNLNNPMPIHDKSPRPQSLLRSILVQTVFTWS

SEQ ID NO: 665 - protein, 37 aa, Homo sapiens
PMPSFMSKRRYGVKVENMGSVASLPECESQLYNLLNT

SEQ ID NO: 666 - protein, 67 aa, Homo sapiens
  SITE (14): Xaa equals any of the naturally occurring L-amino acids
  SITE (46): Xaa equals any of the naturally occurring L-amino acids
VGFVISRRKLPYLXHLLWAEPFIPIISFIPYHNLGWWVYIYMLYKXKPRLDPESLCPLLQLVDGRQS

SEQ ID NO: 667 - protein, 72 aa, Homo sapiens
  SITE (5): Xaa equals any of the naturally occurring L-amino acids
RHECXIYSGNFNALKESWQSNCQLKSKQGDSIFKSDYILTLVIFFRDHKLVIDNLFLGSNPQTLTFCLLFTS

SEQ ID NO: 668 - protein, 84 aa, Homo sapiens
  SITE (40): Xaa equals any of the naturally occurring L-amino acids
  SITE (48): Xaa equals any of the naturally occurring L-amino acids
  SITE (76): Xaa equals any of the naturally occurring L-amino acids
SCPSGFALPKTTAPAFIWRWERRTQRGLEEAVGIGNPVCXCWHCLARXPGGVNQPIQGLACSSGAKGCHGDGRGPXPTGLGGPD

SEQ ID NO: 669 - protein, 86 aa, Homo sapiens
HIVEIRIQALPAGHFPPPCTFVFIRHSILTVVCNCLCSQCLTLQGPSGIKVLRLACVQGFLKIKWLPKFLSLALAQKILRQTLRSE

SEQ ID NO: 670 - protein, 36 aa, Homo sapiens
EAEVAVQDCATALQPGQSFSFFNNKLALAYCNCFTL

SEQ ID NO: 671 - protein, 48 aa, Homo sapiens
  SITE (36): Xaa equals any of the naturally occurring L-amino acids
  SITE (40): Xaa equals any of the naturally occurring L-amino acids
  SITE (48): Xaa equals any of the naturally occurring L-amino acids
YKVRIDGIVYYLYCYRGRLHICILHLCAEINPAPDXSTGXSIPGGFRX

SEQ ID NO: 672 - protein, 79 aa, Homo sapiens
  SITE (57): Xaa equals any of the naturally occurring L-amino acids
  SITE (64): Xaa equals any of the naturally occurring L-amino acids
  SITE (65): Xaa equals any of the naturally occurring L-amino acids
  SITE (69): Xaa equals any of the naturally occurring L-amino acids
  SITE (76): Xaa equals any of the naturally occurring L-amino acids
NLKLNPDSPVAYKTKELAPAYLPLLSLAILSLCNDTSKFCPHRTLYNFSSCTFTQIXPFSHLPXXHLSXLRLLVTXCTG

SEQ ID NO: 673 - protein, 35 aa, Homo sapiens
  SITE (13): Xaa equals any of the naturally occurring L-amino acids
  SITE (16): Xaa equals any of the naturally occurring L-amino acids
VNIMSMKGFCNGXTLXEDIVLHSYFIAQYFCKMPY

SEQ ID NO: 674 - protein, 29 aa, Homo sapiens
  SITE (12): Xaa equals any of the naturally occurring L-amino acids
PHINNLGENGSXKIKNSYYFPYLVSGSPA

SEQ ID NO: 675 - protein, 74 aa, Homo sapiens
  SITE (1): Xaa equals any of the naturally occurring L-amino acids
  SITE (34): Xaa equals any of the naturally occurring L-amino acids
  SITE (35): Xaa equals any of the naturally occurring L-amino acids
XHARSSPAHGYWWSPLRHTLCRSLRRTSEWRARXXYHHADCDESVCRCREFPAVPALRRGLPLNRRVYSVPLYV

SEQ ID NO: 676 - protein, 93 aa, Homo sapiens
DLKTSYPFRRPHCQLPPPGRSREAFRMIYNIPFEQGHEVPNLKLLYSHPHFTSSPLFPQLFSGSIPFNLSRSSDPLLCLFTSFQLFSWVNFSK

SEQ ID NO: 677 - protein, 146 aa, Homo sapiens
  SITE (86): Xaa equals any of the naturally occurring L-amino acids
  SITE (131): Xaa equals any of the naturally occurring L-amino acids
  SITE (133): Xaa equals any of the naturally occurring L-amino acids
HRGGSMETVSKWWEFLGRWQWGSRDRDLDAGKSDGVQGERDCYSLSLASDAVSAQACTGHCTSTLPGCLFPSTISSPHTACHHQPXLSWGWHSASLHGLQLHEIGLHAFSLTAPKDTLHHLGFHCQGSVWXQXASTLSLLTDVDRC

SEQ ID NO: 678 - protein, 82 aa, Homo sapiens
ATERAFSDQLHFAAITGAIRCDSCRTGHALTGTIPANQQGDQLERIAMLWLSEISHHFRGDTTANGGGYYRSWSCATCVGVL

SEQ ID NO: 679 - protein, 143 aa, Homo sapiens
  SITE (96): Xaa equals any of the naturally occurring L-amino acids
  SITE (99): Xaa equals any of the naturally occurring L-amino acids
  SITE (140): Xaa equals any of the naturally occurring L-amino acids
SHDLPVPRRWSSPCWRLKERWFRPSPDHKDSCPLPDAACHARQATWLNTRFHQRTPEIGRFFIGQRNFIARFTGITSGGNKQIARLHAKERFHPFXRLXLGVIKQCGSFCLRIRPFHGNHGKVITNGNFDAERLTCWVIXEKS

SEQ ID NO: 680 - protein, 64 aa, Homo sapiens
GGRLKALLSSLGAARPQGWERLRRVASCCIFALLASGSSCGRKHERVTEFGALEGLGRPPCLCF

SEQ ID NO: 681 - protein, 79 aa, Homo sapiens
ARALGHPLGPDFQDSFSSRLAGRRDTWLRSALEVPTRWAFSLSEPQFLHPFLNSTLPKPPFYSSPCRRRPKLQPGFGGS

SEQ ID NO: 682 - protein, 57 aa, Homo sapiens
  SITE (15): Xaa equals any of the naturally occurring L-amino acids
FSPPHRLCHWRWRDXRSMAFEAMNHAGDIRPDMLVILNDNEIRFPKMSARSTTIWHT

SEQ ID NO: 683 - protein, 72 aa, Homo sapiens
TWEVKVAVSRDHTTALQPGDTARLHFKNETKQNNNNNNNKKPKKNPVITESVHGLWVVDAGPTHERFHGPHP

SEQ ID NO: 684 - protein, 112 aa, Homo sapiens
CLGIEFMQTKKNEIWVGIFLLAALLAALFVCLKAANVTSIRTEPTYTLYATFDNIGGLKARSPVSIGGVVVGRVADITLDPKTYLPRVTLEIEQRYNHIPDTSSLSIRTSGL

SEQ ID NO: 685 - protein, 63 aa, Homo sapiens
  SITE (37): Xaa equals any of the naturally occurring L-amino acids
  SITE (55): Xaa equals any of the naturally occurring L-amino acids
RDLPRGAQLGNGGSQASWMKWPPPGLSGLDPGWGVPXGAKLLAPRARAGPSRTGXLGGKPKAR

SEQ ID NO: 686 - protein, 57 aa, Homo sapiens
RTERSGGNLANFLKDDANIHAIQRAAVLLADSFKAGGKVLSCGKAVPIATLCTLPKS

SEQ ID NO: 687 - protein, 42 aa, Homo sapiens
NVCIVWFHDPLLLLTTLPLQFLGTLIQLPSFPLSLSSIIVLI

SEQ ID NO: 688 - protein, 112 aa, Homo sapiens; identical to SEQ ID NO: 684

SEQ ID NO: 689 - protein, 116 aa, Homo sapiens
  SITE (84): Xaa equals any of the naturally occurring L-amino acids
PASTPSTVINWRKFAASPSPAGPNDTASNLPTSNPAPILTSVLAAVHKDAFANDISGKVVQQSRNYRTLIDGRQVVEQRQAQQXLALFGGVAIFTWNSPKCSPAGNRAAECNETPP

SEQ ID NO: 690 - protein, 33 aa, Homo sapiens
  SITE (15): Xaa equals any of the naturally occurring L-amino acids
  SITE (22): Xaa equals any of the naturally occurring L-amino acids
TCKLAAVKMAGWCTXVKNIYAXDQSLERNLNEG

SEQ ID NO: 691 - protein, 63 aa, Homo sapiens
VNRCCNVWHAGFEIGNKLHQAMHIIRFREAFLLHQTTFFQNLIRVKEAICSDQFNTTMFRPTA

SEQ ID NO: 692 - protein, 93 aa, Homo sapiens
  SITE (22): Xaa equals any of the naturally occurring L-amino acids
VHAHAVGPFSVYVDYVRNQQYXEETYSRLMDTNVRFSAELRRLQSLPKCERLPLPSFLLLPFQRITRLRMLLQGHRAGGPVTLPPCPQNILRQ

SEQ ID NO: 693 - protein, 92 aa, Homo sapiens
  SITE (66): Xaa equals any of the naturally occurring L-amino acids
  SITE (70): Xaa equals any of the naturally occurring L-amino acids
  SITE (75): Xaa equals any of the naturally occurring L-amino acids
  SITE (92): Xaa equals any of the naturally occurring L-amino acids
GQRVHRFRRRFAVLNTGHRHPDLVAAVEQQLQQFTHTAYQIVPYESYVTLAEKINALAPVSGQAKXAFLXHRAEXVEKRGENWFAPITGTPX

SEQ ID NO: 694 - protein, 101 aa, Homo sapiens
  SITE (20): Xaa equals any of the naturally occurring L-amino acids
  SITE (25): Xaa equals any of the naturally occurring L-amino acids
  SITE (26): Xaa equals any of the naturally occurring L-amino acids
  SITE (44): Xaa equals any of the naturally occurring L-amino acids
VRLMAEKHKMHATFMANVVXEHAGXXMHIHISMQNNRGENVLSXAEGEDSPRPGRISLPSPTTSVRKKICTSPAPSGLPIYWRAVPSACRGSRTLVRATTA

SEQ ID NO: 695 - protein, 78 aa, Homo sapiens
  SITE (58): Xaa equals any of the naturally occurring L-amino acids
  SITE (65): Xaa equals any of the naturally occurring L-amino acids
  SITE (67): Xaa equals any of the naturally occurring L-amino acids
LTLIAYIIWYPHSVNISDHLINIFLGIGLFQSGPQQGSPLELVHLRVEASFNLWASPXLQLTATXVXRVQAIFPPQPP

SEQ ID NO: 696 - protein, 49 aa, Homo sapiens
  SITE (23): Xaa equals any of the naturally occurring L-amino acids
  SITE (42): Xaa equals any of the naturally occurring L-amino acids
IMSHFVYFLKNSSLLVYLPVYTXIYFIVFSFLLYDYTAACLXSFCLTFG

SEQ ID NO: 697 - protein, 31 aa, Homo sapiens
QILLVDILLSAILSFVLNETSLTYSVKSFYV

SEQ ID NO: 698 - protein, 41 aa, Homo sapiens
RHLAISVQSAVTEKTAHCHSPLSHLLVLSLTQSIEINSEKF

SEQ ID NO: 699 - protein, 43 aa, Homo sapiens
  SITE (9): Xaa equals any of the naturally occurring L-amino acids
SISWCVTYXLCFQELGVLLNTVEKLPLTMAPATVSDKSATFIS

SEQ ID NO: 700 - protein, 40 aa, Homo sapiens
  SITE (16): Xaa equals any of the naturally occurring L-amino acids
  SITE (38): Xaa equals any of the naturally occurring L-amino acids
GREQMSIGQRGSSVLXLEWFLFSQNVLLLSCQLFDAVXFS

SEQ ID NO: 701 - protein, 74 aa, Homo sapiens
  SITE (3): Xaa equals any of the naturally occurring L-amino acids
LPXIRKTAYGRDRNPRLRPSLFLPNLVLQEVVKTPGLLPAKRQSRSPETGPLRCPAQHRLGVLSQQNVCSSVPS

SEQ ID NO: 702 - protein, 60 aa, Homo sapiens
  SITE (6): Xaa equals any of the naturally occurring L-amino acids
  SITE (42): Xaa equals any of the naturally occurring L-amino acids
  SITE (47): Xaa equals any of the naturally occurring L-amino acids
GALDFXLPNHVGKARDLYKSCKETSVFCLENTLYFGQISKKXNCQSXQYGGKNVFLKIQN

SEQ ID NO: 703 - protein, 53 aa, Homo sapiens
  SITE (40): Xaa equals any of the naturally occurring L-amino acids
LYAKYYASELPMKDPEREVLLSPWEGLSSLHEITQLGGDXVQHTKAYTITVEQ

SEQ ID NO: 704 - protein, 97 aa, Homo sapiens
  SITE (78): Xaa equals any of the naturally occurring L-amino acids
  SITE (82): Xaa equals any of the naturally occurring L-amino acids
  SITE (84): Xaa equals any of the naturally occurring L-amino acids
PQRDMGLGEDPGYQEDTDHQEHVGRAWGGQGSWREPGSWEGMRLAEHRAWADVERTWDTRITRRSRSLKVKWPGGFQXLEPXIXMVEYFKIPISKEF

SEQ ID NO: 705 - protein, 61 aa, Homo sapiens
  SITE (31): Xaa equals any of the naturally occurring L-amino acids
SPGEGENVWQELAKLKIKERFSKAVQGVLKXKAAIRRAPCLPQIDPVSIPAALSGWRKQQR

SEQ ID NO: 706 - protein, 70 aa, Homo sapiens
  SITE (51): Xaa equals any of the naturally occurring L-amino acids
ARGLSPGKEKGHPQSSWPLLFLLSYPPSSLWRASRGKSWILTWVWKVPWVXCPPKVYCPEILPGLEINSL

SEQ ID NO: 707 - protein, 62 aa, Homo sapiens
LAKSRVYRHRDAVWTFRAEQGSYALVDLFTRYQVTKNFSLQGNVNNLFDKTYGYQRGKVLIV

SEQ ID NO: 708 - protein, 107 aa, Homo sapiens
  SITE (68): Xaa equals any of the naturally occurring L-amino acids
  SITE (75): Xaa equals any of the naturally occurring L-amino acids
  SITE (83): Xaa equals any of the naturally occurring L-amino acids
GTSRPKVCKEFAAPARPRRTRRARPPGGAVPTRKVPLMRVGSVEDAPLRPPRKPSSKCRRAGRRRPGXGRRATAXAGCQFLLXLKPCIDGPVPRVFTETFFIKTLRT

SEQ ID NO: 709 - protein, 123 aa, Homo sapiens
  SITE (101): Xaa equals any of the naturally occurring L-amino acids
  SITE (114): Xaa equals any of the naturally occurring L-amino acids
  SITE (118): Xaa equals any of the naturally occurring L-amino acids
  SITE (123): Xaa equals any of the naturally occurring L-amino acids
HEASWASASARERALTRSPATGACPAWAMLPSTRTATPRLAQFGVLGPAGPHGLHAQLPVVGVTINAPVPAPAPHPPQVRTSVSGCTRRRHYVPHRPAQKXGRPGLSGVKCTDXRSPXPKPAX

SEQ ID NO: 710 - protein, 73 aa, Homo sapiens
  SITE (32): Xaa equals any of the naturally occurring L-amino acids
  SITE (51): Xaa equals any of the naturally occurring L-amino acids
SVPCALIDSPFDFDVCTLQDLFPIQQTESLDXSYPINPEFALNTSAGTDLXNQLRLLKLLIADFLHLLQGKKR

SEQ ID NO: 711 - protein, 56 aa, Homo sapiens
  SITE (16): Xaa equals any of the naturally occurring L-amino acids
  SITE (45): Xaa equals any of the naturally occurring L-amino acids
  SITE (54): Xaa equals any of the naturally occurring L-amino acids
ARGARARPGSRILRLXPSTPSPPPPLRTRPQPAPRQWFPWSLTWXPLKNWKVLXLL

SEQ ID NO: 712 - protein, 40 aa, Homo sapiens
  SITE (35): Xaa equals any of the naturally occurring L-amino acids
ENLYRKKVISVCLTWEGPLISSVSSGLYQIIPYWXRNLAM

SEQ ID NO: 713 - protein, 60 aa, Homo sapiens
  SITE (40): Xaa equals any of the naturally occurring L-amino acids
HECIPCCSQPLGPSSDQHRHPCGHWSVCVPTKVSDPGVHXGAAGAEEWAVGFRKEASGIA

SEQ ID NO: 714 - protein, 65 aa, Homo sapiens
  SITE (9): Xaa equals any of the naturally occurring L-amino acids
GLLKRVKSXGQGRQWDSLAIGSGYFHSGVILLIPLKPPKNLYKALLYIYTHTRTYVRCMCIYIYK

SEQ ID NO: 715 - protein, 50 aa, Homo sapiens
KVRLQVPVRNSRVDPRVRPRVRKLTLINAYDIVMHCIRYKINTSSMLPEV

SEQ ID NO: 716 - protein, 67 aa, Homo sapiens
  SITE (31): Xaa equals any of the naturally occurring L-amino acids
ILGDIMRRYACRYRPNSRSTHASGRSRSRTXYNLILLFGSLCSSHSLSRAGVPVFCTRLTFLMGNFF

SEQ ID NO: 717 - protein, 34 aa, Homo sapiens
  SITE (34): Xaa equals any of the naturally occurring L-amino acids
GDGYTIYSNVIISHISVSKYLMQSDKYIHLLCSX

SEQ ID NO: 718 - protein, 59 aa, Homo sapiens
PFILIQVYHYYRIIVWMRPQPKITYTVKMMHITYMFVFCYTLNDQEYHKNGFGYIINSS

SEQ ID NO: 719 - protein, 66 aa, Homo sapiens
PRVRESSMEDKGRDLQAKECQRRPAHHQKLAERYGTDSSSQPQRENPADTWISNSWPPERIPGERT

SEQ ID NO: 720 - protein, 53 aa, Homo sapiens
VKVFIASPSRRKTYFSGSRSLAYLHGFRNLNSRVIFLVSMRRQLVFQQCGPMG

SEQ ID NO: 721 - protein, 52 aa, Homo sapiens
IASKLGLRLRFVIVYLKNLRFKNSHLLSQFLLRFLKICKESPFIKQHIKNER

SEQ ID NO: 722 - protein, 66 aa, Homo sapiens
  SITE (4): Xaa equals any of the naturally occurring L-amino acids
  SITE (56): Xaa equals any of the naturally occurring L-amino acids
VTLXKVRLQVPVRNSRVDPRVRSSRSRAASMTFSKKKKKKKKKKKKKKKKKKKKKXGKKKKRGGGG

SEQ ID NO: 723 - protein, 35 aa, Homo sapiens
  SITE (22): Xaa equals any of the naturally occurring L-amino acids
NQPIWKAIHLSDKKKREKRWKXQLLLEVLVTSCTS

SEQ ID NO: 724 - protein, 61 aa, Homo sapiens
  SITE (14): Xaa equals any of the naturally occurring L-amino acids
  SITE (25): Xaa equals any of the naturally occurring L-amino acids
  SITE (36): Xaa equals any of the naturally occurring L-amino acids
  SITE (41): Xaa equals any of the naturally occurring L-amino acids
  SITE (44): Xaa equals any of the naturally occurring L-amino acids
KSCCLANIHTFHSXIVLFCSLLLGXGQWDVHTWETXKVLKXVWXLNLPSCLPAFLYHKKIS

SEQ ID NO: 725 - protein, 23 aa, Homo sapiens
QHVHKAFPPLKHSYVNSITSKYA

SEQ ID NO: 726 - protein, 108 aa, Homo sapiens
  SITE (59): Xaa equals any of the naturally occurring L-amino acids
  SITE (74): Xaa equals any of the naturally occurring L-amino acids
  SITE (86): Xaa equals any of the naturally occurring L-amino acids
  SITE (102): Xaa equals any of the naturally occurring L-amino acids
FHAPKMGHKVVVFDISVIRALWETRVKKHKAWQKKEVERLEKSALEKIKEEWNFVAECXRKASPRLYTARMASXTPACGFWTRLKXTLSPGRIHFPRTEGKXKHCVCV

SEQ ID NO: 727 - protein, 41 aa, Homo sapiens
  SITE (20): Xaa equals any of the naturally occurring L-amino acids
SVFSCKLGIGSRDLTSFKNXPHASRGRVGRPGNSGPVPAGV

SEQ ID NO: 728 - protein, 76 aa, Homo sapiens
  SITE (37): Xaa equals any of the naturally occurring L-amino acids
PRVRKKAYFVSATIILLFMPIASQLKGHRFKDITRAXKLWAHWPEIKKLYIRNRDVSISDKKKILFIWHNFSQILP

SEQ ID NO: 729 - protein, 17 aa, Homo sapiens
HASAEVRCWEKKKKKGG

SEQ ID NO: 730 - protein, 56 aa, Homo sapiens
  SITE (2): Xaa equals any of the naturally occurring L-amino acids
  SITE (14): Xaa equals any of the naturally occurring L-amino acids
  SITE (36): Xaa equals any of the naturally occurring L-amino acids
SXLPSSGLSMILYXPRDNWIGYALLVGKFWNYFNIXSDRRVRNRNFCLSWEYLVVH

SEQ ID NO: 731 - protein, 22 aa, Homo sapiens
PWAGILIRLFKGHPQNSGEVLT

SEQ ID NO: 732 - protein, 150 aa, Homo sapiens
  SITE (76): Xaa equals any of the naturally occurring L-amino acids
  SITE (81): Xaa equals any of the naturally occurring L-amino acids
EISWFPLKKYLPSWATMGKSLIKIHTRVRVQLRLTNHCFRPLSVRILRMGPRLQGRVLTAVTPGQGNQLEHFQGLXSLRDXAHSTPVRSTSHGDTFLPHVRSSRTDSNERVAVIADEAYSPADSVLPPLWLTQAGADVAFPADQWSHLQH

SEQ ID NO: 733 - protein, 25 aa, Homo sapiens
  SITE (14): Xaa equals any of the naturally occurring L-amino acids
ASASSRSRAAALFXKKKKKKKKRGG

SEQ ID NO: 734 - protein, 52 aa, Homo sapiens
LSMEVASLSPSCQMTGCNGHDHSPDPIWKMCSGVHPARRVLPWASLSPFSPG

SEQ ID NO: 735 - protein, 116 aa, Homo sapiens
  SITE (87): Xaa equals any of the naturally occurring L-amino acids
  SITE (91): Xaa equals any of the naturally occurring L-amino acids
  SITE (95): Xaa equals any of the naturally occurring L-amino acids
  SITE (96): Xaa equals any of the naturally occurring L-amino acids
  SITE (100): Xaa equals any of the naturally occurring L-amino acids
  SITE (104): Xaa equals any of the naturally occurring L-amino acids
LDEVETGLLCPGSSPLCPDQSSGCPGRVPCPSGRLLVMFASDERWMILTPCAPWGRASGHRTVWRHPRGPQRHPETRRWLVCVKKHXVLAXSSLXXLKKXPVDXSSLVAPPDLDGL

SEQ ID NO: 736 - protein, 44 aa, Homo sapiens
  SITE (1): Xaa equals any of the naturally occurring L-amino acids
  SITE (14): Xaa equals any of the naturally occurring L-amino acids
  SITE (19): Xaa equals any of the naturally occurring L-amino acids
  SITE (23): Xaa equals any of the naturally occurring L-amino acids
  SITE (26): Xaa equals any of the naturally occurring L-amino acids
  SITE (28): Xaa equals any of the naturally occurring L-amino acids
  SITE (44): Xaa equals any of the naturally occurring L-amino acids
XKEHNFMKNNFISXIKLFXVWLXIKXLXSHFCLCVQIITCYFSX

SEQ ID NO: 737 - protein, 112 aa, Homo sapiens
  SITE (65): Xaa equals any of the naturally occurring L-amino acids
  SITE (71): Xaa equals any of the naturally occurring L-amino acids
RVKMRVPVFEDIKDETEEEKIGEEENEEDQVFYKPVIEDLSMELARKCTELISDIRYKEEFKKSXDKCTFXTDSPMLNHVKNIGAFISEAKYKGTIKADLSKSLYKRMPSTI

SEQ ID NO: 738 - protein, 77 aa, Homo sapiens
FGTRFKLITCKALVRGSWTFSVFRALLDAHMAMSVQSVPTQPLGSSCSLSCRKKPHQNSRISAMISLLHLSSETCMI

SEQ ID NO: 739 - protein, 52 aa, Homo sapiens
WVPELDFTKCLLDSRPHSVSSLGSRLHHFQLLLTQDLTPNYPGSRIQPSNIF

SEQ ID NO: 740 - protein, 37 aa, Homo sapiens
ESDQPRFESWLCNTFLLASIHPFFILSSAFPNLNTEH

SEQ ID NO: 741 - protein, 56 aa, Homo sapiens
REDLGFSPVSINLKKWDLMEGRGGNAEDVLLSRCHNSSPVSRSDHGNSQIFVIDDL

SEQ ID NO: 742 - protein, 62 aa, Homo sapiens
FGTRQKAGSGAHAKLFIRGLTAFTGAEPLWRNHLPIGPLINIISLGVKFQHMNFGGTHTFKS

SEQ ID NO: 743 - protein, 47 aa, Homo sapiens
VPQGYLVFFYFFLKNTSENAVLNQKLISIKTRLLRFILYYHLYYLEN

SEQ ID NO: 744 - protein, 72 aa, Homo sapiens
  SITE (64): Xaa equals any of the naturally occurring L-amino acids
LPPSLLLAAGCRLLTVIRLRREPFPFLPAQQAQSWPKPGGRGRPWEPSGVDPCPRGRGQGKARXFWPDPHRT

SEQ ID NO: 745 - protein, 74 aa, Homo sapiens
NSARVHTGDGAKAAVIPRKQQSQQTASKPRFPPTHPPACFCSSFHMFRVSNSLHFQYQAQVVAPCVGISEYILE

SEQ ID NO: 746 - protein, 49 aa, Homo sapiens
SYYGDNSSKKKFFEPLLFVNIPSIGKVNRSVPVPPFGGGYRTSRGTDIK

SEQ ID NO: 747 - protein, 27 aa, Homo sapiens
NMIRSLLKHWEVQFYLVHFSATVDVYH

SEQ ID NO: 748 - protein, 61 aa, Homo sapiens
  SITE (27): Xaa equals any of the naturally occurring L-amino acids
CVRRRMPRTAAAPRTPQPRRPYSCCLXVPGGYCPNSCGDTTQPDLCFGKVILSRAIPKSQH

SEQ ID NO: 749 - protein, 52 aa, Homo sapiens
REKYQIHGLKAQSLFSWSSINWEDKLKILEQWSLNISIYWNNLRNMLEMQIP

SEQ ID NO: 750 - protein, 61 aa, Homo sapiens
DNSRTLVDSSPEHIILHNYVITGSKWVFTAFKQENPASPQTDSSKTFKNKYMKMCSELRTG

SEQ ID NO: 751 - protein, 123 aa, Homo sapiens
NSARATIEYAPDFRFYITTKLRNPHYLPETSVKVTLLNFMITPEGMQDQLLGIVVAQERPDLEEEKQALILQGAENKRQLKEIEDKILEVLSSSEGNILEDETAIKILSSSKALANEDSQKQE

SEQ ID NO: 752 - protein, 27 aa, Homo sapiens
  SITE (14): Xaa equals any of the naturally occurring L-amino acids
SILLHEMKTTVQFXRCIMTLVNDRLHI

SEQ ID NO: 753 - protein, 126 aa, Homo sapiens
ILPEPEHRSLPRSTSSKLHGLDQAPLLPHFLLSRMEIIKPPPCKPPSQKAVVRIKQDNNGETSLKTVRCQSNLRASERAAVNRYCTRQLLGAHWEPLTTGMGARCLLSKGRQSWLQQRLFSFGIFY

SEQ ID NO: 754 - protein, 59 aa, Homo sapiens
  SITE (59): Xaa equals any of the naturally occurring L-amino acids
HIYFGSHWGMPSRILADLTFTALFLLKIYFWLTFKKETRTGRCLGLRLPHQVFPFIWPX

SEQ ID NO: 755 - protein, 50 aa, Homo sapiens
VFIFVKQNKKPLLNSTGNPLDFWRSGNKGIVPKGHSGCSWATKKQKQKQN

SEQ ID NO: 756 - protein, 39 aa, Homo sapiens
  SITE (32): Xaa equals any of the naturally occurring L-amino acids
  SITE (36): Xaa equals any of the naturally occurring L-amino acids
NVLGIFLVFKIIVEIYKCALHNHTLTQFRLAXSVDXPAV

SEQ ID NO: 757 - protein, 73 aa, Homo sapiens
PYEHLMSSDLRWNSFIQKPCPTPTPATCLWENCHSRNQTLVPKRLGTATLGPTNSNPRYMSNRNAYIWIPKDV

SEQ ID NO: 758 - protein, 62 aa, Homo sapiens
ICANEYLLCQAFFPSSAKNRALLEIVPALMEFMFSVLIEKITLGGSEGELAYRVTISHIAVE

SEQ ID NO: 759 - protein, 41 aa, Homo sapiens
SLIPHQLFTTLFEHFGYCLMTHVRMGWSVSNLIHSELFFKL

SEQ ID NO: 760 - protein, 93 aa, Homo sapiens
  SITE (41): Xaa equals any of the naturally occurring L-amino acids
  SITE (82): Xaa equals any of the naturally occurring L-amino acids
  SITE (84): Xaa equals any of the naturally occurring L-amino acids
TNLPLDEVTFSAGHHPHAHQQGVGLTQIEECRAVAPLQCGXLAPPRPQALTLRRGRGDLWCPSQMQDPYFPALDLWKGEASXTXCGGLPRETR

SEQ ID NO: 761 - protein, 61 aa, Homo sapiens
IPRSGMTGSNYMFKLKRNYQTVFQSNRNLHSHQQGIKVPVACEHLVISNFFFLILAILIGM

SEQ ID NO: 762 - protein, 56 aa, Homo sapiens
NSAREKKTPKAKNFNDLYYSLFTWVLLSKFELMLCASSLMHSCILLNSMHNTEYAE

SEQ ID NO: 763 - protein, 97 aa, Homo sapiens
FGTSYKLSESSFIRVLPHIPFPSCRVPFFSNQCLHFNSRHLVRLCMHLLLQISHSNDKSLSLCFHNFSSFSIGDKTLTQGNLSSFEAQYLLLGRWNP

SEQ ID NO: 764 - protein, 56 aa, Homo sapiens
LKFKNQGALAVTHGLWSTAPGLDPNCHENGTVVPYHHLAHRWDKVQAHVNSLCSRK

SEQ ID NO: 765 - protein, 50 aa, Homo sapiens
AFTKAGQSWIRVNRKGQIIDESSVSRNSFLFFRISASSLLMPLPKYTALS

SEQ ID NO: 766 - protein, 47 aa, Homo sapiens
QPPCTSLIVAVRVQALITGMIIIIILLKIIARIIYMSGSSKSLTNII

SEQ ID NO: 767 - protein, 64 aa, Homo sapiens
  SITE (48): Xaa equals any of the naturally occurring L-amino acids
  SITE (50): Xaa equals any of the naturally occurring L-amino acids
  SITE (59): Xaa equals any of the naturally occurring L-amino acids
RLFCPRSRPAELLVENPEYLRPLLNLLYLSCFLLIFSVRYYSFTNLVXFXLVLGGGSLXAQVES

SEQ ID NO: 768 - protein, 71 aa, Homo sapiens
  SITE (42): Xaa equals any of the naturally occurring L-amino acids
  SITE (56): Xaa equals any of the naturally occurring L-amino acids
  SITE (62): Xaa equals any of the naturally occurring L-amino acids
SKKLLCNTLSINLEVKPARIAYSLVRMPFPLGAWYLECYEWXIYYKPVFFVKACFXDINIGXELREPVLGT

SEQ ID NO: 769 - protein, 78 aa, Homo sapiens
LQFLTFSEFSHPVHQQRPFHSSYKRYLLSFYFSPSPLSYLSLGYQHFSAEIDKSAPRPCVICCLPLFSLTMYHSPLVH

SEQ ID NO: 770 - protein, 70 aa, Homo sapiens
  SITE (28): Xaa equals any of the naturally occurring L-amino acids
  SITE (29): Xaa equals any of the naturally occurring L-amino acids
  SITE (30): Xaa equals any of the naturally occurring L-amino acids
  SITE (55): Xaa equals any of the naturally occurring L-amino acids
  SITE (58): Xaa equals any of the naturally occurring L-amino acids
  SITE (69): Xaa equals any of the naturally occurring L-amino acids
TVSTEKITFTRRKTGRKEDHKTTRNNEXXXGVSPSYHIHDVMGNLHQTQVVMGKXSLXPCCRTHSLWAXC

SEQ ID NO: 771 - protein, 35 aa, Homo sapiens
SLLVLMEYVLKCLRERRRMPATEFQMVQGKDNRVE

SEQ ID NO: 772 - protein, 59 aa, Homo sapiens
  SITE (40): Xaa equals any of the naturally occurring L-amino acids
LGKCLKIDCNFRKVKSKPLVISSNPGGLPYMKVFTDTLGXDGWTGTTQFKTFFMKEKLG

SEQ ID NO: 773 - protein, 60 aa, Homo sapiens
  SITE (39): Xaa equals any of the naturally occurring L-amino acids
NSAQGPGKSTIRLAKRHQGSSLGWRLYPELAARAPGFRXSLACRITGVTPRLVYLMFLNK

SEQ ID NO: 774 - protein, 40 aa, Homo sapiens
  SITE (8): Xaa equals any of the naturally occurring L-amino acids
TAPPKTQXVDFWLLLSDDKVFLGSSPSSTLLLCCKFHLLL

SEQ ID NO: 775 - protein, 42 aa, Homo sapiens
  SITE (34): Xaa equals any of the naturally occurring L-amino acids
GIESVWHITRDLFLTLNSQFVPVYCQSHYLSLTXKKKKTSMM

SEQ ID NO: 776 - protein, 47 aa, Homo sapiens
  SITE (43): Xaa equals any of the naturally occurring L-amino acids
CYPQRLSSDVSVKPKVVLFKELNLLDKIEVSKTKRRKIRRGLXVGRK

SEQ ID NO: 777 - protein, 37 aa, Homo sapiens
SPKKKKKKEKKIPYYKECRDKLALLYLLVGIKISKHL

SEQ ID NO: 778 - protein, 94 aa, Homo sapiens
CSLEPPCLPTAGCVYFSSGLPLVSVLVPTPSLRRLRFIYCYLRPLVRFQISLLQHFTHFPSPNHVLIRWFHSGSKEAKTQVNGLWNPTKVCVNY

SEQ ID NO: 779 - protein, 24 aa, Homo sapiens
  SITE (22): Xaa equals any of the naturally occurring L-amino acids
SYLAFIICITTFSLYTDVVSDXLG

SEQ ID NO: 780 - protein, 49 aa, Homo sapiens
LNHLQEALFLIPSPWAFGLQHIHLAWTQTFSPQQGLYLKPYLGLLSSNL

SEQ ID NO: 781 - protein, 92 aa, Homo sapiens
  SITE (68): Xaa equals any of the naturally occurring L-amino acids
  SITE (83): Xaa equals any of the naturally occurring L-amino acids
  SITE (89): Xaa equals any of the naturally occurring L-amino acids
NNPSGERSNAHIWPSISSPLSYLTMLNWHTKLHQLFPTAYPRWFTLSHIESQQCELGISPCLTAGQRXLFRGAGKQYLGIPFXEKHFNXSFT

SEQ ID NO: 782 - protein, 82 aa, Homo sapiens
DLKGPENAGVGFLTGNLKITLHASLVLCDNRVRDLSLISVIFRDQSDVVARRLPLKVLLFKSYIRLNHIQQRYILEYFFRRG

SEQ ID NO: 783 - protein, 49 aa, Homo sapiens
  SITE (40): Xaa equals any of the naturally occurring L-amino acids
  SITE (47): Xaa equals any of the naturally occurring L-amino acids
HELFYNTNAKSFININCCYPILFSTNEPDFQSFETQLWEXICINCIXRL

SEQ ID NO: 784 - protein, 62 aa, Homo sapiens
  SITE (54): Xaa equals any of the naturally occurring L-amino acids
LFLFFFVFETVSRFVTQAGVQWCDLHSLQPLLPGLKQSSHLSLPSSWDHRHTPXCPVKFLYF

SEQ ID NO: 785 - protein, 111 aa, Homo sapiens
  SITE (22): Xaa equals any of the naturally occurring L-amino acids
  SITE (53): Xaa equals any of the naturally occurring L-amino acids
  SITE (92): Xaa equals any of the naturally occurring L-amino acids
QNSSHFKVNNSMACSIFTMLYXLYLCLVSRHFHLSKGSPCPLSSYSPFLPSPXFWQPPIHLLSLDYLVWIVHINGIIQYVTCDLLADSTQHXIFRVHPCHGSTRTLPTWDK

SEQ ID NO: 786 - protein, 65 aa, Homo sapiens
  SITE (17): Xaa equals any of the naturally occurring L-amino acids
  SITE (58): Xaa equals any of the naturally occurring L-amino acids
NYLLLLLVLSSDLGAKXPQALSPQHPPWWPWAGALTPPPSHPLAGTRPCYTQPPEGPXLHVLPAP

SEQ ID NO: 787 - protein, 74 aa, Homo sapiens
  SITE (54): Xaa equals any of the naturally occurring L-amino acids
GHLSLRGEAPAPACANCCTEEGEEVLGPGIPDPWPASWPCGSSALGCLPPWFTXGPIPASEGRGTQDQTYKGGS

SEQ ID NO: 788 - protein, 122 aa, Homo sapiens
  SITE (60): Xaa equals any of the naturally occurring L-amino acids
  SITE (84): Xaa equals any of the naturally occurring L-amino acids
  SITE (99): Xaa equals any of the naturally occurring L-amino acids
  SITE (109): Xaa equals any of the naturally occurring L-amino acids
NNVEAALNILKPLNCTLQMGDFVVCEFYFNEAVNRNSTESVLLCFLEHLESPLSLAIPPXPTPHPCTSPSPPPCLTPAPHPPHXSRDSGSFLKHRMGVXKMIGGQQPIXNPDGTWERCSGRG

SEQ ID NO: 789 - protein, 135 aa, Homo sapiens
  SITE (64): Xaa equals any of the naturally occurring L-amino acids
  SITE (114): Xaa equals any of the naturally occurring L-amino acids
KKLTLRNVVLTYESKFLLGIIPLCSYSLLGRIREQDVIVPPVLKSKSPLPLCWAPGERLQVLGXKTLANEKSFPKLQPASPGQQHEECISEGCSQAEKGTSYQKHDVLKHPQSXLAWGVVLGTGCAGCFSREESE

SEQ ID NO: 790 - protein, 37 aa, Homo sapiens
  SITE (6): Xaa equals any of the naturally occurring L-amino acids
NSQGIXILFREPIVLKLAHLVKETKFFLSKVLYGILE

SEQ ID NO: 791 - protein, 67 aa, Homo sapiens
  SITE (60): Xaa equals any of the naturally occurring L-amino acids
VVSEGLWVRQAEKPVKGVWNRTGGGKRGGASRVMKERAAGEARASLQGGDEGRVGLANGXRGTSPLL

SEQ ID NO: 792 - protein, 46 aa, Homo sapiens
EEWRELDLAQRVLYRDVMLENYRNLVSLGELGSFHPRLTFQDTFAF

SEQ ID NO: 793 - protein, 39 aa, Homo sapiens
  SITE (17): Xaa equals any of the naturally occurring L-amino acids
  SITE (19): Xaa equals any of the naturally occurring L-amino acids
  SITE (36): Xaa equals any of the naturally occurring L-amino acids
VSIGHFSCYCSLVTTQXRXKLGFKSLLSTHYVSGTXLGF

SEQ ID NO: 794 - protein, 48 aa, Homo sapiens
  SITE (48): Xaa equals any of the naturally occurring L-amino acids
ILCPAILPRLLNTIGTSVKNHRTREILNRSSFICLVEKGPLPLQRIGX

SEQ ID NO: 795 - protein, 35 aa, Homo sapiens
LLNILYFICKIYLPSLCHRVVTGKQIREQTVVTKV

SEQ ID NO: 796 - protein, 85 aa, Homo sapiens
GGQLVSWQLKSALPFRSLIPSFPHAGGAARLRAPGASSLWYELNRRVSPPSDLQEGVCSIRPGASKAFYPKLQHLAQGWAVLCPQ

SEQ ID NO: 797 - protein, 93 aa, Homo sapiens
  SITE (73): Xaa equals any of the naturally occurring L-amino acids
VRWERRCPHRAWCTGGAQHRFPAGTQGQDLRMCLQVGLGPAAGSWQRELGGEGLESHIINLFTAMAFPMGRGXPQSWDRWCLGACSVLAAWHP

SEQ ID NO: 798 - protein, 93 aa, Homo sapiens
  SITE (56): Xaa equals any of the naturally occurring L-amino acids
  SITE (60): Xaa equals any of the naturally occurring L-amino acids
  SITE (79): Xaa equals any of the naturally occurring L-amino acids
  SITE (83): Xaa equals any of the naturally occurring L-amino acids
TLCVHVGGLELTLGCQPGEGGHASFFLISVGLSTTMSVGRGPCPWLLAPGLWEVLXSTAXSISSEPHIPLRGAVCGAAXDNLXGFQIPPEGQG

SEQ ID NO: 799 - protein, 80 aa, Homo sapiens
  SITE (38): Xaa equals any of the naturally occurring L-amino acids
  SITE (75): Xaa equals any of the naturally occurring L-amino acids
  SITE (80): Xaa equals any of the naturally occurring L-amino acids
LVLMEIVINPRSCSSLLYCIPLFQGHCFPYGMAGVALXSPSSPRQGGQGEGERGCPDYWQTHSLTEGSAMCPSLXFFFEX

SEQ ID NO: 800 - protein, 78 aa, Homo sapiens
GTSRRRQKGLDVRKGTSVEAHISGGTHQQRNTRAAGLWEEHTHGQNDVEFVWGGWRRVGSLSNRLQGKTLPFWHPPAA

SEQ ID NO: 801 - protein, 94 aa, Homo sapiens
  SITE (68): Xaa equals any of the naturally occurring L-amino acids
  SITE (79): Xaa equals any of the naturally occurring L-amino acids
LLGRKHRQCGCSGQRIDSYSGQKGWRFHRNTQIACILKLMELLAGCGGSCLQFPALWVARGRSLTLSXRSLETQPDPPXPNLISTKMYQKFRQA

SEQ ID NO: 802 - protein, 85 aa, Homo sapiens
  SITE (19): Xaa equals any of the naturally occurring L-amino acids
  SITE (31): Xaa equals any of the naturally occurring L-amino acids
  SITE (38): Xaa equals any of the naturally occurring L-amino acids
  SITE (44): Xaa equals any of the naturally occurring L-amino acids
  SITE (50): Xaa equals any of the naturally occurring L-amino acids
  SITE (52): Xaa equals any of the naturally occurring L-amino acids
  SITE (61): Xaa equals any of the naturally occurring L-amino acids
  SITE (79): Xaa equals any of the naturally occurring L-amino acids
REIILFSSSLSPRLKETLXQAQAELKGLPSXTSLPCRXRSRSKXTPFISXEXCVMQMEEIXPTSGWGRPGVWAGGPPPXMLSANS

SEQ ID NO: 803 - protein, 37 aa, Homo sapiens
PKSEFNNQGAFGLLWVHSGFKDSLVWLQLTSLPVFMN

SEQ ID NO: 804 - protein, 50 aa, Homo sapiens
  SITE (39): Xaa equals any of the naturally occurring L-amino acids
VAIISVSVIIRTFIIVTTQKMILGIREGEKHTQSHTVKXGVNLGHELRSF

SEQ ID NO: 805 - protein, 64 aa, Homo sapiens
  SITE (23): Xaa equals any of the naturally occurring L-amino acids
  SITE (32): Xaa equals any of the naturally occurring L-amino acids
  SITE (44): Xaa equals any of the naturally occurring L-amino acids
  SITE (53): Xaa equals any of the naturally occurring L-amino acids
CVHFTLGSKYFPKTAIQRCIFFXWIVPRRFLXQPSGMFAKSKYXLNKLARSYXLGYSKFTGFLE

SEQ ID NO: 806 - protein, 46 aa, Homo sapiens
QLDHVKSEKVSFRESKPRMCAKEMSVVTGEPSASQDNGRKALRHFK

SEQ ID NO: 807 - protein, 72 aa, Homo sapiens
  SITE (15): Xaa equals any of the naturally occurring L-amino acids
  SITE (42): Xaa equals any of the naturally occurring L-amino acids
TPSHLEQCLSSLPGXSRPPPRGSQAAQGGPAKQLLPLERVYXEIAILKKLDHVNVVKLIEVGGGGEQVGTST

SEQ ID NO: 808 - protein, 75 aa, Homo sapiens
  SITE (27): Xaa equals any of the naturally occurring L-amino acids
  SITE (51): Xaa equals any of the naturally occurring L-amino acids
  SITE (71): Xaa equals any of the naturally occurring L-amino acids
HIFFPNVSFCSWSLLADPASPSAYGEXFGERTTLPILAVRVHKDLASREPXLLDIRAEGSWLLNFGCCPCXFPPS

SEQ ID NO: 809 - protein, 53 aa, Homo sapiens
  SITE (2): Xaa equals any of the naturally occurring L-amino acids
AXGTQCRTCLGNPMQSIWLQSRAGVWRSWEALTEYWSFTVPHQHPAYLLSSIS

SEQ ID NO: 810 - protein, 38 aa, Homo sapiens
SQHFGSPRWADDLRSGVQDQPDQHGETLSVLKIQNYLG

SEQ ID NO: 811 - protein, 63 aa, Homo sapiens
  SITE (42): Xaa equals any of the naturally occurring L-amino acids
  SITE (50): Xaa equals any of the naturally occurring L-amino acids
  SITE (61): Xaa equals any of the naturally occurring L-amino acids
VWPHFTFPGLYGKMNCLLPWGLCSFMACSYHIPSWNALFPSXILSISCHXNLPQKLFSGSXST

SEQ ID NO: 812 - protein, 70 aa, Homo sapiens
  SITE (9): Xaa equals any of the naturally occurring L-amino acids
  SITE (35): Xaa equals any of the naturally occurring L-amino acids
  SITE (37): Xaa equals any of the naturally occurring L-amino acids
  SITE (68): Xaa equals any of the naturally occurring L-amino acids
AVYCTSPGXTVHRGLLTTMWKVMGATGQFMAKPSXSXATWILLGFPLCQFHSGSFPFERFFTQTFPLXLA

SEQ ID NO: 813 - protein, 52 aa, Homo sapiens
  SITE (12): Xaa equals any of the naturally occurring L-amino acids
  SITE (30): Xaa equals any of the naturally occurring L-amino acids
  SITE (37): Xaa equals any of the naturally occurring L-amino acids
LLTYAGPPKHIXPKCGIQAGFVVVCLFVWXTSSYCRXGLSAMARSRLNATSA

SEQ ID NO: 814 - protein, 122 aa, Homo sapiens
  SITE (99): Xaa equals any of the naturally occurring L-amino acids
  SITE (117): Xaa equals any of the naturally occurring L-amino acids
GINPKKQCISWEGTSTEKKHSRKQVERYFTKKSVGLMNIDGVAISSKTEPPSSEPISFIPVKDLEDAAPVTTWLESSGDLWIQSTTHWLTRTGSSQSRXSKQPDGTARQRECGFSRXKVGGV

SEQ ID NO: 815 - protein, 171 aa, Homo sapiens
  SITE (12): Xaa equals any of the naturally occurring L-amino acids
  SITE (141): Xaa equals any of the naturally occurring L-amino acids
AGYITDDIGNIXLGKEQTFLSHGALLAKSCQAAMELAKHDAEVQNMAFQYGKHMAMSHKINSDVQPFIKEKTSDSMTFNLNSAPVVLHQEFLGRDLWIKQIGEAQEKGRLDYAKLRERIKAGKGVTSAIDLCRYHGKQGTXRPWESFPPSEARSALRKHCVCCDQIFMTSN

SEQ ID NO: 816 - protein, 26 aa, Homo sapiens
GHEIYQGPMLSAYSGYHAKCIYQVLC

SEQ ID NO: 817 - protein, 62 aa, Homo sapiens
  SITE (39): Xaa equals any of the naturally occurring L-amino acids
AEDHRQAQCPILTLLLSGIFHLTFLASLCQDGGAKDFVXDGRGGSPVVPGLWEAEVGGSSEG

SEQ ID NO: 818 - protein, 75 aa, Homo sapiens
  SITE (22): Xaa equals any of the naturally occurring L-amino acids
  SITE (33): Xaa equals any of the naturally occurring L-amino acids
  SITE (37): Xaa equals any of the naturally occurring L-amino acids
  SITE (69): Xaa equals any of the naturally occurring L-amino acids
VSSGQLRRIAVSRSRCLQGHCXMQMRLPPSPLXWLVXEKLISPVTLGTLFLVSLSPSSPTLAGVSAKCXWSLLQK

SEQ ID NO: 819 - protein, 41 aa, Homo sapiens
  SITE (40): Xaa equals any of the naturally occurring L-amino acids
  SITE (41): Xaa equals any of the naturally occurring L-amino acids
VLCTMLCTKEAFYILCISCSLQPCKVGGIFPTHFTYKGLXX

SEQ ID NO: 820 - protein, 83 aa, Homo sapiens
  SITE (49): Xaa equals any of the naturally occurring L-amino acids
  SITE (82): Xaa equals any of the naturally occurring L-amino acids
HCHGWGLFSSSACPAWALLTTQPVVLKFSWPFQRPWGLKSHSEHKSLFXCWESEHGKIQPDFFQFPCRWWLLRLSRSSWWKXL

SEQ ID NO: 821 - protein, 27 aa, Homo sapiens
  SITE (14): Xaa equals any of the naturally occurring L-amino acids
SEIVTIYVLILMYXRFVKYLKINFLAL

SEQ ID NO: 822 - protein, 67 aa, Homo sapiens
  SITE (46): Xaa equals any of the naturally occurring L-amino acids
  SITE (56): Xaa equals any of the naturally occurring L-amino acids
GTHQKALHTIDESERAVHRRQMVLSLGSYWGAGLVYSSLSLNWSHXKNKNNSIPLXPCDSIQFTPFG

SEQ ID NO: 823 - protein, 55 aa, Homo sapiens
  SITE (50): Xaa equals any of the naturally occurring L-amino acids
KAAFSRQGWTHPCKACLLRSWDETLDDVLGTKKTHMVKGSLFLGESAMLXRTGKG

SEQ ID NO: 824 - protein, 73 aa, Homo sapiens
RRREENLTGGYDGVINEVGGKLLVWCPEYEMKRGLLKRSSLMYPNCKIWRHNPSKLSSLRKRTVKCGGFPKSL

SEQ ID NO: 825 - protein, 99 aa, Homo sapiens
  SITE (57): Xaa equals any of the naturally occurring L-amino acids
  SITE (85): Xaa equals any of the naturally occurring L-amino acids
  SITE (86): Xaa equals any of the naturally occurring L-amino acids
  SITE (92): Xaa equals any of the naturally occurring L-amino acids
  SITE (99): Xaa equals any of the naturally occurring L-amino acids
GLWRRQPPGGQGFPASAAPAHHGPLPGDMPTMARPCPQTWVSTHVRPATGLARQSAXALGCCGCLREDFRSASDMVAVVGNSLLXXVGPPWXNQKPKVX

SEQ ID NO: 826 - protein, 49 aa, Homo sapiens
  SITE (16): Xaa equals any of the naturally occurring L-amino acids
FNRWTNIWVGLCQLLXGEEPGLLPPPWEFESNPGSNQALSWNLTLYFNI

SEQ ID NO: 827 - protein, 81 aa, Homo sapiens
  SITE (79): Xaa equals any of the naturally occurring L-amino acids
LFLLNEPCLLEKPVYFAVLGWNVLYMSVKPTNFVFAFCSHITCVYFFFYNFHFRFGGTCTVLFMYKLCVTRVWCTNDFXTR

SEQ ID NO: 828 - protein, 104 aa, Homo sapiens
AAALGPPEVIAQLENAAKVLMAPPSMVNNEQRQHAEHIFLSFRKSKSPFAVCKHILETSKVDYVLFQAATAIMEAVVREWILLEKGSIESLRTFLLTYVLQRPK

SEQ ID NO: 829 - protein, 68 aa, Homo sapiens
TIALHYSLLPVPGNHHSTFGFYEYDMLDTSYKWNHAVLVFCIQLLSLSLMSRFIHVVACIRMSLFKAK

SEQ ID NO: 830 - protein, 61 aa, Homo sapiens
  SITE (34): Xaa equals any of the naturally occurring L-amino acids
  SITE (36): Xaa equals any of the naturally occurring L-amino acids
NGILKQFTANHREVFTVLNAFILNISKITLKIIXFXICFFLCPVNSRTLKSLETKAFIKGL

SEQ ID NO: 831 - protein, 39 aa, Homo sapiens
NDRTGIRCLSSNQLCQTLLTSFTGIIRVFDQESILSPKC

SEQ ID NO: 832 - protein, 73 aa, Homo sapiens
PQVISAFQSAEITGVSTAPGPNKCILKGKAEGMKAHQLWGAAHVDRREARVVLPFHMCVGRVIKTGGGWGNYD

SEQ ID NO: 833 - protein, 63 aa, Homo sapiens
  SITE (50): Xaa equals any of the naturally occurring L-amino acids
  SITE (55): Xaa equals any of the naturally occurring L-amino acids
  SITE (58): Xaa equals any of the naturally occurring L-amino acids
LHTYPSLGRTPSKMKAAPLVVLECVHPPHGSCWLAAAGPPAGAGSTLKMXNQIPXGLXPAGPW

SEQ ID NO: 834 - protein, 87 aa, Homo sapiens
LLEHWQSWVAGIVPIVSSCPSVLENTVHNDVQVLSARPDSGPSLLFAKCSPCPVNQSHVWAFECAGGTNQGARTLQGASSPEQNPGP

SEQ ID NO: 835 - protein, 76 aa, Homo sapiens
  SITE (16): Xaa equals any of the naturally occurring L-amino acids
TCSKFSRPLIFPTTFXLAVFGSSAVFWPVACSSENLLCFYLLSSRSTFPVSFAWLIFTGLLCFAFLDVYFSFQFKS

SEQ ID NO: 836 - protein, 78 aa, Homo sapiens
PLLSLLGVGVPWLLSPACKSIVRVRCWRTSTTIWVQIPALPLISHVAVSTSLSFSLFHCCVKIMPLRAVVSISTVPGI

SEQ ID NO: 837 - protein, 46 aa, Homo sapiens
  SITE (37): Xaa equals any of the naturally occurring L-amino acids
  SITE (44): Xaa equals any of the naturally occurring L-amino acids
NTIQFQKGRKFWYIPVTKRQILYNCTDMRHLEESYSXKQKVEWXLA

SEQ ID NO: 838 - protein, 82 aa, Homo sapiens
  SITE (15): Xaa equals any of the naturally occurring L-amino acids
  SITE (54): Xaa equals any of the naturally occurring L-amino acids
  SITE (55): Xaa equals any of the naturally occurring L-amino acids
  SITE (61): Xaa equals any of the naturally occurring L-amino acids
GEVLLHLKSLPFTFXDMRNPFPVGHAFCQHSGSLFRVCAEPPGSPNLGPGWYPXXGPCSAXAQPTPVPTVWRCWGVPQTGDM

SEQ ID NO: 839 - protein, 62 aa, Homo sapiens
  SITE (10): Xaa equals any of the naturally occurring L-amino acids
DNACGVRERXCGGFEDGGRWPLKAGRGRETDSLPQAQKAVPLCRHPAFSPMRPNLDFSRVER

SEQ ID NO: 840 - protein, 100 aa, Homo sapiens
  SITE (92): Xaa equals any of the naturally occurring L-amino acids
  SITE (93): Xaa equals any of the naturally occurring L-amino acids
  SITE (95): Xaa equals any of the naturally occurring L-amino acids
PGPGSEGPTGQLLRGLCSSWAKAACSAALLLPRCHHHRQTLLGRSCRVPRRLRSHRLQLRAPGEQAAGKSPMPTARMAQGWAWAPEAGLLPXXPXALTQV

SEQ ID NO: 841 - protein, 57 aa, Homo sapiens
  SITE (9): Xaa equals any of the naturally occurring L-amino acids
  SITE (36): Xaa equals any of the naturally occurring L-amino acids
  SITE (43): Xaa equals any of the naturally occurring L-amino acids
  SITE (46): Xaa equals any of the naturally occurring L-amino acids
  SITE (52): Xaa equals any of the naturally occurring L-amino acids
ELEPTKVTXLPLSDFFLFSLSANVPSRPQAMVKYSXRATNVSXPYXCCPFQXMPNFK

SEQ ID NO: 842 - protein, 90 aa, Homo sapiens
  SITE (82): Xaa equals any of the naturally occurring L-amino acids
DHRWEPPHLGSFCCSKPPSRWWFLTAAMGNGSVPRPQPPRSVQTRPAEPACWRPRLPEGMILNAACCSRTHTKHGGGLRRVXGPCMKGDT

SEQ ID NO: 843 - protein, 76 aa, Homo sapiens
LSRESLEALKKKVLEREGDKGTPVLRGFSSVSGSWSRRMPPFLLLTCLFITGTSVSPVALDPCSAYISLNEPWEEH

SEQ ID NO: 844 - protein, 97 aa, Homo sapiens
  SITE (86): Xaa equals any of the naturally occurring L-amino acids
  SITE (88): Xaa equals any of the naturally occurring L-amino acids
  SITE (93): Xaa equals any of the naturally occurring L-amino acids
  SITE (95): Xaa equals any of the naturally occurring L-amino acids
  SITE (96): Xaa equals any of the naturally occurring L-amino acids
FSSARVCWLFCLIEERSGAWREQGADAGRRLWLCDILATVLNLCVCERRMIIPISRVFAQMPIAMPGWWECTPWWPLLFSLLILMXFXMTYLXSXXL

SEQ ID NO: 845 - protein, 59 aa, Homo sapiens
SQTELFMEGVLDSSVSSWIAGMGYLYLDLVRREIRQISWITWFGVRNASLYFTSRNGFK

SEQ ID NO: 846 - protein, 65 aa, Homo sapiens
  SITE (28): Xaa equals any of the naturally occurring L-amino acids
SDLVCCPTLSPRRKTWGWGRLKDRDPCXFSTPELSSASHFSQSLFYHLCNGIIAALPAFLVITSK

SEQ ID NO: 847 - protein, 55 aa, Homo sapiens
  SITE (54): Xaa equals any of the naturally occurring L-amino acids
PGPGGRGAAWLWEPFVSACEKMGRKLSAGRACVWGGACGVCVRSGGVWLGAIFXS

SEQ ID NO: 848 - protein, 111 aa, Homo sapiens
LEGSRCRVEAKVSASAWGVLMAKPCTVSTLRRVCGHVSEAQASVEGRWDYDQGFLFLFLFLFETESRTIAQAGVQWCDLGSRQPLPPGVQVILLPQPPEWLGLRAPATTPG

SEQ ID NO: 849 - protein, 71 aa, Homo sapiens
  SITE (70): Xaa equals any of the naturally occurring L-amino acids
LVIYISFPWGRIIEFQELFGGMEVIGILGKVTKLSQNLSEKRPETQWRHDSFRERSGNGQAHDSGWSGLXL

SEQ ID NO: 850 - protein, 68 aa, Homo sapiens
  SITE (21): Xaa equals any of the naturally occurring L-amino acids
REQKLELHRGGGRSRTSGSPXLQEFGTRERPWVLESESPSLIFCFSVTILGNLLPTPGPWFSDTKWKY

SEQ ID NO: 851 - protein, 80 aa, Homo sapiens
  SITE (24): Xaa equals any of the naturally occurring L-amino acids
  SITE (29): Xaa equals any of the naturally occurring L-amino acids
  SITE (46): Xaa equals any of the naturally occurring L-amino acids
NACKGSEKCVGKEGGGPCREAVDXQSPRXVGMSQASPDLALRRSLXLVLASLLAGAITVTCLSSGKAIGTDLGLASLASN

SEQ ID NO: 852 - protein, 67 aa, Homo sapiens
  SITE (28): Xaa equals any of the naturally occurring L-amino acids
QLKGTKAGAPHAVAAALELVDPPGCRNXARAGVGDTVRLARAGGGVHPWGSSDCLSLPGMEAAARIS

SEQ ID NO: 853 - protein, 59 aa, Homo sapiens
DNLSKQEDCTLTALLPACTLPSAFSIATARTLAKNHWWPNYELFPDFLQGTRFSCTTQY

SEQ ID NO: 854 - protein, 46 aa, Homo sapiens
  SITE (29): Xaa equals any of the naturally occurring L-amino acids
WGRWIQNKHSHTSSDNTRQSKRIMRPGAXAHACNPSTLRGRGGWIT

SEQ ID NO: 855 - protein, 85 aa, Homo sapiens
  SITE (13): Xaa equals any of the naturally occurring L-amino acids
  SITE (15): Xaa equals any of the naturally occurring L-amino acids
GASPPAPEMERPXGXCDWPPAGGAGNFSRFHFQSLCPQLLSQWAQRRCLRMESPMQQSSAGAACRSWSLLLPTDTAPAQPQPLLF

SEQ ID NO: 856 - protein, 124 aa, Homo sapiens
TGTPHPQDSTSPTGLHSPTGLHLPTGLHSPAGLHSPTGLPTHRTPLTHRTPLTHRTPHPQDSTHPQDSPPTGLHSRRPRGWLPQRQELGPCDEVTLRGRVSCGGTGPAWEDRLQPHLCGRPSER

SEQ ID NO: 857 - protein, 36 aa, Homo sapiens
YFIIECCLSKTCNILNSVKLGAPGIFRIRDDERVRK

SEQ ID NO: 858 - protein, 51 aa, Homo sapiens
VISCLDFRTFLRGSDCCYPAEKFAARGIATSMKEIYLLFSCLCSEISLWYF

SEQ ID NO: 859 - protein, 27 aa, Homo sapiens
NLSSDKYRYIAYFLKNLKNTHKYKKLP

SEQ ID NO: 860 - protein, 69 aa, Homo sapiens
  SITE (67): Xaa equals any of the naturally occurring L-amino acids
EMSSFCSFLSLLLGSVPTGTVIHTGTTSLKSFVDFQIINHSLHQREATPTNFFKKSSMYFECQSGNXTL

SEQ ID NO: 861 - protein, 48 aa, Homo sapiens
  SITE (15): Xaa equals any of the naturally occurring L-amino acids
ISCMYASFVIMGFPXGGWVILRWAILRELHLAQLKNFKSNILKQMYNF

SEQ ID NO: 862 - protein, 88 aa, Homo sapiens
  SITE (35): Xaa equals any of the naturally occurring L-amino acids
  SITE (65): Xaa equals any of the naturally occurring L-amino acids
TWEPELAVSRDHTSALQPERHSETPSQKKKKLIRXHNYYIYQPGSFYIIIGYLLINYLQRPLQIXIITKRSFPISFPGMHNYFGKISG

SEQ ID NO: 863 - protein, 119 aa, Homo sapiens
  SITE (14): Xaa equals any of the naturally occurring L-amino acids
  SITE (106): Xaa equals any of the naturally occurring L-amino acids
GKIMFSPSKNHALXSSNQTKSQDYSENYSMTIWAFVHGFPFLGCLLSCYLPEACEKGKAYYFHLTEEDAGARWQEMTGPRPYSQEMWKRVLLWGSELLALLNPASXISDAGSFPKTMAW

SEQ ID NO: 864 - protein, 64 aa, Homo sapiens
  SITE (46): Xaa equals any of the naturally occurring L-amino acids
AMMFGTTCLCNQLGSCSSSRESYSHLPLQERGLEWRKEAAPCHRAXVGHRHLVLGTWHCHSQAA

SEQ ID NO: 865 - protein, 63 aa, Homo sapiens
  SITE (11): Xaa equals any of the naturally occurring L-amino acids
  SITE (55): Xaa equals any of the naturally occurring L-amino acids
LAAASTAALAXSHCSYVIETSSFLRPHEPTSAKLSTILLQFPHLTQHYRLEEKYXLWSGFGFG

SEQ ID NO: 866 - protein, 80 aa, Homo sapiens
  SITE (74): Xaa equals any of the naturally occurring L-amino acids
  SITE (75): Xaa equals any of the naturally occurring L-amino acids
APLAAGSVPGGSVERLLGPGRRLRPRHGALAAAPVAAGAAPGRSGRPRPAPSRQLSGLGAAVPGAAGAYQFRWXXSTAAA

SEQ ID NO: 867 - protein, 26 aa, Homo sapiens
  SITE (1): Xaa equals any of the naturally occurring L-amino acids
  SITE (18): Xaa equals any of the naturally occurring L-amino acids
XKGVKSFGLSRWKDWNCXVLRQGNGS

SEQ ID NO: 868 - protein, 74 aa, Homo sapiens
  SITE (65): Xaa equals any of the naturally occurring L-amino acids
SGNTTLFLYHLLSLLGYLRAFCKLQSALCIHGFHIRGLHQLQIETIWGKKNCVVLNMYRLFFFLXSVFPKQYIT

SEQ ID NO: 869 - protein, 49 aa, Homo sapiens
  SITE (12): Xaa equals any of the naturally occurring L-amino acids
IFYCCDKNRYVXKHVSAFTNRIRFQIQEYVSFFHHYKLSSILSFPSVFF

SEQ ID NO: 870 - protein, 51 aa, Homo sapiens
GASGRGSSVTLQRLPHRLLFAKWYQDFLVVVSKRVGFLTSHRPWLEVKSMF

SEQ ID NO: 871 - protein, 64 aa, Homo sapiens
  SITE (52): Xaa equals any of the naturally occurring L-amino acids
  SITE (63): Xaa equals any of the naturally occurring L-amino acids
LMPRPLVSTSQISGICLLFTIATGPAPPQVPAFISSDLWQDLSLVCLPPCSXPVSLHTAAARXM

SEQ ID NO: 872 - protein, 192 aa, Homo sapiens
PTALMTAPSCAFPVQFRQPSVSGLSQITKSLYISNGVAANNKLMLSSNQITMVINVSVEVVNTLYEDIQYMQVPVADSPNSRLCDFFDPIADHIHSVEMKQGRTLLHCAAGVSRSAALCLAYLMKYHAMSLLDAHTWTKSCRPIIRPNSGFWEQLIHYEFQLFGKNTVHMVSSPVGMIPDIYEKEVRLMIPL

SEQ ID NO: 873 - protein, 96 aa, Homo sapiens
AEVLLPALVPAGPSPVSWCLTETLAPTLGEPSGGCVTPKSAPPSTSPSSTGSLQIEIGPLRVSHAPSPTSFTGLCLSHIREHGLTLSSFQASEPLG

SEQ ID NO: 874 - protein, 91 aa, Homo sapiens
AGQHGETPSLQKYKRLAECGVSCLCVCVYVHVYICVHTHTHTLFCLAQPSDNLGPTLVPLIHSSQESWLCFGGCGVPGSSMIQVGRQLVVM

SEQ ID NO: 875 - protein, 50 aa, Homo sapiens
  SITE (2): Xaa equals any of the naturally occurring L-amino acids
VXTKKKKEKISWAWGHTPVVPATWEPEAGGSLEPRNSRLQRAMTAPCTPA

SEQ ID NO: 876 - protein, 63 aa, Homo sapiens
FGTRWAGPYFLVSELFAGFKEYDYSALRGCGEHFVKAMCILNPFHRRPYSVAATPLIVDYNNF

SEQ ID NO: 877 - protein, 56 aa, Homo sapiens
  SITE (1): Xaa equals any of the naturally occurring L-amino acids
  SITE (3): Xaa equals any of the naturally occurring L-amino acids
  SITE (20): Xaa equals any of the naturally occurring L-amino acids
  SITE (26): Xaa equals any of the naturally occurring L-amino acids
XDXGCCPKKKKSLMKLPKQXDSHPPXARGGGRRGKGRCSLSQRSHGLLLPHPTESL

SEQ ID NO: 878 - protein, 78 aa, Homo sapiens
  SITE (54): Xaa equals any of the naturally occurring L-amino acids
  SITE (78): Xaa equals any of the naturally occurring L-amino acids
PRHLLLQALVPFHNLGLLIGLFSPRCADLWPATRQRPWDCVYSLLYLQLGYEGXFRGLTRMTWRRASFSLKDGLVVTX

SEQ ID NO: 879 - protein, 50 aa, Homo sapiens
QGLSSPRECSFKFRSCPPPTSVLSGPILNAVAYIKLFNLHSNLFNKDCYF

SEQ ID NO: 880 - protein, 40 aa, Homo sapiens
PLALITPVLLKMAHRPGAVAHACNPSTLGGRGGWIMRSGD

SEQ ID NO: 881 - protein, 79 aa, Homo sapiens
  SITE (73): Xaa equals any of the naturally occurring L-amino acids
PPSVVFACSNNDFSFCLVWLCISPSLLHLLIGILWSLLPYLFIELFIEAYFKSMVMRHVMFRSTADHIYNGGXIRLYQF

SEQ ID NO: 882 - protein, 82 aa, Homo sapiens
  SITE (77): Xaa equals any of the naturally occurring L-amino acids
  SITE (79): Xaa equals any of the naturally occurring L-amino acids
LTNKLFTVQAAKGPLSLFPQLTPPSVHSLILILLPFVVFGTSDSFFFKTKSRSVAQAGVHGAIFSSTFAPQVQAIFXFXAPE

SEQ ID NO: 883 - protein, 35 aa, Homo sapiens
  SITE (10): Xaa equals any of the naturally occurring L-amino acids
  SITE (21): Xaa equals any of the naturally occurring L-amino acids
NAYFLITYFXILVRECVCLQXTKLNPGGVHGGLFF

SEQ ID NO: 884 - protein, 54 aa, Homo sapiens
  SITE (11): Xaa equals any of the naturally occurring L-amino acids
  SITE (32): Xaa equals any of the naturally occurring L-amino acids
TARRPSGPGSXDQELKPAPSLSLSPASFCRRXLKRTLLFCLLLWGESGRRYVRW

SEQ ID NO: 885 - protein, 40 aa, Homo sapiens
  SITE (18): Xaa equals any of the naturally occurring L-amino acids
  SITE (21): Xaa equals any of the naturally occurring L-amino acids
VYQLQKMYDNAFLRDRVXYVXQAGLKLLSSFLPFIRELLL

SEQ ID NO: 886 - protein, 58 aa, Homo sapiens
NSARDMIKIRWIRLRKRRHCVSFPPEYGIVSFSLGRCSFHLYYIVQRGAATILQILPP

SEQ ID NO: 887 - protein, 66 aa, Homo sapiens
  SITE (41): Xaa equals any of the naturally occurring L-amino acids
QSEVRAYVLYMQGAVFRKQFSVCHFQPFRRDVIFDIMFVCXTDSKCHVSSWWNCTVVTHPCSSLFS

SEQ ID NO: 888 - protein, 42 aa, Homo sapiens
  SITE (42): Xaa equals any of the naturally occurring L-amino acids
VGRSEDSCKVIISFPFPTQKNRTESLKTWNLAVAWPQLPMCX

SEQ ID NO: 889 - protein, 79 aa, Homo sapiens
  SITE (59): Xaa equals any of the naturally occurring L-amino acids
  SITE (79): Xaa equals any of the naturally occurring L-amino acids
EFGTRGKEAEDLAGYHWTGHGSTVPATKAQETSLISGSHHHGPNHNCDPCASEPPQNLXLALTHLASSPWMIMFLAYRX

SEQ ID NO: 890 - protein, 74 aa, Homo sapiens
  SITE (14): Xaa equals any of the naturally occurring L-amino acids
RARPNLIKPAAQWXDLKRLGEERPKKSRAAFESDKSSYFSVCTTHCLILGHRVLLRMTTVEFLDLGPPGNLWNS

SEQ ID NO: 891 - protein, 53 aa, Homo sapiens
  SITE (24): Xaa equals any of the naturally occurring L-amino acids
  SITE (31): Xaa equals any of the naturally occurring L-amino acids
  SITE (41): Xaa equals any of the naturally occurring L-amino acids
RSPRSSPTVQGDCAPWKWGPQCVXNPPAHSXLPGGSGCSLXPPAPQPFWADGV

SEQ ID NO: 892 - protein, 55 aa, Homo sapiens
QHSVGRLPCMPSFIVRSSRFDHKHLSLRWTSQLLSSQGGAHCYFRRGLLRCSYHR

SEQ ID NO: 893 - protein, 70 aa, Homo sapiens
  SITE (9): Xaa equals any of the naturally occurring L-amino acids
  SITE (12): Xaa equals any of the naturally occurring L-amino acids
  SITE (13): Xaa equals any of the naturally occurring L-amino acids
  SITE (25): Xaa equals any of the naturally occurring L-amino acids
  SITE (30): Xaa equals any of the naturally occurring L-amino acids
  SITE (54): Xaa equals any of the naturally occurring L-amino acids
LLLLSWLFXLVXXLLCTSHHSTKPXSDHGXIHKERKAEKLDNLLNVKCPVRYRXPNLKLRCLWGPKPVDL

SEQ ID NO: 894 - protein, 44 aa, Homo sapiens
QREFFATWQKTLVYLLFSSTTKPEVLSFSFTSSIPILAVFQGLT

SEQ ID NO: 895 - protein, 76 aa, Homo sapiens
  SITE (41): Xaa equals any of the naturally occurring L-amino acids
  SITE (49): Xaa equals any of the naturally occurring L-amino acids
AREQLGPSSLRRRIPGAAQRGRARPGPPAQPGPLPLRPWKXPAALRLRXQGWEPPNLSLLFDFTLGYHQGQRMEPR

SEQ ID NO: 896 - protein, 106 aa, Homo sapiens
  SITE (99): Xaa equals any of the naturally occurring L-amino acids
GWIYSYKKVTQIYFLLLKISYVEGGARGFLVYRLLLNVSLDINLLWFSLSILEKAMVTLSKWGSNSGLYHTTCSICTGVALASQTLVTWAGHPSLPFLXVIFTGTE

SEQ ID NO: 897 - protein, 157 aa, Homo sapiens
  SITE (148): Xaa equals any of the naturally occurring L-amino acids
LDSRGSLISTDSGNSLPERNSEKSNSLDKHQQSSTLGNSVVRCDKLDQSEIKSLLMCFLYILKSMSDDALFTYWNKASTSELMDFFTISEVCLHQFQYMGKRYIASVRKISSVLGISVDNGYGHFGTADVLAPSSFTFGKANICLPLXGGFFFCLTA

SEQ ID NO: 898 - protein, 57 aa, Homo sapiens
PDQTIPQRPAPAPSAPSRSQPTLPVTHCPHSEQDELLLFFACPWGSLQMVPVIDTQH

SEQ ID NO: 899 - protein, 121 aa, Homo sapiens
  SITE (82): Xaa equals any of the naturally occurring L-amino acids
  SITE (101): Xaa equals any of the naturally occurring L-amino acids
  SITE (111): Xaa equals any of the naturally occurring L-amino acids
HEDKCPRRVNREVVEYMVQHFKPQIFGDRKPVYDGKKNIYTVTALPIGNERVDFEVTIPGEGKDRIFKVSIKWLAIVSWRMXHEALVSGQIPVPLESVQAXDVAMRHLASXRYNLWGRSFF

SEQ ID NO: 900 - protein, 61 aa, Homo sapiens
KKYVKILFHLMNPHSIGSFTINSFYYEITLSQFSASTISLIIRPWCSSVELLIEFYVPCIL

SEQ ID NO: 901 - protein, 54 aa, Homo sapiens
EVALPVFLTSACQSYHSWNYVILAPSYLCSIILVCLFVFFDVIEVAHHAILGNA

SEQ ID NO: 902 - protein, 105 aa, Homo sapiens
  SITE (84): Xaa equals any of the naturally occurring L-amino acids
  SITE (101): Xaa equals any of the naturally occurring L-amino acids
  SITE (105): Xaa equals any of the naturally occurring L-amino acids
EHPGQELEIELFDEDPDKDDFLGSLMIDLIEVEKERLLDEWFTLDEVPKGKLHLRLEWLTLMPNASNLDKVLTDIKADKDQANXGLSSALLILLLGIPARXPSGX

SEQ ID NO: 903 - protein, 88 aa, Homo sapiens
LGGGPIEVMAELLENGLGMMLDRKRDFELAQAYLALFLKLHLKMLPSEPVLLEEITNLSSQVEENWTHLQSLFNQSMCILNYLKSALL

SEQ ID NO: 904 - protein, 124 aa, Homo sapiens
  SITE (99): Xaa equals any of the naturally occurring L-amino acids
  SITE (105): Xaa equals any of the naturally occurring L-amino acids
  SITE (107): Xaa equals any of the naturally occurring L-amino acids
  SITE (109): Xaa equals any of the naturally occurring L-amino acids
  SITE (110): Xaa equals any of the naturally occurring L-amino acids
  SITE (116): Xaa equals any of the naturally occurring L-amino acids
  SITE (119): Xaa equals any of the naturally occurring L-amino acids
  SITE (121): Xaa equals any of the naturally occurring L-amino acids
  SITE (123): Xaa equals any of the naturally occurring L-amino acids
ITAGPWRARDQRPPMGRKPICHLFRDLTVEFDKLNLQNIGRSVSKTPDESTKTKDQILTSRINAVERDLLEPSPADQLGNGHRRTESEMSARIAKMSLXPSSPRXEXSXXGGPYPXGLXWXYXI

SEQ ID NO: 905 - protein, 53 aa, Homo sapiens
  SITE (15): Xaa equals any of the naturally occurring L-amino acids
  SITE (35): Xaa equals any of the naturally occurring L-amino acids
RVLNKDVNSGRRDSXGSGPAQSRSSTKASLRLGLXNERHQRGWTSRREEKELP

SEQ ID NO: 906 - protein, 62 aa, Homo sapiens
  SITE (1): Xaa equals any of the naturally occurring L-amino acids
  SITE (8): Xaa equals any of the naturally occurring L-amino acids
XLRESGAXVWCHSFFNCGGNIYNMTFTIVIIFKCAVQWHEVHSHCRATISTIYLCNFFIFPN

SEQ ID NO: 907 - protein, 92 aa, Homo sapiens
GTAGLTGVGPRLRCRFAPIRSLWPGLTRSGLFGLSGRKSLPDGKSYYVEYLGDICLRDLQELQIESRSVAQAGVQWCNLCSCNLRLPSSSSS

SEQ ID NO: 908 - protein, 90 aa, Homo sapiens
  SITE (52): Xaa equals any of the naturally occurring L-amino acids
  SITE (77): Xaa equals any of the naturally occurring L-amino acids
  SITE (79): Xaa equals any of the naturally occurring L-amino acids
AQARPSNKPPPTFHGVSLSPSQALQVTRRAQTHLWETPPLPASTHSLREQQXPLTPARSSKLPGQEAWSQGDKESVXLXPQSIQGEGTGG

SEQ ID NO: 909 - protein, 43 aa, Homo sapiens
IRQQDSLHSKNLGQFSLNPNRVTQGKQESRVLVGLPTYLPMQS

SEQ ID NO: 910 - protein, 53 aa, Homo sapiens
SRLVFQTCSNYFELKGSCRSEAGGTRSSLPPTPPLPVALRALYSCEATCMGTG

SEQ ID NO: 911 - protein, 36 aa, Homo sapiens
  SITE (7): Xaa equals any of the naturally occurring L-amino acids
REMGTVXQMIVKNLCSNNILIVPALGARTGISRLLP

SEQ ID NO: 912 - protein, 82 aa, Homo sapiens
  SITE (73): Xaa equals any of the naturally occurring L-amino acids
  SITE (76): Xaa equals any of the naturally occurring L-amino acids
  SITE (79): Xaa equals any of the naturally occurring L-amino acids
LHQRGVRSEDKSLLSKLERCEPPCQVYGALLVPPSPIPCLAVTAGTHCSGGALRQCGNQPAPSCSGAGREPLXFPXGPXGFP

SEQ ID NO: 913 - protein, 73 aa, Homo sapiens
HRPRSTPHRTPIITPNTKAIQERLFKQDTSSSTTHLAQQLKQERQKELACLRGRFDKGNIWSAEKGGNSKSNN

SEQ ID NO: 914 - protein, 39 aa, Homo sapiens
  SITE (31): Xaa equals any of the naturally occurring L-amino acids
  SITE (35): Xaa equals any of the naturally occurring L-amino acids
IVRFLCIYFRSKSFLSAICFSIFPLVYACLXNFRXGFLF

SEQ ID NO: 915 - protein, 25 aa, Homo sapiens
DKLTHRAPSRTSDPRAAEFGTVAVC

SEQ ID NO: 916 - protein, 106 aa, Homo sapiens
  SITE (87): Xaa equals any of the naturally occurring L-amino acids
  SITE (89): Xaa equals any of the naturally occurring L-amino acids
  SITE (100): Xaa equals any of the naturally occurring L-amino acids
AQQKRKQILCKGGWAKFSFRGIELEVSAGYLSRNVQWTMKYLGLKFRRDYVSEAKILTLSLAADSGSSILCWIFKRKTWKRKQHMAXDXVPAMVSIYFIXFLGFFH

SEQ ID NO: 917 - protein, 111 aa, Homo sapiens
  SITE (26): Xaa equals any of the naturally occurring L-amino acids
  SITE (77): Xaa equals any of the naturally occurring L-amino acids
  SITE (95): Xaa equals any of the naturally occurring L-amino acids
SSIPSLPRTAVKTANVTSMPPHTCAXRSCHPRSPRSCGRSTMSAPCPSARRRGPGSCEDTTKVSKLARLVQVLQKEXCSSYIRAGCSVEKGQRHXCSKWGFHPSQVVYSPG

SEQ ID NO: 918 - protein, 43 aa, Homo sapiens
LFVSRKALTWKYYAKKILYYLRQQKILNNLEAFFSSQMTMESY

SEQ ID NO: 919 - protein, 57 aa, Homo sapiens
  SITE (16): Xaa equals any of the naturally occurring L-amino acids
  SITE (47): Xaa equals any of the naturally occurring L-amino acids
  SITE (56): Xaa equals any of the naturally occurring L-amino acids
VSSKVCTSRSELSVNXGEGVSEGNRDNFTENHTSGYENSLSSAWQRXMLLGGAPIXD

SEQ ID NO: 920 - protein, 89 aa, Homo sapiens
  SITE (89): Xaa equals any of the naturally occurring L-amino acids
SNLPQDVGEPLNIHRCCLFLQNLSIILSLKLCAGQFQLNKPKHFANYPSTLPSLYPFIPVCILGSCSCCSIHLEMASFISTLANTISTX

SEQ ID NO: 921 - protein, 33 aa, Homo sapiens
  SITE (3): Xaa equals any of the naturally occurring L-amino acids
  SITE (13): Xaa equals any of the naturally occurring L-amino acids
GRXQTRRTRGKRXYAVQVPGPEFPGRPTRPRTR

SEQ ID NO: 922 - protein, 34 aa, Homo sapiens
SYPEPELLLKKKKKKKKKKKKKKKKKKKKKKKKK

SEQ ID NO: 923 - protein, 73 aa, Homo sapiens
  SITE (9): Xaa equals any of the naturally occurring L-amino acids
  SITE (14): Xaa equals any of the naturally occurring L-amino acids
  SITE (68): Xaa equals any of the naturally occurring L-amino acids
TRGTARRRXKEKMXRIHLMNFSMRKRKSCQTEMGKSGPHRRMTIILASCLSLATLGAEMIEHTIDSSXINTIF

SEQ ID NO: 924 - protein, 78 aa, Homo sapiens
  SITE (5): Xaa equals any of the naturally occurring L-amino acids
  SITE (31): Xaa equals any of the naturally occurring L-amino acids
FFFFXFFFFFVSHQILKLALVFYGCEKTTEXYGCEKTTEGLRLREDDRRVRLREDDRRVRLREDDRRVSKSIWWMPWV

SEQ ID NO: 925 - protein, 59 aa, Homo sapiens
VGQEFEDPSGLFYSNVEELKSLGISVHLEHDVVEINREEKYVVVKNLRTGEEFKDTMIN

SEQ ID NO: 926 - protein, 45 aa, Homo sapiens
ALEELAECEKLFSKYSKLSKKDFIKKMREKHPEKKKKKKKKGGAV

SEQ ID NO: 927 - protein, 96 aa, Homo sapiens
AFFIIFFSSNTNCFFLFLVRIHKYQAKIPQLILTTLNDNFDPNKPTQAKDNSRQFQFAINKTKTYNEFKKIFFDDLQYIVDHNERFKITLANPDKN

SEQ ID NO: 928 - protein, 38 aa, Homo sapiens
  SITE (13): Xaa equals any of the naturally occurring L-amino acids
  SITE (16): Xaa equals any of the naturally occurring L-amino acids
KQGNLPYKRLKKXGAXGFKLLINNEPDAEQSIFHTHVT

SEQ ID NO: 929 - protein, 138 aa, Homo sapiens
  SITE (1): Xaa equals any of the naturally occurring L-amino acids
  SITE (2): Xaa equals any of the naturally occurring L-amino acids
  SITE (21): Xaa equals any of the naturally occurring L-amino acids
XXSLYSKAGTPDRYRSGIPGXQKGTAARRRQKGTAARRRQKGTAARRRQKGTAARRRQKGTAARRRQKGTAARRRQKGTAARRRQKGTAARRRQKGTAARRRQKGTAARRRQKGTAARRRQKKKKKKKKKKKTAAALE

SEQ ID NO: 930 - protein, 37 aa, Homo sapiens
  SITE (20): Xaa equals any of the naturally occurring L-amino acids
  SITE (21): Xaa equals any of the naturally occurring L-amino acids
FFFSFASIEKKNLVVLIGSXXPRWDESFVPTLGSLED

SEQ ID NO: 931 - protein, 41 aa, Homo sapiens
  SITE (9): Xaa equals any of the naturally occurring L-amino acids
  SITE (41): Xaa equals any of the naturally occurring L-amino acids
ITLVFGNFXVSGFTDDAKALVFKVTANAMYMYFCNMQPLHX

SEQ ID NO: 932 - protein, 43 aa, Homo sapiens
KEFHKILWNLGDNWQIELGGNSQAEYGLCSFSQLKLPSSCRVE

SEQ ID NO: 933 - protein, 51 aa, Homo sapiens
IIQVKHLAPCHVADTLYMLAVILIIIRTFHFLGVTTEFWVDSLSCQRIDVT

SEQ ID NO: 934 - protein, 43 aa, Homo sapiens
  SITE (1): Xaa equals any of the naturally occurring L-amino acids
XPGLGLQPPPVRANQASTNSATPWTDPPGATESLFSRELPLLT

SEQ ID NO: 935 - protein, 86 aa, Homo sapiens [sequence omitted]

SEQ ID NO: 936 - protein, 46 aa, Homo sapiens
  SITE (33): Xaa equals any of the naturally occurring L-amino acids
  SITE (35): Xaa equals any of the naturally occurring L-amino acids
  SITE (38): Xaa equals any of the naturally occurring L-amino acids
SIYTNSVCISPKKSFIFLSSHKKNMLLLSQILXFXYLXIPGTLPRA

SEQ ID NO: 937 - protein, 56 aa, Homo sapiens
  SITE (38): Xaa equals any of the naturally occurring L-amino acids
PTASGRTKTSTSFVQPLFIVCLERWNSRRKRGWTKDLXFLRMLCQSWIMEYNKVMG

SEQ ID NO: 938 - protein, 42 aa, Homo sapiens
GTSLQVGITGVSHHTRPGADILCSWRKQTTKKSQNRLYTRRW

SEQ ID NO: 939 - protein, 112 aa, Homo sapiens
  SITE (44): Xaa equals any of the naturally occurring L-amino acids
  SITE (63): Xaa equals any of the naturally occurring L-amino acids
ARAAPMPSDFQVLRAKYRESPLVSAWSEELISKLANDIEATAVXAVRRFGQFHLALSGGSSPXALFQQLATAHYGFPWAHTHLWLVDERCSPLSDPESNFQGLQATCCSKSG

SEQ ID NO: 940 - protein, 56 aa, Homo sapiens
NIKITCSVHMLSTKASSRNLSARMPEGATAGLSWLGLSSLSEGARSVSRTLAVLHQ

SEQ ID NO: 941 - protein, 68 aa, Homo sapiens
ELFSGVPIPPLPFNSCVTLGAGAGGGCVARGGAGPPLPDRPAAGGEQAAHDQPLPQGCQFLRGGVPEA

SEQ ID NO: 942 - protein, 74 aa, Homo sapiens
VLKVDCLYRLLATLFWASYLTLPGLFPNLQNGDSITITHGVVMRFSLVHTSNLEKLLSHMKCVVSFLLLLPGWR

SEQ ID NO: 943 - protein, 93 aa, Homo sapiens
  SITE (56): Xaa equals any of the naturally occurring L-amino acids
  SITE (59): Xaa equals any of the naturally occurring L-amino acids
KRDSLGGRCTWSPTSAEHAAPQQSVGQSALQKGPASASGTTWEVAVLSGGPFSCLXTPXPAPCLWAAARLASALLLHYGSHLPWDPLLHCHIC

SEQ ID NO: 944 - protein, 78 aa, Homo sapiens
PTRPVSPSWASNGDCGIPAGDPAASSLLLPDGLEVGVCVLGTLPLEAPERLKGWPRQIWNNYALMLMKRLAILRKPYH

SEQ ID NO: 945 - protein, 88 aa, Homo sapiens
  SITE (2): Xaa equals any of the naturally occurring L-amino acids
  SITE (29): Xaa equals any of the naturally occurring L-amino acids
GXLVRLQVPVRNSRVDPRVRPRVRLQTVXVETQGDDLQSLLFHFLDEWLYKFSSDEFFIPRVGRRIFIVQAPSGNRSQSNNIFSNAGL

SEQ ID NO: 946 - protein, 62 aa, Homo sapiens
RFSSHNLPSSWDYRHPPPRLANFVFLLETGFLHVGQASLELLTSGDPPTLASQSAGITGVIN

SEQ ID NO: 947 - protein, 76 aa, Homo sapiens
DAWADAWADAWVRNSMCRSVESVSSLTTASQEAGEVPSAGVQRATRRAVGASLLGLWAHGAPQVPWRSPELGGSKG

SEQ ID NO: 948 - protein, 89 aa, Homo sapiens
WQTKSLSREDLKDTSIAPDLGASYQQGRLFPVWTAAVEILPASPTSSEPQERGGDRERARKVMRWIDTFYFALKLFSSLQKKKKKKKKK

SEQ ID NO: 949 - protein, 87 aa, Homo sapiens
PNLRVPPPMQATSPPSSLNVVPSPPSKGNIPYPLVSEIVLSNSPKCWLPPAKHWGRHPAWHWLMGTSVGSISQSSAKGPAVPLPGGP

SEQ ID NO: 950 - protein, 95 aa, Homo sapiens
FLEEIEFEKDAKCIPYLLHLKKSLPVFFNLFRKHKHNCFCIQEVVSGLRQPVGALHSGDGSQRLFILEKEGYVKILTPEGEIFKEPYLDIHKLVP

SEQ ID NO: 951 - protein, 102 aa, Homo sapiens
PRVRVQVGLPLSVQAPTLGQAQVSRTPRTLWTALRYVWAALSTVNTINLNFCTMLSLNSQRGRSLAAKSPAVPLPHSGTSKPLCPHPECGDCGFYILVVPTS

SEQ ID NO: 952 - protein, 58 aa, Homo sapiens
  SITE (22): Xaa equals any of the naturally occurring L-amino acids
  SITE (34): Xaa equals any of the naturally occurring L-amino acids
  SITE (40): Xaa equals any of the naturally occurring L-amino acids
ARACLQIFTAQFLGRWSHQPLXALADANPACVLXEVEGGXSSPRSSLVWFSYSRDICC

SEQ ID NO: 953 - protein, 86 aa, Homo sapiens
KCWDYRREPLCPAHSFLCLVLAFNIQEIPTPDFKHLNSRFYMPNQEKQSLLSLPIALLIGVSTWDQSLGGPQLVGNKKDKGKPSCR

SEQ ID NO: 954 - protein, 39 aa, Homo sapiens
RPTRPPSATSLLLPFLPCDLCTCQLPFAFYHEWKQPEAF

SEQ ID NO: 955 - protein, 86 aa, Homo sapiens
  SITE (6): Xaa equals any of the naturally occurring L-amino acids
  SITE (7): Xaa equals any of the naturally occurring L-amino acids
  SITE (8): Xaa equals any of the naturally occurring L-amino acids
  SITE (29): Xaa equals any of the naturally occurring L-amino acids
  SITE (69): Xaa equals any of the naturally occurring L-amino acids
  SITE (76): Xaa equals any of the naturally occurring L-amino acids
AWPTPXXXLSDAIAPRGCAPHSDAQARAXLGRTVGGGLTLVLPPAQGDLDTTDTHHKANTNGHTYLATXPTTSQTXRHHFRFIAPF

SEQ ID NO: 956 - protein, 234 aa, Homo sapiens
  SITE (36): Xaa equals any of the naturally occurring L-amino acids
  SITE (39): Xaa equals any of the naturally occurring L-amino acids
  SITE (48): Xaa equals any of the naturally occurring L-amino acids
ACPQCLVTLCCGLGFKMEAPAHGLEPCGWGACWLVXYTXGRRAGSWLXSWAGPPWRFPETKPSVSSVQGRRLEARRRVAQTADGVDADLWKDGLFKSKVTRYLCFTRSFSKENSHLGNVLVDMKLIDIKDTLPVGFIPIQETVDTQEVAFRKKRLCIKFIPRDSTEAAICDIRIMGRTKQAPPQYTFIGELNSMGIWYRMGRVPRNHDSSQPTTPSQSSAASTPAPNLPRGHLP

SEQ ID NO: 957 - protein, 42 aa, Homo sapiens
  SITE (42): Xaa equals any of the naturally occurring L-amino acids
LLQNLTTNSLLLMGSLTNKKQLMNTYCVWYMYYILFSYNSVX

SEQ ID NO: 958 - protein, 58 aa, Homo sapiens
RQGFAVLPKLVLNSGAQVICPPRPAGIIGVSHCTRPPLSFESSLPPAHHEFTSSHPSP

SEQ ID NO: 959 - protein, 61 aa, Homo sapiens
NTPLEEDFLGDFNMKKTKNVLLGCVEHYFFVNECCRNEDLGWSNIDFLHHCNISLTSNVTM

SEQ ID NO: 960 - protein, 76 aa, Homo sapiens
  SITE (64): Xaa equals any of the naturally occurring L-amino acids
  SITE (70): Xaa equals any of the naturally occurring L-amino acids
KYCLLIRAENPSFLTWLFFRPLGDKGPSPPSTPSRAKKKKKKKKKKKKKKKKKKKKKKKKKKKXKKIKRXQKLKKK

SEQ ID NO: 961 - protein, 53 aa, Homo sapiens
  SITE (3): Xaa equals any of the naturally occurring L-amino acids
GSXHASADAWVGRVGTVFVYIESILKRRRFSWPCTVAHACNPSTLGGQGGRIA

SEQ ID NO: 962 - protein, 70 aa, Homo sapiens
  SITE (3): Xaa equals any of the naturally occurring L-amino acids
GRXTRPRTLGRTRGDMLAAGGKIESNLASRKGIPGRIKCMCKGPGAGRSLGCWRKHKKAEVSAGHSGSCL

SEQ ID NO: 963 - protein, 49 aa, Homo sapiens
  SITE (5): Xaa equals any of the naturally occurring L-amino acids
  SITE (30): Xaa equals any of the naturally occurring L-amino acids
ALTIXKISVRLGNILISIQPQWRVLTENQXSLKIPERLCVTYVGLNYPD

SEQ ID NO: 964 - protein, 75 aa, Homo sapiens
VTCFVSYLLIAEVMCEYIFLIKDANITKRQMYPLTISQRIVFISSLFIADHFSVHIYMRVSVKIIKWGIIIIPTS

SEQ ID NO: 965 - protein, 79 aa, Homo sapiens
  SITE (31): Xaa equals any of the naturally occurring L-amino acids
HTLPQLPQAQGYLTALWGGVGQTARFWAKAXPRASAQRTHNPLSDLGDNANRSQCIPILGHPLHEEFRGCGKWGGGEGS

SEQ ID NO: 966 - protein, 60 aa, Homo sapiens
  SITE (59): Xaa equals any of the naturally occurring L-amino acids
LSCDCSERKAIYLNLEFSKPTLDFYVLSSCLVLSLRSLLIKTLLLSKKKKKKKKKKKKXG

SEQ ID NO: 967 - protein, 58 aa, Homo sapiens
CLSNVYCVIYNVVFKLISTSAFLCTPLSHWVILFGMVIVIKIIQDSNSFPSATMPSLI

SEQ ID NO: 968 - protein, 124 aa, Homo sapiens
  SITE (47): Xaa equals any of the naturally occurring L-amino acids
RQFLCRVWPSGDKEKSNISNDQLHALLCIYLEHTESILKAIEEIAGXGVPELINSPKDASSSTFPTLTRHTFVVFFRVMMAELEKTVKKLSLAQQQTRSRFMKRNSSTGTWAVPETSSILHQLG

SEQ ID NO: 969 - protein, 27 aa, Homo sapiens
  SITE (25): Xaa equals any of the naturally occurring L-amino acids
HAAIIAINARNLFNNSECFLAKYFXKW

SEQ ID NO: 970 - protein, 115 aa, Homo sapiens
  SITE (1): Xaa equals any of the naturally occurring L-amino acids
  SITE (5): Xaa equals any of the naturally occurring L-amino acids
  SITE (6): Xaa equals any of the naturally occurring L-amino acids
  SITE (7): Xaa equals any of the naturally occurring L-amino acids
  SITE (8): Xaa equals any of the naturally occurring L-amino acids
  SITE (26): Xaa equals any of the naturally occurring L-amino acids
  SITE (28): Xaa equals any of the naturally occurring L-amino acids
  SITE (30): Xaa equals any of the naturally occurring L-amino acids
  SITE (46): Xaa equals any of the naturally occurring L-amino acids
  SITE (50): Xaa equals any of the naturally occurring L-amino acids
  SITE (58): Xaa equals any of the naturally occurring L-amino acids
  SITE (59): Xaa equals any of the naturally occurring L-amino acids
XTDSXXXXSRVDPRVRLKTSVIKGIXNXLXEQFPGIEPWLNQIMPXKDPXKIVRCHEXXEILTVNGELLFFRQREGPFYPTLRLLHKYPLSCHTSRLIKEPSNLYSVEQISCVQA

SEQ ID NO: 971 - protein, 76 aa, Homo sapiens
  SITE (48): Xaa equals any of the naturally occurring L-amino acids
  SITE (56): Xaa equals any of the naturally occurring L-amino acids
  SITE (65): Xaa equals any of the naturally occurring L-amino acids
  SITE (74): Xaa equals any of the naturally occurring L-amino acids
IYYTNTVLCIVRLCCFEPPCPHPLILAFLISCQFTIYTDKSNLECIHXRFYKISLXPSIYNPRFXNINHRIFNXSD

SEQ ID NO: 972 - protein, 109 aa, Homo sapiens
LTPYEVAQGRKAHLLALPLFYPVRTRRLSLALLPFEDTVLLPSEEAAIKCHVGSREQPISDASPASPLILDFSVSRTMRIICIVCKLPILWNFCYSSTNGLTVFFFKKE

SEQ ID NO: 973 - protein, 50 aa, Homo sapiens
IKPNNIYFLRDRVFYFGSGGSGREGSCCVAHAGVQWLFTHVMIVYCNYEL

SEQ ID NO: 974 - protein, 151 aa, Homo sapiens
GRGDWQAGPSSSVRRTQAIRRRHNAGSNPTPPASVMGSPPSSLQEAQRGRAASHSRALTLPSALHFASSLLLTRAGANVHEACTFDDTSEGAVHYFYDESGVRRSYTFGLAGGGYENPVGQQGEQTANGAWDRHSHSSSFHSADVPEATGG

SEQ ID NO: 975 - protein, 80 aa, Homo sapiens
  SITE (54): Xaa equals any of the naturally occurring L-amino acids
PFSFRCGAEDHVEAVKKLQNSTKILQKNNLNLLRDLAVHIAHSLRNSPDWGGVXILHRKEGDSEFMNIIANEIGSEETSC

SEQ ID NO: 976 - protein, 77 aa, Homo sapiens
  SITE (48): Xaa equals any of the naturally occurring L-amino acids
  SITE (51): Xaa equals any of the naturally occurring L-amino acids
  SITE (66): Xaa equals any of the naturally occurring L-amino acids
PPRGGVPGTPPTRPGSPRGGGGGEPIFWGKKRGKGGNPPPGPKTPPKXPKXFGKGERGGEFFLWGXNFWENLGAGLF

SEQ ID NO: 977 - protein, 33 aa, Homo sapiens
SQLLRRLRWEGRWSPGEVKPAVSRDHTTTLQPW

SEQ ID NO: 978 - protein, 111 aa, Homo sapiens
  SITE (19): Xaa equals any of the naturally occurring L-amino acids
  SITE (39): Xaa equals any of the naturally occurring L-amino acids
  SITE (41): Xaa equals any of the naturally occurring L-amino acids
  SITE (47): Xaa equals any of the naturally occurring L-amino acids
RQLLKAQRACFLSGSLRGXSLTTSQAWGSQSPAPVTTDXTXPGQLLXRQEELIFRELRLSNDAEGAKAEFRTTLKRKGLAGRGCFTPVIPAILGGRSRLDHEVQEIETILG

SEQ ID NO: 979 - protein, 51 aa, Homo sapiens
TNSAIFYIFVKDKSLMLSVCNLFINSGFMTSTNHQKSHVINSLCPVITCCG

SEQ ID NO: 980 - protein, 158 aa, Homo sapiens
  SITE (11): Xaa equals any of the naturally occurring L-amino acids
  SITE (109): Xaa equals any of the naturally occurring L-amino acids
  SITE (121): Xaa equals any of the naturally occurring L-amino acids
  SITE (135): Xaa equals any of the naturally occurring L-amino acids
  SITE (137): Xaa equals any of the naturally occurring L-amino acids
  SITE (142): Xaa equals any of the naturally occurring L-amino acids
  SITE (146): Xaa equals any of the naturally occurring L-amino acids
  SITE (147): Xaa equals any of the naturally occurring L-amino acids
  SITE (152): Xaa equals any of the naturally occurring L-amino acids
  SITE (155): Xaa equals any of the naturally occurring L-amino acids
LRETRDALREXTLALGSVQLDLRQAQHRIKEMKQMHPNGEAKESQSIGKQNSLEERIRQQELENLLLERQLEDARKEGDNKEIVINIHRDCLENGKEDLLEERNKELMXEYNYLKEKLLQXEKEKAEREVSMKKXIXFWKEXLNIXXWLYVXPSXIYK

SEQ ID NO: 981 - protein, 148 aa, Homo sapiens
  SITE (9): Xaa equals any of the naturally occurring L-amino acids
  SITE (12): Xaa equals any of the naturally occurring L-amino acids
  SITE (17): Xaa equals any of the naturally occurring L-amino acids
  SITE (18): Xaa equals any of the naturally occurring L-amino acids
  SITE (21): Xaa equals any of the naturally occurring L-amino acids
  SITE (26): Xaa equals any of the naturally occurring L-amino acids
  SITE (87): Xaa equals any of the naturally occurring L-amino acids
RDRLLQVPXLEXAVLGXXEQXRLAVXEGQGTNAVVVRAQGELGVPRLLKSIFAVRQIAAEVVVVGDGEICQVPQAHLPAPDSVHDEXVFMWPGLGCARRRASHFWGQPIHIPQVSQNALEFDPTAFQLMGAPIHSAPPRVWSPFPILS

SEQ ID NO: 982 - protein, 59 aa, Homo sapiens
GNPSSKKLYARTEGMRSHSHTQNFSILLCLDEGHRHFMNLKWEHQKCHWSAYFFKLGVL

SEQ ID NO: 983 - protein, 109 aa, Homo sapiens
TLELYSQLSIGHPYVWDLRYFKHDVSKSVSLLAIILFFYFSKFHITSNKLAVIMADSLEIKLPFLPFAQQIDIKSCFYFFFLTIASLFCILTAPSSDVGGHLFSSFPLL

SEQ ID NO: 984 - protein, 75 aa, Homo sapiens
TVFYSGVVSKTSLRGRGENLVLPEMLCFLVAISFRSSLCNSEVHLFPFGNHFFSTVLATVVIEPQFLFLKKCPLF

SEQ ID NO: 985 - protein, 50 aa, Homo sapiens
  SITE (8): Xaa equals any of the naturally occurring L-amino acids
  SITE (16): Xaa equals any of the naturally occurring L-amino acids
LCMYLSHXIAKLLGYXKNMHQAGTPISCLAFNYQKHLCYNSIFTCIILYM

SEQ ID NO: 986 - protein, 89 aa, Homo sapiens
GTRDPRPRPARLPQLHAGASPSSFAAAHNRTCRYRAFREDDGHYSQTYWNLLAIRLAFVIVFEVAEAPAGSPIHGMRPRPCALPNSSTW

SEQ ID NO: 987 - protein, 140 aa, Homo sapiens
  SITE (91): Xaa equals any of the naturally occurring L-amino acids
  SITE (132): Xaa equals any of the naturally occurring L-amino acids
  SITE (139): Xaa equals any of the naturally occurring L-amino acids
APPHSKIGLEKKRKRKMDVSKITRYTEDCFSDSNCVPNKSKMQEVDFLEQNEELQAVDSQKYALSKVKPESTDEDLESVDAFQHLIYNPDXCGEESSPVHTSTFLSNTLKKKCEESDSESPATFSTEEPSFXPCTKCMXI

SEQ ID NO: 988 - protein, 93 aa, Homo sapiens
  SITE (30): Xaa equals any of the naturally occurring L-amino acids
  SITE (59): Xaa equals any of the naturally occurring L-amino acids
LLKDTILESLSQTSSAQDVNSTNDRLEQSXRCVKLLPCHSLLYTFLIYDFHLLYIYINXLYIYATFYIFHGYVFIISKNVYFTFLGLFLAVIQ

SEQ ID NO: 989 - protein, 37 aa, Homo sapiens
  SITE (31): Xaa equals any of the naturally occurring L-amino acids
DPRVRPRSGLIVGYYSSINFYSGDYFWDWNXKKNQRF

SEQ ID NO: 990 - protein, 59 aa, Homo sapiens
NLSGSGPFPIGTCLPLGFDRSSVTWNSRGIWANLNVFELYLHHWQASSISNTHLSVFVL

SEQ ID NO: 991 - protein, 71 aa, Homo sapiens
YDGGQKVFTPGSLGKLGMELVQGIHASRRGGIGLEGLAGLFHSQNSLILGSRRACALFSKERLPRGIRHTV

SEQ ID NO: 992 - protein, 137 aa, Homo sapiens
  SITE (21): Xaa equals any of the naturally occurring L-amino acids
  SITE (23): Xaa equals any of the naturally occurring L-amino acids
  SITE (80): Xaa equals any of the naturally occurring L-amino acids
RHRQHPACDFTGPTHPGPLEXDXGWIPGTGGVEVDPGKCRVKGGLRCTPCGLGSTSQKSNKDSRTHSTSSIPWPSVEPQXLRLWQGLFLRWTCSPEPAEAAWGKSVANSDRKGEDRSLSANCFSRAPILSTGSLDSS

SEQ ID NO: 993 - protein, 66 aa, Homo sapiens
FVSISHNKKFKEREPMKGRERVKHTIRVTNSAKSAHSIKFSHIYINITWNAILKLMYITRIKKVKI

SEQ ID NO: 994 - protein, 119 aa, Homo sapiens
  SITE (80): Xaa equals any of the naturally occurring L-amino acids
  SITE (98): Xaa equals any of the naturally occurring L-amino acids
  SITE (107): Xaa equals any of the naturally occurring L-amino acids
ADESYLPSINTFSFLTPACFRHSGGTWAHCARRFALPLLFPAFQSAFSRKVSLMSSTVPLPLKKIHLLEGFIDDFKTFLXKYLGKEKLLGMYFFVYCXSNLNPGIFXILALMGPFLGPG

SEQ ID NO: 995 - protein, 64 aa, Homo sapiens
SAHLGFPKCWDYKCEPPFPALVQYVKFCVCVNQIIFKSAKNCISTKRLKLLTNFWGDKAAYLIK

SEQ ID NO: 996 - protein, 122 aa, Homo sapiens
  SITE (46): Xaa equals any of the naturally occurring L-amino acids
RCGESGRRKCLIKIVFALDVPCVFGFFWAHCSDIKVASLWGRRGGXVCWLGHLIINYGGAGPENHPPAHGGYRAFRIRAAFFFRITIPTPSETKWRVLGLSGNSKSFNSWVQLSSSVFLGSD

SEQ ID NO: 997 - protein, 45 aa, Homo sapiens
  SITE (42): Xaa equals any of the naturally occurring L-amino acids
QFLLDKLGPMVTASIPLITGVHSGKNRCNHYVTQYKEEDYTXKKY

SEQ ID NO: 998 - protein, 94 aa, Homo sapiens
  SITE (78): Xaa equals any of the naturally occurring L-amino acids
  SITE (90): Xaa equals any of the naturally occurring L-amino acids
  SITE (92): Xaa equals any of the naturally occurring L-amino acids
THASAHASAHAPVPSLLKIQKISRAWWRASVIPAAREAEAGEWREPGRRTCSEPRSRHCTPAWGDRARLRLRRKKKKXFLSLKFSLVKDXDXKL

SEQ ID NO: 999 - protein, 65 aa, Homo sapiens
VGKASQPTLTVGSTQKLVFTWEHILVTLMALSLSNHYSDIYCVFDCDYNCQPISKVHLHTIPFPF

SEQ ID NO: 1000 - protein, 82 aa, Homo sapiens
  SITE (80): Xaa equals any of the naturally occurring L-amino acids
  SITE (82): Xaa equals any of the naturally occurring L-amino acids
KDLRNETHTQQSNKVKEAWIPNAGGTEPINTHCPPDLHMKEKNCCPVKKTLPRCQQLDIGLPAFRNVRNKFFKKKKKKGXPX

SEQ ID NO: 1001 - protein, 56 aa, Homo sapiens
EVIISGTSRSTVPYVGSWSRRAPLPVGGSFSLSYHNPHRFLSQRTYLSCSLYLPGL

SEQ ID NO: 1002 - protein, 56 aa, Homo sapiens
  SITE (22): Xaa equals any of the naturally occurring L-amino acids
PGSTHASEIMPLHPSLGDRVKXCLKEKKRKKSLERPGSVAHTCTPNTLGGRGRQMA

SEQ ID NO: 1003 - protein, 55 aa, Homo sapiens
  SITE (27): Xaa equals any of the naturally occurring L-amino acids
  SITE (44): Xaa equals any of the naturally occurring L-amino acids
IIITDNRLISVTTVNNSIIIYIIPQRXCSLTCLLREPASNYLLXFRADIYLTYNC

SEQ ID NO: 1004 - protein, 196 aa, Homo sapiens
ARAQPGAAARLPPESPGPPESPGPPEREAAAARRWTGAEPQDCAPGSGRPEKPPQLSEDDIWLKSEGDNYSATLLEPAASSLSPDHKNMEIEVSVAECKSVPGITSTPHPMDHPSAFYSPPHNGLLTDHHESLDNDVAREIRYLDEVLEANCCDSAVDGTYNGTSSPEPGAVVLVGGLSPLSTRRPSQNPLKEQLA

SEQ ID NO: 1005 - protein, 69 aa, Homo sapiens
  SITE (48): Xaa equals any of the naturally occurring L-amino acids
  SITE (49): Xaa equals any of the naturally occurring L-amino acids
  SITE (50): Xaa equals any of the naturally occurring L-amino acids
VVAACDVYEFWLYVSSDYFLQLYLVKFYLISAIVLPKSMFVEYDMVKXXXYLETVEGMVVIERQCQMEQ

SEQ ID NO: 1006 - protein, 76 aa, Homo sapiens
QKSMKMFDTGCYRESFKISYACIKSEMAKLKATLSREGPGIFISFQKLGILIQSANYLTHLFDKQRMDVSILRHRQ

SEQ ID NO: 1007 - protein, 83 aa, Homo sapiens
FSNYRHFLIMMHFKSGLELTELQNMTVPEDDNISNDSNDFTEVENGQINSKFISDRESRRSLTNSHLGKKGSVMEYDSRLQPP

SEQ ID NO: 1008 - protein, 37 aa, Homo sapiens
PVTCYTPSLNHRWALDLIYLLNFSMLLEEVRLELNKS

SEQ ID NO: 1009 - protein, 45 aa, Homo sapiens
  SITE (31): Xaa equals any of the naturally occurring L-amino acids
RHKQGKILKVAAPGSRNYSCGYPLAPEGSNXRWGTFSTRGVNCCP

SEQ ID NO: 1010 - protein, 62 aa, Homo sapiens
  SITE (1): Xaa equals any of the naturally occurring L-amino acids
  SITE (29): Xaa equals any of the naturally occurring L-amino acids
  SITE (51): Xaa equals any of the naturally occurring L-amino acids
  SITE (57): Xaa equals any of the naturally occurring L-amino acids
XFPFGHSEVGSDFFFPFHAFPSPTHQQVXQVLPLEAYSRTTHFPPPSLLHXGQVTTXSGNLC

SEQ ID NO: 1011 - protein, 31 aa, Homo sapiens
AQPTLKFLSRSVVLQVMVKEKGGKGRKIKKL

SEQ ID NO: 1012 - protein, 47 aa, Homo sapiens
  SITE (7): Xaa equals any of the naturally occurring L-amino acids
  SITE (30): Xaa equals any of the naturally occurring L-amino acids
EREMGNXVSIRNKVISIGHKTKTTFKHVHXGKKAQRSHWKELKHKGS

SEQ ID NO: 1013 - protein, 75 aa, Homo sapiens
  SITE (61): Xaa equals any of the naturally occurring L-amino acids
  SITE (74): Xaa equals any of the naturally occurring L-amino acids
LNSRKTFRVGFFVIGWKILPNVIYYCIFMSYIFDSSCHVFGKLVSLSTLTPPYTHTHTHKXHHHTFMGSWWGIXP

SEQ ID NO: 1014 - protein, 33 aa, Homo sapiens
  SITE (31): Xaa equals any of the naturally occurring L-amino acids
SSLQYVNIFNCSRFIKDLEPKLKRGGPGTQXAL

SEQ ID NO: 1015 - protein, 92 aa, Homo sapiens
  SITE (27): Xaa equals any of the naturally occurring L-amino acids
GRVGGRVGRPTRPTAARRQKGEGTRRXLRSLGFARAHRRKLTTRFCNPYGRPTLCLREIHSPTWKRTGSQASKKALPPRSALGLSGRNSQRR

SEQ ID NO: 1016 - protein, 37 aa, Homo sapiens
NLILFTPCAHFPRLVSYLDSLRRDVFDNVLTLNIKKK

SEQ ID NO: 1017 - protein, 46 aa, Homo sapiens
LNKCPLSTTKIPATCFLLYEYMRPTFIHVSSMKLSLHSKHRAETST

SEQ ID NO: 1018 - protein, 47 aa, Homo sapiens
GLPAWATRAKLHLKERKKKRHYICNQGWGRGVGGRSRRHTLQCIFIF

SEQ ID NO: 1019 - protein, 37 aa, Homo sapiens
SHLGIFIFFSRLKIALLFHSYYIIRMCLFSEFPETAE

SEQ ID NO: 1020 - protein, 51 aa, Homo sapiens
  SITE (16): Xaa equals any of the naturally occurring L-amino acids
  SITE (42): Xaa equals any of the naturally occurring L-amino acids
VSVYVSSLAVRTICCXIVCRECALKYSEHFKMSILQSKKICXFGKSWHGMH

SEQ ID NO: 1021 - protein, 66 aa, Homo sapiens
  SITE (9): Xaa equals any of the naturally occurring L-amino acids
  SITE (56): Xaa equals any of the naturally occurring L-amino acids
  SITE (58): Xaa equals any of the naturally occurring L-amino acids
  SITE (62): Xaa equals any of the naturally occurring L-amino acids
PAVMTGTCXSQLLGRLRHENCLNPGGGSCSEPGSCHCTPTWGSRARLCLQKGEKKXCXCGPXKGTH

SEQ ID NO: 1022 - protein, 97 aa, Homo sapiens [sequence omitted]

SEQ ID NO: 1023 - protein, 112 aa, Homo sapiens
  SITE (8): Xaa equals any of the naturally occurring L-amino acids
DFGLQGIXCAKITQLKNERKVDIDYHFPKTTTIIFSFFLVKTAQVSDERKSYSPRKQSKYESSKESQQHSKSSADKIGEVSSPKASSKLAIMKKKKKKLEGGPYPIRRIMIV

SEQ ID NO: 1024 - protein, 85 aa, Homo sapiens
  SITE (53): Xaa equals any of the naturally occurring L-amino acids
  SITE (84): Xaa equals any of the naturally occurring L-amino acids
  SITE (85): Xaa equals any of the naturally occurring L-amino acids
HLAVFMASSGTTDVTNRNSPATPPNTLNLRSSHNELLNAEIKHTETKNSTPPXCRKKYALTNIQAGVCGLQGGHPEAYGAQIVXX

SEQ ID NO: 1025 - protein, 90 aa, Homo sapiens
PCQLMVLVNFWIFAHLIGGKWELLIKSLLQLDPCCISGKEGPTCLGASFHWPCASPWFRSLQGSHPAWKEHQHWVVLQTGLGADLVSSPV

SEQ ID NO: 1026 - protein, 99 aa, Homo sapiens
  SITE (2): Xaa equals any of the naturally occurring L-amino acids
QXQLLLILVGKQKLTDTTFLPSSKSDQYAISLIVREIMLEEEPSITSGESQTTYSTFSAPLNKANRKKLIESLSPDFCHQNKGLLLTVNTSSQNGRPGR

SEQ ID NO: 1027 - protein, 60 aa, Homo sapiens
  SITE (58): Xaa equals any of the naturally occurring L-amino acids
  SITE (60): Xaa equals any of the naturally occurring L-amino acids
LIEFKQMRHHELQWLLIFQGIYLKCLEDTDFSFHSLVFHFSIYRNEMTLLGGSRSRKXMX

SEQ ID NO: 1028 - protein, 74 aa, Homo sapiens
  SITE (68): Xaa equals any of the naturally occurring L-amino acids
  SITE (73): Xaa equals any of the naturally occurring L-amino acids
CVTGIMLHLGNKIVSKTQSCPPALIVLGAETLTTTIQPDGSLSKVHRAKFLFIFLFLFFTLSVGQRAXFQRGXW

SEQ ID NO: 1029 - protein, 159 aa, Homo sapiens
  SITE (132): Xaa equals any of the naturally occurring L-amino acids
VLRYVRKKYLVECDNMNRFDRPDRNVRQPQEGFWKRPPQRWSGQEHYHLSHPDHYHHHGKSDLSRGSPYRESPLGHFESYGGMPFFQAQKMFVDVPENTVILDEMTLRHMVQDCTAVKTQLLKLKRLLHQHXGSGSLHDIQLSLPSSPEPEDGDKVYKV

SEQ ID NO: 1030 - protein, 65 aa, Homo sapiens
  SITE (9): Xaa equals any of the naturally occurring L-amino acids
  SITE (30): Xaa equals any of the naturally occurring L-amino acids
  SITE (31): Xaa equals any of the naturally occurring L-amino acids
  SITE (38): Xaa equals any of the naturally occurring L-amino acids
CDEGTKCDXHTGLNLLVILLYHSPHKCLEXXAEISLYXYITLLKFSSARQIGREFYILCLFAIIS

SEQ ID NO: 1031 - protein, 59 aa, Homo sapiens
  SITE (26): Xaa equals any of the naturally occurring L-amino acids
FLIFSILCLLHNFITFCSLLPLSFLXCCCSFFLLLEIEAWLKFSPNACILQCYKFFPMS

SEQ ID NO: 1032 - protein, 79 aa, Homo sapiens
RTNWKEHPDLLLWPYPRGIECRWGAGKTQSTPHHHSAPSTANGDCSENPVLSFPLFKGRHVIEDVMVTSGLFYFVVTSL

SEQ ID NO: 1033 - protein, 109 aa, Homo sapiens
SPDHLCCLLSPTVAMTDKFSALALLTVCKVREQPPNPPPTFGTAEFGGVRKITLGFNSLLERLTELTKAIILTVKGDRLKSPKRRDIWAKSRRVSDAELPVFLSQWSHG

SEQ ID NO: 1034 - protein, 32 aa, Homo sapiens
  SITE (15): Xaa equals any of the naturally occurring L-amino acids
TLKRIIKVCLCHDFXILDQWTIPLKDMSTKWT

SEQ ID NO: 1035 - protein, 129 aa, Homo sapiens
  SITE (38): Xaa equals any of the naturally occurring L-amino acids
  SITE (73): Xaa equals any of the naturally occurring L-amino acids
GTRRRPRLPACPPASHSPSPFRGKSPLTPPPRQPGPPXLTASWEPSPARRLLSSATGRSCSPGGGGGSRLRGXWSPPPTAGQGWSWTEASAFKSFVSKPLGSGGCAGVLLAINTTRFSQKKKKKKKKKK

SEQ ID NO: 1036 - protein, 50 aa, Homo sapiens
  SITE (14): Xaa equals any of the naturally occurring L-amino acids
  SITE (22): Xaa equals any of the naturally occurring L-amino acids
PIPVNPSTSGGQLXSQVGRLFXLSLRPFGQHGKTLSTKIEKLARHGGSYL

SEQ ID NO: 1037 - protein, 108 aa, Homo sapiens
FGEDSSTSSMMSVNFDVQSNQSDINDSVKSSPVAHSILWIWGRDSDAYRDKQHILWPKRADCTESYPRVPVGGELPTYFLPPENKGLRQVVMDLAKHLILHDCHLAVL

SEQ ID NO: 1038 - protein, 159 aa, Homo sapiens
  SITE (32): Xaa equals any of the naturally occurring L-amino acids
  SITE (143): Xaa equals any of the naturally occurring L-amino acids
  SITE (151): Xaa equals any of the naturally occurring L-amino acids
  SITE (152): Xaa equals any of the naturally occurring L-amino acids
SPGVGQRQKWYQGLVDELAKDIRNQHRHRHRXKAELVKLQATLQGLSTKTTFYEEQGDYYSQYIRACLDHLAPDSKSSGKGKKQPSLHYTAAQLLEKGVLVEIEDLPASHFRNVIFDITPGDEAGKFEVNAKFPGCGHGAFQXHYQDLLQXXYEGVAVM

SEQ ID NO: 1039 - protein, 78 aa, Homo sapiens
VSCEELNSEMTEHFPQKQPQGSLKIATKPKYLIQQEECAEMKSTENLYYQHQSENTMRNKSRWPCIYPHRVHLYILLL

SEQ ID NO: 1040 - protein, 66 aa, Homo sapiens
  SITE (10): Xaa equals any of the naturally occurring L-amino acids
HVCTYMCLSXLYIHIFFIFNVASNILLEYYSQLYTHIHIYSPYPSHTRAHTHAHTHTRVHIHTHLT

SEQ ID NO: 1041 - protein, 52 aa, Homo sapiens
  SITE (16): Xaa equals any of the naturally occurring L-amino acids
FPKFWRLGSLQSRCQXLVSSKGLLAVSSCNSKWKGKRRTLPHEASLIRAIMP

SEQ ID NO: 1042 - protein, 49 aa, Homo sapiens
  SITE (40): Xaa equals any of the naturally occurring L-amino acids
  SITE (49): Xaa equals any of the naturally occurring L-amino acids
RFWGPGLWDRRPMSSFEGQMAEYPTISIDRFDRENLRARXYFLSHCHKX

SEQ ID NO: 1043 - protein, 44 aa, Homo sapiens
  SITE (7): Xaa equals any of the naturally occurring L-amino acids
  SITE (30): Xaa equals any of the naturally occurring L-amino acids
  SITE (32): Xaa equals any of the naturally occurring L-amino acids
GESAWIXGGMGHHPCSERSGGIQAVKLSFXSXQWEAVERFEARD

SEQ ID NO: 1044 - protein, 52 aa, Homo sapiens
IKLGGGWRIKVEGSGTWDTLGLILLPVSAIYVNMIVHLLYLLSHLHFFKKSS

SEQ ID NO: 1045 - protein, 49 aa, Homo sapiens
NKMEALQIVYSLYFKELDMKNSRSFCVYKPDFLSCLGQTFCASMYSLNM

SEQ ID NO: 1046 - protein, 67 aa, Homo sapiens
  SITE (66): Xaa equals any of the naturally occurring L-amino acids
LMDSYPRLCYSNITQDFLQPVFTLTLKQLFKMTRNLLKSTCFLWFSIQLPTFQIIPSLSCPLHSSXV

SEQ ID NO: 1047 - protein, 60 aa, Homo sapiens
  SITE (31): Xaa equals any of the naturally occurring L-amino acids
  SITE (32): Xaa equals any of the naturally occurring L-amino acids
LPSSQEGYSLIEDTEKSNNSHRVFMGISCRXXLLKLGVRRDLGKVFQLSIKRWKEEPSSR

SEQ ID NO: 1048 - protein, 41 aa, Homo sapiens
IPNFLTPRPVFSPLTMQPNGKYLFTLSLEVRGIKRPSKDLL

SEQ ID NO: 1049 - protein, 56 aa, Homo sapiens
QDAVSHHAQHFFKIIIIILFYFFRWSLTLLPRLECALVQSQLTATSTSRVQAILLP

SEQ ID NO: 1050 - protein, 39 aa, Homo sapiens
ARERAGITGACHRTRLVFVFLVDTGFHHLGQAGLELLTS

SEQ ID NO: 1051 - protein, 99 aa, Homo sapiens
  SITE (96): Xaa equals any of the naturally occurring L-amino acids
LPHTEEYVFGSTPNHIMAVFNQKSVSDMIKEFRKNWRALCNSERTTLCGADSMLLALQLSMAENNKQHSGEFTVSLSDVLLTWKYLLHEKLNLPLXTWT

SEQ ID NO: 1052 - protein, 115 aa, Homo sapiens
VNLLVDRNLDCFLFLNADSFLCGVCVLCRCPSPSPVIVSGRRGKGSPATVSPSSHAGCPWRSLHFFIVRQGWVPPWSGSVLLGWGQPLQMFSECHTQVCAFMGLCVSSCCGRAKM

SEQ ID NO: 1053 - protein, 76 aa, Homo sapiens
  SITE (57): Xaa equals any of the naturally occurring L-amino acids
PVPAVLSPLGCALRLGHLLRALCPFPGCGQQVIGKGEGSSGKFLCKPVCVPVILDRXPGGQAGDGERETSGFPEGK

SEQ ID NO: 1054 - protein, 78 aa, Homo sapiens
  SITE (18): Xaa equals any of the naturally occurring L-amino acids
  SITE (34): Xaa equals any of the naturally occurring L-amino acids
GPQPDPASALVCCSGCPXGLETVPICLVTLSAFXFGLQVLTPPRPKPCAQAFNTGFLLIYGFAVGFLCFRLMSPGRGP

SEQ ID NO: 1055 - protein, 97 aa, Homo sapiens
  SITE (30): Xaa equals any of the naturally occurring L-amino acids
  SITE (55): Xaa equals any of the naturally occurring L-amino acids
LSCGLHSSRARPTSLPSPAATVRCTVDMMXRRLKADSISRGCPSLGFGGAPLPLXRLSTACVGTLVTLQSSLHPHERHLISSDGETEAWQRGPVAFV

SEQ ID NO: 1056 - protein, 103 aa, Homo sapiens
HPRSLNPHTHNIYPNPNPNIPAPSPPTPITSTPTLILALTLNLTLSPLTRQHPSHRPLTLTTILKKSNSSPEEDNITQAHCKCVFTTPSIQSKISRHGGDRTR

SEQ ID NO: 1057 - protein, 86 aa, Homo sapiens
  SITE (71): Xaa equals any of the naturally occurring L-amino acids
  SITE (82): Xaa equals any of the naturally occurring L-amino acids
ASGFKRSSCLSLPKCWDYRHEPLYMAYIFLRCTFMCVYSGNTLITCRVARFFKSKTLAPVHSNTLIRMSFXWFCGRHPCHLXTHSR

SEQ ID NO: 1058 - protein, 106 aa, Homo sapiens
RAVRGLGSVAVSPEPPRSGRSGAEASLAARRAEQARAGGRSGTPASGSFLAGSTLIAKISPLLLKPRLFILPPAWAAGCSSGWAWSQEQGECAPGPPSRVPGPWCG

SEQ ID NO: 1059 - protein, 153 aa, Homo sapiens
  SITE (149): Xaa equals any of the naturally occurring L-amino acids
  SITE (150): Xaa equals any of the naturally occurring L-amino acids
VTRDWSARRKQSGAPVPWFLRAMARGGWRRLRRLLSAGQLLFQGRALLVTNTLGCGALMAAGDGVRQSWEIRARPGQVFDPRRSASMFAVGCSVGPFLHYWYLSLDRLFPASGLRGFPNVLKKVLVDQLVASPLLGVWYFLGKEPPKPXXCLS

SEQ ID NO: 1060 - protein, 109 aa, Homo sapiens
  SITE (21): Xaa equals any of the naturally occurring L-amino acids
  SITE (91): Xaa equals any of the naturally occurring L-amino acids
  SITE (95): Xaa equals any of the naturally occurring L-amino acids
  SITE (96): Xaa equals any of the naturally occurring L-amino acids
LPLSLPDHAINCVRMGLDMCXAIRKLRAATGVDINMRVGVHSGSVLCGVIGLQKWQYDVWSHDVTLANHMEAGGVPGRVHITGATLALLAXAYAXXDQAWSIGTPTFGS

SEQ ID NO: 1061 - protein, 61 aa, Homo sapiens
  SITE (10): Xaa equals any of the naturally occurring L-amino acids
  SITE (41): Xaa equals any of the naturally occurring L-amino acids
KKRKVNLKFXGQIFSPHILNWQGKAKPNYTKIKIYMKSEKXLKPNKNDPESIKKREVTVYQ

SEQ ID NO: 1062 - protein, 96 aa, Homo sapiens
  SITE (53): Xaa equals any of the naturally occurring L-amino acids
FVNHLNFNSKGVRNTPTASHRTATRANHTRLLGSQPNKGLPWSSRVDPEVRYXLGKKKLVGVCSRTGCCVSFQLLARSYSLKIAKAFALGIGPTPA

SEQ ID NO: 1063 - protein, 86 aa, Homo sapiens
  SITE (80): Xaa equals any of the naturally occurring L-amino acids
  SITE (82): Xaa equals any of the naturally occurring L-amino acids
KSIWLTKCRMTFWKPEHSPACLAFCSARWEVSLFLVFLHSGLQEVRLHTESAGWCENPSYCLSKTLEFAPFPFIFSRAWXKXHEHV

SEQ ID NO: 1064 - protein, 136 aa, Homo sapiens
AAVAVELTQATSHTSEETKAHSCWSVMKHGAQPLSKAWLKADASSHKRNIGFLQLWQMVPGSLWWRKPVAVTRDLCWSPSAADTLFACVPCPKATSHLGCSCSNRSRHFDAAHPKYPLHTSPLSCSRLIWPELDHC

SEQ ID NO: 1065 - protein, 62 aa, Homo sapiens
  SITE (51): Xaa equals any of the naturally occurring L-amino acids
  SITE (52): Xaa equals any of the naturally occurring L-amino acids
  SITE (55): Xaa equals any of the naturally occurring L-amino acids
  SITE (57): Xaa equals any of the naturally occurring L-amino acids
SRKLSQRCGDPTGCRQRRASTGRCSRLMKGDQTCVPTGVGAWGGHSKGEVXXVGXNXPLESF

SEQ ID NO: 1066 - protein, 65 aa, Homo sapiens
IWLCYIFSRNTVCLFPMFYSVSGFPTFDRKYVGRILAVIIMIIECPILSSNISTKNYYRCSPHSC

SEQ ID NO: 1067 - protein, 68 aa, Homo sapiens
  SITE (43): Xaa equals any of the naturally occurring L-amino acids
LRSGIRGQPGQHGGALSLLEVQKLAGRGGTCLWFQLLGRLRQXNCLSPGGGGCSEPRLCHFIPAWAKE

SEQ ID NO: 1068 - protein, 93 aa, Homo sapiens
  SITE (90): Xaa equals any of the naturally occurring L-amino acids
KDRLQITRPVHGEDAEIMATPVHSSAVSSLAEHGESGFLKYSTERLSRANGGLHPHPAAAETGNCLQGHGWSSADHTPDPPSPACTPKNXLRF

SEQ ID NO: 1069 - protein, 57 aa, Homo sapiens
  SITE (16): Xaa equals any of the naturally occurring L-amino acids
  SITE (36): Xaa equals any of the naturally occurring L-amino acids
DPHRGGGRSRTSGSPXLSGIRHELTEGERAKDREEXGVFFQIMKKSYRLMPKRVDGG

SEQ ID NO: 1070 - protein, 287 aa, Homo sapiens
  SITE (40): Xaa equals any of the naturally occurring L-amino acids
IRKVSSNGHSNEAGVLERSGGELCHNRHRGYLCEVQLHYXGCQSPLLLEHQGSGPLECDGAREREDTMEASRHPETKWHGPPSKVLGSYKERALQKDGSCKDSPNKLSHIGDKSCSSHSSSNTLSSNTSSNSDDKHFGSGDLMDPELLGLTYIKGASTDSGIDTAPCMPATILGPVHLAGSRSLIHSRAEQWADAAASLGLTTSQPSYILCMATRPPSPPAVLRKAAWAISVRYPLIPVVLTIQEALQLTVQKVVGLWIHPKSTSCLTAADNRFPGPCPSPTTDKGQ

SEQ ID NO: 1071 - protein, 62 aa, Homo sapiens
  SITE (56): Xaa equals any of the naturally occurring L-amino acids
RLGSLSPCLSWWVCGLMTKLVLTLVSLWELEGSHQKKPGAPTEGHGRACLAVTPPXAVVWCS

SEQ ID NO: 1072 - protein, 67 aa, Homo sapiens
ETTHLISYSQIFEVPCSYVKTQSWSLPLSELSKETIMLMTPGSFLSERIQDALCALEGSQGSGTQRW

SEQ ID NO: 1073 - protein, 77 aa, Homo sapiens
  SITE (26): Xaa equals any of the naturally occurring L-amino acids
  SITE (36): Xaa equals any of the naturally occurring L-amino acids
KNEFWSICNIFLNYNVSLFPNSMTSXLLPLNCPLDXRKRKELWTHSTSLDALGTRCALEFRIFWILEEKYSLCTYIM

SEQ ID NO: 1074 - protein, 76 aa, Homo sapiens
PPNCETIHFCCLSHSVSVLYFGSLSKLIHPPIQNCPPLDNKNSNNYSVITLSDWSHCWSFFVDVSYCPIEIRSPLT

SEQ ID NO: 1075 - protein, 67 aa, Homo sapiens
  SITE (65): Xaa equals any of the naturally occurring L-amino acids
  SITE (67): Xaa equals any of the naturally occurring L-amino acids
LQVLAIFLQLLLTPVIYRLGGKGDYLWDVGHHCLLGAVITFAGLEGDVDFYNPNYPIWGIQTGEXAX

SEQ ID NO: 1076 - protein, 66 aa, Homo sapiens
  SITE (38): Xaa equals any of the naturally occurring L-amino acids
  SITE (49): Xaa equals any of the naturally occurring L-amino acids
  SITE (54): Xaa equals any of the naturally occurring L-amino acids
SFISGHLSLRHVFEVHPCCSLYLRVVPLVADLVFTVWXIPHFVYPFTSXIGHWXGPTLGFFKCGLI

SEQ ID NO: 1077 - protein, 90 aa, Homo sapiens
  SITE (22): Xaa equals any of the naturally occurring L-amino acids
RVKCQLWDKRPFQEMEFDSWFXCPLPSSVPYFPRIYLRFRCQHGDSPTLRAEGLPAAPVKFGLNRDNLGPSMQPGNGCQDLPRALVGWEC

SEQ ID NO: 1078 - protein, 55 aa, Homo sapiens
PNTLALCPAKVTHKINRHIIQPSSCIPCHLFQSSENFFPYKNPCMIVHSSFICNC

SEQ ID NO: 1079 - protein, 39 aa, Homo sapiens
LTMEQDNILHCCVTALVWLYQALFNSRLSTLPSEYFFLL

SEQ ID NO: 1080 - protein, 51 aa, Homo sapiens
  SITE (50): Xaa equals any of the naturally occurring L-amino acids
DRSNSIQPGQQSNTLSQKKKKLLGKHYDLVKERLDATFENFLDPKRKLEXS

SEQ ID NO: 1081 - protein, 112 aa, Homo sapiens
  SITE (68): Xaa equals any of the naturally occurring L-amino acids
WLQKWLDESTPTKPIDNHACLCSHDKLHPDKISIMKRISEYAADIFYSRYGGGPRLTVKALCKECVVXRCRILRLKNQLNEDYKTVNNLLKAAVKGSDGFWVGKSPCGVGAS

SEQ ID NO: 1082 - protein, 99 aa, Homo sapiens
  SITE (45): Xaa equals any of the naturally occurring L-amino acids
  SITE (90): Xaa equals any of the naturally occurring L-amino acids
  SITE (97): Xaa equals any of the naturally occurring L-amino acids
AHTVWTITRGAPARMGHRVSRLNPKMQRSPGPMWQGMGSLEPTSXSSIGEKEPSKGDSKHRRDSGRVDEVRSKGTIRRPQEKKKPRFLGXRSRLLIXDI

SEQ ID NO: 1083 - protein, 47 aa, Homo sapiens
SCILHILLILPPYLYLTQKCCMSRTSIRGTYGSLREDHIAFKNPKIL

SEQ ID NO: 1084 - protein, 176 aa, Homo sapiens
  SITE (7): Xaa equals any of the naturally occurring L-amino acids
  SITE (91): Xaa equals any of the naturally occurring L-amino acids
  SITE (92): Xaa equals any of the naturally occurring L-amino acids
PGPFGHXCSTWATSRISCAFSLASSTALVLQVFKTFDHMARQDDEKRRQELEEKIRRKEEEEAKTVSAAAAEKEPVPVPVQEIEIDSTTEXXGHQEVEKVQPPGPVKEMAHGSQEAEAPGAVAGAAEVPREPPILPRIQEQFQKNPDSYNGAVRENYTWSQDYTDLEVRCQYPSTW

SEQ ID NO: 1085 - protein, 76 aa, Homo sapiens
  SITE (17): Xaa equals any of the naturally occurring L-amino acids
  SITE (21): Xaa equals any of the naturally occurring L-amino acids
  SITE (66): Xaa equals any of the naturally occurring L-amino acids
  SITE (68): Xaa equals any of the naturally occurring L-amino acids
NHQSFDKAGSGDILITXHELXCSWELVFPCLFWKTLDIALMYDHVHRSGNRQLEQKGIFVLLWVGXEXYFTLKCIC

SEQ ID NO: 1086 - protein, 68 aa, Homo sapiens
PPVSPPHEDLPADKQQEGTCCEGYRNVGSCPGAPCQGPGETALRCLFRGRGGQPALGKCVHSHSATFP

SEQ ID NO: 1087 - protein, 74 aa, Homo sapiens
LKKRTALDFIGGFDSYGYQGPQRHLIYNYSLCTCQNNTDDFSMSAHGPFKELFSHGLLHFMKSKKQLSLNTYTY

SEQ ID NO: 1088 - protein, 67 aa, Homo sapiens
HYLINVRFIYYFIYKPSVLILWQKTLSLSNINVNHLKDICFPVINKRLVISFTFAFKGFWLYLLSTK

SEQ ID NO: 1089 - protein, 58 aa, Homo sapiens
GAQHTFVKLTVSIQSMLIVTVVMNNILIITYITHFESSVPSVDNSHLREAAMVSLIGC

SEQ ID NO: 1090 - protein, 45 aa, Homo sapiens
  SITE (32): Xaa equals any of the naturally occurring L-amino acids
ATNMRSPSTELEDGYKISSPEPVSTDSNPWLXFLLKRTSLQMKAV

SEQ ID NO: 1091 - protein, 74 aa, Homo sapiens
  SITE (50): Xaa equals any of the naturally occurring L-amino acids
  SITE (69): Xaa equals any of the naturally occurring L-amino acids
EIIPHRYVGRFICLECRRCSEGFQLWFRNHKNFELARTQERDSRFGPSVXTLPGDPVPNGEPCTRREGXMCPTT

SEQ ID NO: 1092 - protein, 71 aa, Homo sapiens
  SITE (2): Xaa equals any of the naturally occurring L-amino acids
PXVYVARRATGTLFLIGKNGTATVLSVDRIYNRDIIHPTQDFGGLDVLTISLGGIPPNQAHRDAQTGKCLY

SEQ ID NO: 1093 - protein, 78 aa, Homo sapiens
  SITE (37): Xaa equals any of the naturally occurring L-amino acids
PHDPPASASQSAGITGVSHRAWPIFVFFVDTGFCHFXQAGLELLGSSEPPASASQSAGIIGVRHCTWPFLSISKTLSS

SEQ ID NO: 1094 - protein, 74 aa, Homo sapiens
  SITE (16): Xaa equals any of the naturally occurring L-amino acids
  SITE (31): Xaa equals any of the naturally occurring L-amino acids
EAVTPPTTPQTGWLPXPGPKEPHLDQTPGKXRALVVGKPPRHADVRESKISGEAASWEPEEGQQQAARRTEFLP

SEQ ID NO: 1095 - protein, 65 aa, Homo sapiens
  SITE (8): Xaa equals any of the naturally occurring L-amino acids
  SITE (14): Xaa equals any of the naturally occurring L-amino acids
  SITE (57): Xaa equals any of the naturally occurring L-amino acids
  SITE (60): Xaa equals any of the naturally occurring L-amino acids
  SITE (62): Xaa equals any of the naturally occurring L-amino acids
GWFHLSIXKNTVFXFSSFELVSNRMRHLHHWAYELILQICIECLLYAKPCSGHEQVXNEXVXDLP

SEQ ID NO: 1096 - protein, 85 aa, Homo sapiens
  SITE (35): Xaa equals any of the naturally occurring L-amino acids
  SITE (72): Xaa equals any of the naturally occurring L-amino acids
SSEPNCYPAWSLSGEARCGASHRGIRSASQGPTHXSPFPCPHNHQLASSNPGPVAPTGLTQSIMQAFPAPGXGHHFALCPTRTAP

SEQ ID NO: 1097 - protein, 49 aa, Homo sapiens
  SITE (46): Xaa equals any of the naturally occurring L-amino acids
SGRSGFAPVIPGYLGRAQGMRNCLELREGRGLSGKAEDFHWLSLHXGGN

SEQ ID NO: 1098 - protein, 50 aa, Homo sapiens
  SITE (17): Xaa equals any of the naturally occurring L-amino acids
  SITE (28): Xaa equals any of the naturally occurring L-amino acids
  SITE (37): Xaa equals any of the naturally occurring L-amino acids
IRHRFAWHPALGASNLXGQGALSGCRSXWWAGRLPGXLAKAVASAKPPTG

SEQ ID NO: 1099 - protein, 64 aa, Homo sapiens
  SITE (21): Xaa equals any of the naturally occurring L-amino acids
ASAEFPSITRKRGLRGFHLRXYEFPVSAITNNHKPDGWKITETHSPKFLEAAGGDNRFPTSSSF

SEQ ID NO: 1100 - protein, 69 aa, Homo sapiens
YYKVMESEVLYYLCLSTYVQGQCGSNKTSKVQLIFSVCIVVITVVKLALKRMFDTTKELRLLITRIGQD

SEQ ID NO: 1101 - protein, 98 aa, Homo sapiens
KPSLLKIRVCLPTCRDPADVSSESDSAMTSSTVSKLAEARRTTYLSGRWVCDDHNGDTSISITGPWISLPNNGDYSAYYSWVEEKKTTQGPGEKQHIL

SEQ ID NO: 1102 - protein, 94 aa, Homo sapiens
  SITE (19): Xaa equals any of the naturally occurring L-amino acids
  SITE (21): Xaa equals any of the naturally occurring L-amino acids
  SITE (92): Xaa equals any of the naturally occurring L-amino acids
ARRRSNYIYVPIYYNIGEXNXKRFSLSSDELKEYALKSISLKFCLIFTEKSTYSIGKMQDCYIPSFESILKHLNLYCMVVYLGKVNFHKNRXGA

SEQ ID NO: 1103 - protein, 93 aa, Homo sapiens
  SITE (28): Xaa equals any of the naturally occurring L-amino acids
  SITE (41): Xaa equals any of the naturally occurring L-amino acids
  SITE (89): Xaa equals any of the naturally occurring L-amino acids
QQPSVSPQGWCLGPGPVPGSAGWDRKNXCLVEAEPMQLVSXMPTIHFRPAESRKKSAKGMYSCPCYYYPNRAGSSDRASFVIGIDLRFXAMTT

SEQ ID NO: 1104 - protein, 98 aa, Homo sapiens
  SITE (17): Xaa equals any of the naturally occurring L-amino acids
  SITE (90): Xaa equals any of the naturally occurring L-amino acids
  SITE (92): Xaa equals any of the naturally occurring L-amino acids
SFLKSSVPGPDHAAQGXSQASYCLTMASPGPGLAFPQPPEAQPLPHSCFPSPRYSLLPDGLDRPNSSFTLDSLGQAHTSSSLSRSKLLPXTXLYRPRC

SEQ ID NO: 1105 - protein, 56 aa, Homo sapiens
  SITE (12): Xaa equals any of the naturally occurring L-amino acids
  SITE (35): Xaa equals any of the naturally occurring L-amino acids
FCVLGCFLFCRXVLPSQKGLALGARDAVKVLPFFXRLNNHWPQGFSMALKVCPGFP

SEQ ID NO: 1106 - protein, 69 aa, Homo sapiens
  SITE (18): Xaa equals any of the naturally occurring L-amino acids
  SITE (55): Xaa equals any of the naturally occurring L-amino acids
MVKIGFLKVMVFSQSWKXCAIQFPTGRNKMIKGKIRKGKISASYRAGLLNQKCRXQVEGMLGNKARKEG

SEQ ID NO: 1107 - protein, 65 aa, Homo sapiens
PGVSLKIQSKESSPKQGEQSEAGDGNSIGECPFPGSPESEEGGASGSEGGSLLYLGTGIQAARKQ

SEQ ID NO: 1108 - protein, 41 aa, Homo sapiens
  SITE (38): Xaa equals any of the naturally occurring L-amino acids
WVQWNIFRLMLHFIDYIIKQNGSSRDHDITEIKSRPNXLII

SEQ ID NO: 1109 - protein, 147 aa, Homo sapiens
  SITE (108): Xaa equals any of the naturally occurring L-amino acids
  SITE (135): Xaa equals any of the naturally occurring L-amino acids
  SITE (142): Xaa equals any of the naturally occurring L-amino acids
NSARAATPVMGQTSVSTLSPQPGSVDGLDKASIANSDGPTAGSQTPPFKRKGKLSTIGKIFKPWKWRKKKTSDKFRRKPRAVFRKGKDIPHGQSRRRELDKEGGSAFXGFALIQDGRCYQFYLLENFPTGGHIVXPFGERGXFPPRR

SEQ ID NO: 1110 - protein, 45 aa, Homo sapiens
IRHEEIAAETAIAHTSRGSQFLAFDTCAQLLSESFHQTDLQLQCG

SEQ ID NO: 1111 - protein, 39 aa, Homo sapiens
KIISEMKPKRKEPKKELIPQRAPGQSVLVSRKGVINVCL

SEQ ID NO: 1112 - protein, 51 aa, Homo sapiens
SVTRSIWCSWCSLYNFKERTKIKLLSVVWLVNYFRADEIVVSTPIHFTNPL

SEQ ID NO: 1113 - protein, 38 aa, Homo sapiens
LSEVFMISILVFISISELLRVLKNAEETLKHDSSYNFM

SEQ ID NO: 1114 - protein, 34 aa, Homo sapiens
  SITE (7): Xaa equals any of the naturally occurring L-amino acids
  SITE (10): Xaa equals any of the naturally occurring L-amino acids
YIFELKXLFXPALFKRGKFNLLTPYLSTLPTLYL

SEQ ID NO: 1115 - protein, 83 aa, Homo sapiens
ILFFCHMSGGLSWTIVTVSPASLQLQTQEHCVGLALSTHPPSTEPAPAVLNQCSDHLEHSAHASVIELLFPVPYNVKNHLRMF

SEQ ID NO: 1116 - protein, 72 aa, Homo sapiens
HYLCVDSRSQGCIFFSLSNIMFFDNVFHVSIFVVRKLFSNDQSKFFPFFFHPLSFYMYIFKIYFSETLSHHL

SEQ ID NO: 1117 - protein, 43 aa, Homo sapiens
NFFLICHVNLFKCVKFLLHLITFTMLCNHHHYLFPHFSIIPNR

SEQ ID NO: 1118 - protein, 86 aa, Homo sapiens
  SITE (4): Xaa equals any of the naturally occurring L-amino acids
  SITE (48): Xaa equals any of the naturally occurring L-amino acids
RRLXVVQTPQVNRQEGCKEICHPQPLHREPQPRPDLSVGTKLAADQIXRPGFLSRTTGVLLPLAPLPIFPLPNSPPVGCNRMSAGL

SEQ ID NO: 1119 - protein, 56 aa, Homo sapiens
FSEGRSPRKRLGSGFLFCFYFRVFPVREGRGACAELNWGGEVPCKVWFPEMVRPRS

SEQ ID NO: 1120 - protein, 70 aa, Homo sapiens
NGCSGCSFWLVLRGANSSTPFGKHLAMAAKTLVFFIASNLLRSRYLFPFCCCANRLVEVKYLVQGYIDGD

SEQ ID NO: 1121 - protein, 43 aa, Homo sapiens
  SITE (22): Xaa equals any of the naturally occurring L-amino acids
KLPGRALVDCMYYVSIVIVLVXLYLCNAFCVYLSYRLTTYTSP

SEQ ID NO: 1122 - protein, 33 aa, Homo sapiens
GPQGRMRLHPESMIFSGSCFIYTPFPTPELLLD

SEQ ID NO: 1123 - protein, 80 aa, Homo sapiens
  SITE (62): Xaa equals any of the naturally occurring L-amino acids
  SITE (64): Xaa equals any of the naturally occurring L-amino acids
  SITE (67): Xaa equals any of the naturally occurring L-amino acids
  SITE (79): Xaa equals any of the naturally occurring L-amino acids
VLPILELHVIGNHTICILCFCFFHLSVFNIHPCLSILLVAHCFLLLCSIPLHKYTTLFIHYXLXDFXAISILWLLCIKXL

SEQ ID NO: 1124 - protein, 65 aa, Homo sapiens
  SITE (6): Xaa equals any of the naturally occurring L-amino acids
PLLDAXHRNKRMRNLLFFLIPLKWLTIYQHGDHTVSPLLNNFSRFSETMTLSKTMYNAIIFSPQS

SEQ ID NO: 1125 - protein, 65 aa, Homo sapiens
  SITE (9): Xaa equals any of the naturally occurring L-amino acids
  SITE (10): Xaa equals any of the naturally occurring L-amino acids
  SITE (18): Xaa equals any of the naturally occurring L-amino acids
  SITE (34): Xaa equals any of the naturally occurring L-amino acids
  SITE (48): Xaa equals any of the naturally occurring L-amino acids
PVRGNALNXXHERLGWQXLLSATQKLPGWCPGQXLAPIVLVSLQDCGXNAVTAGSDLRCARARLP

SEQ ID NO: 1126 - protein, 53 aa, Homo sapiens
  SITE (22): Xaa equals any of the naturally occurring L-amino acids
  SITE (31): Xaa equals any of the naturally occurring L-amino acids
  SITE (45): Xaa equals any of the naturally occurring L-amino acids
NMSFCNLSRSLPGCKGLCSLPXREARRVRTXLSFEQMGGFWGIQXASLELFLG

SEQ ID NO: 1127 - protein, 57 aa, Homo sapiens
GLKHTRGQKAAPTREPSFRARDCILGAGSCLNLPAGYDYPLSWGRKKSIPVLYLCLG

SEQ ID NO: 1128 - protein, 78 aa, Homo sapiens
  SITE (67): Xaa equals any of the naturally occurring L-amino acids
  SITE (78): Xaa equals any of the naturally occurring L-amino acids
IMGCWCELLKSSNSIIQRDLKVVLSSASHVVYQYATTYGWATAEWRVSLKSLTPFSSDVPCVQLTRXIMMMCDFCFTX

SEQ ID NO: 1129 - protein, 139 aa, Homo sapiens
  SITE (4): Xaa equals any of the naturally occurring L-amino acids
  SITE (55): Xaa equals any of the naturally occurring L-amino acids
  SITE (109): Xaa equals any of the naturally occurring L-amino acids
  SITE (134): Xaa equals any of the naturally occurring L-amino acids
VLPXLELVDPPGCRNSARERILPSKQVTLLAHLTKCPVPPPAGLCHRTPPPRTPXRLPCTLCEVPTPSRARMHSKARTTHSRCMQHLLTSSTTPRWVQPNGMPATVYPXSHPPSFGNLIFYSKYFLLIFFFKSXFYKEV

SEQ ID NO: 1130 - protein, 57 aa, Homo sapiens
LSPCKLSWPFSLFMLHNFHKMLYTCYRHWSLRSYSLVNLFLPLNSMWGYLTLLSVQR

SEQ ID NO: 1131 - protein, 93 aa, Homo sapiens
  SITE (65): Xaa equals any of the naturally occurring L-amino acids
  SITE (67): Xaa equals any of the naturally occurring L-amino acids
LIICRDGLPVLPSLENVCSKNSTAPRCLQHEATGGSMAGSSHPSTHQFLQAFLFFPSPQEAARRXLXSGFFKSSGSSSSSESMRSWESVQSNE

SEQ ID NO: 1132 - protein, 60 aa, Homo sapiens
FLYYGMVKLKDSHFLTYWGYFVAVFLPFSSSRQDYHMVPLHSSLGDRARLPLKKKKKKLE

SEQ ID NO: 1133 - protein, 74 aa, Homo sapiens
ANPFVRRTLKFFALLHSSDLLGSMPSLTSFKVRCKVSQKAPRELTSKGETKSDSVHYLLFKTSPLPRAALAQKL

SEQ ID NO: 1134 - protein, 64 aa, Homo sapiens
  SITE (5): Xaa equals any of the naturally occurring L-amino acids
  SITE (35): Xaa equals any of the naturally occurring L-amino acids
  SITE (48): Xaa equals any of the naturally occurring L-amino acids
  SITE (59): Xaa equals any of the naturally occurring L-amino acids
KPWRXWERPASIFPFNKPPVMGYGQHAGLLGRFPXSSITLSLHTSKFXFKAVQVSYQQXALTCL

SEQ ID NO: 1135 - protein, 129 aa, Homo sapiens
  SITE (7): Xaa equals any of the naturally occurring L-amino acids
  SITE (16): Xaa equals any of the naturally occurring L-amino acids
  SITE (21): Xaa equals any of the naturally occurring L-amino acids
  SITE (47): Xaa equals any of the naturally occurring L-amino acids
GPGPGLXLTLFLPSSXECNPXAGGLCGFCQCIPQGLSLPCSPTSGQXSFLPETLMALLLCGPMRHLCWSAHLYPGIAPMFLLSEGHLIAPTSSFSIGPQCNLHELSKLFLVSQSPLPFIKDPEQVGEHL

SEQ ID NO: 1136 - protein, 63 aa, Homo sapiens
  SITE (44): Xaa equals any of the naturally occurring L-amino acids
VSPPGMSPRCPPPCPCLGFPSPTHLRQFKKGKNKNPEVLPNPRXLLPQRGQKSPTCHQMLNET

SEQ ID NO: 1137 - protein, 47 aa, Homo sapiens
  SITE (29): Xaa equals any of the naturally occurring L-amino acids
DQPRQHRETLSLQKNLAGHGGILWSQLLXRLRWEDCLGQEVEAAVTA

SEQ ID NO: 1138 - protein, 118 aa, Homo sapiens
  SITE (43): Xaa equals any of the naturally occurring L-amino acids
GTPRIHDFDAHVPQFCSAIGSGRHHEWQPHHCPDKHTLTLGPXWWRPEHTGLELCFHKNLNGLPQKGTEELPENWQKGKHPDYSSGLKGTSPQTSMRCPQIHRKDSNQYKEMLNFPHG

SEQ ID NO: 1139 - protein, 109 aa, Homo sapiens
  SITE (99): Xaa equals any of the naturally occurring L-amino acids
  SITE (105): Xaa equals any of the naturally occurring L-amino acids
KNQKPMLCHSTFYQNEDYNERPKIIVGSEKEKGEEKENQVYVLSEGKKQQEHQPYSVNVAESMSRESDISLGHSLGETQSFSLVKATSVTEKSEAMLAXAHPEIXEQRQ

SEQ ID NO: 1140 - protein, 94 aa, Homo sapiens
  SITE (32): Xaa equals any of the naturally occurring L-amino acids
SNPPKSSSLSLASSASTISSLSSLSPKKPTRXVNKIHAFGKRGNALRRDPNLPVHIRGWLHKQDSSGLRLWKRRWFVLSGHCLFYYKDSRERVS

SEQ ID NO: 1141 - protein, 62 aa, Homo sapiens
KEANTKTEVWGQETGRPKQPGQEPERPVILTKQASHPVIHSFDAYLKACCKQAPCQLLQARW

SEQ ID NO: 1142 - protein, 68 aa, Homo sapiens
ELSPLNIFSFVIFQAYCAELLTYRTTVRIGQTSFCGYAVPTKALSPLKLKKKESRKPGRYFSKNLFSV

SEQ ID NO: 1143 - protein, 44 aa, Homo sapiens
AVYITDSNEKNIDLYTRMTSMPGKNAEMGVQIKATSTLLPNSFF

SEQ ID NO: 1144 - protein, 27 aa, Homo sapiens
SFYFEKVVTCREEKILINVNNPLQMAE

SEQ ID NO: 1145 - protein, 46 aa, Homo sapiens
IYPEEGPSIQIDRSIIYVNFILIKSSFLFKNPCFTVTYEKNTCIDI

SEQ ID NO: 1146 - protein, 61 aa, Homo sapiens
VPICDFFWAYLHQKSQSLPPCLLLLHETLHEAEHDCQVTRGMDICKWNVGILHTWLLLHTT

SEQ ID NO: 1147 - protein, 56 aa, Homo sapiens
KWRQEFKLVYGSEPLSDPVPMFQCCFVFLLTKGIFAYVKIGIGQLGLHKGLHIFLK

SEQ ID NO: 1148 - protein, 53 aa, Homo sapiens
KSLKWNIVLRSNSPPSQKWPRCNKNCGILKKKKKKKKKKKKKKKKKKKKKKKK

SEQ ID NO: 1149 - protein, 82 aa, Homo sapiens
  SITE (46): Xaa equals any of the naturally occurring L-amino acids
  SITE (58): Xaa equals any of the naturally occurring L-amino acids
NITSIWHEAKHYKFGVMKVFHIFFIVIFRSRDPSYCLLTITITLRXNQRKHFCHFQMXKQDQKALHKALTPYKYPAVINCSL

SEQ ID NO: 1150 - protein, 52 aa, Homo sapiens
  SITE (22): Xaa equals any of the naturally occurring L-amino acids
  SITE (42): Xaa equals any of the naturally occurring L-amino acids
  SITE (48): Xaa equals any of the naturally occurring L-amino acids
VDTPLIIEANKNFKKMFEAGCXGPRPVNPNTLGRPKRLGPLXVQEFQXQPGP

SEQ ID NO: 1151 - protein, 75 aa, Homo sapiens
SFQTFFQIKVFKTIHFPLNTALVASYKVLKDFFSLFFDMESHSVTQTRVQWCNLCSLQPLPPGFKRFSCLSLPSS

SEQ ID NO: 1152 - protein, 57 aa, Homo sapiens
NCNYHSFLSFVAGTLMSSNVSLQIQSALSIHGLHSCEFNQPWIQNIWEIRWGCGSHL

SEQ ID NO: 1153 - protein, 110 aa, Homo sapiens
  SITE (97): Xaa equals any of the naturally occurring L-amino acids
  SITE (100): Xaa equals any of the naturally occurring L-amino acids
  SITE (107): Xaa equals any of the naturally occurring L-amino acids
HEPTSLPLSEINSSDMSAHVTSPSGRVTEAEIVPMGKNSHCVRFVPQEMGVHTVSVKYRGQHVTGSPFQFTVGPLGEGGAHKVRAGGPGLERREAGXPSXHCGQDFXWGD

SEQ ID NO: 1154 - protein, 154 aa, Homo sapiens
QKHQHICNAKDIGLKCKSTNESVRESTFYFNNNIIIKIINLFNFYILCTRQWICNFGLRSFNVPKLEQGVHCFAIDFIMPLWGRDLASSQFKKPRFLSNPKGRCCTVHSFAPLANLSFMDSVTCLYSPMYIFCKYQTLLIPMPKYMSIMGLLPV

SEQ ID NO: 1155 - protein, 46 aa, Homo sapiens
NRERKSKPRHPASFFRSALGAGLCFSPAGEDIPELTRIAGRRGWRA

SEQ ID NO: 1156 - protein, 73 aa, Homo sapiens
VAGTIDMRHHTGLIFIFLEEMGFCHVGQAGLELLTSGDPPTSVSQSAGITGNNFMSPLPYLWANLVYSLLTWL

SEQ ID NO: 1157 - protein, 45 aa, Homo sapiens
  SITE (31): Xaa equals any of the naturally occurring L-amino acids
INHICLTCLFHSSLAHLGYLRSWVGGSGNWXHILFNYFKALTVLD

SEQ ID NO: 1158 - protein, 132 aa, Homo sapiens
  SITE (2): Xaa equals any of the naturally occurring L-amino acids
  SITE (21): Xaa equals any of the naturally occurring L-amino acids
IXPFLALKHPLEGFVIGPCAXRMLSLLMSSSHRLGSLITSTTPTPPGEYNVIRSGVGLTGSRQTMFYTEVTDAQRSGPGGGLVEEGELIEVVHLPLEGAQAFADDPDIPKTLGVIFGVSWFLSQVAPNLDLQ

SEQ ID NO: 1159 - protein, 37 aa, Homo sapiens
  SITE (34): Xaa equals any of the naturally occurring L-amino acids
GGHSFYFEGRSLPSLLKSIVRSSFLNPGCIIFYXLQA

SEQ ID NO: 1160 - protein, 61 aa, Homo sapiens
  SITE (47): Xaa equals any of the naturally occurring L-amino acids
RYRAAGVCAYGGRERDGNGGSGDDDVLIVVKQNFGYFHFSSLEKRIXFLSLKQIATTQIMK

SEQ ID NO: 1161 - protein, 118 aa, Homo sapiens
  SITE (118): Xaa equals any of the naturally occurring L-amino acids
HRADSNQDSKMSFKEIKSLLRMVNVDMNDMYAYLLFKECDHSNNDRLEGAEIEEFLRRLLKRPELEEIFHQYSGEDRVLSAPELLEFLEDQGEEGATLARAQQLIQTYELNETAKQHX

SEQ ID NO: 1162 - protein, 93 aa, Homo sapiens
  SITE (29): Xaa equals any of the naturally occurring L-amino acids
  SITE (53): Xaa equals any of the naturally occurring L-amino acids
  SITE (67): Xaa equals any of the naturally occurring L-amino acids
  SITE (80): Xaa equals any of the naturally occurring L-amino acids
  SITE (81): Xaa equals any of the naturally occurring L-amino acids
  SITE (82): Xaa equals any of the naturally occurring L-amino acids
  SITE (90): Xaa equals any of the naturally occurring L-amino acids
SYIPLYITYPFSLRFIHWEFTHAISVEYXVDTEPRRVNIWRILVFLTHMCDFXRIFSDHRKLFIPLXLPVTVYHRPFQMXXXVIRCTFIXKNK

SEQ ID NO: 1163 - protein, 47 aa, Homo sapiens
LKEAFFRFLSIFCIFSEMFSLAVLCPAVSDRILRELVKNTYCVSLLV

SEQ ID NO: 1164 - protein, 27 aa, Homo sapiens
HHMKLIMYNCTTGYTHKYYCIKYLVAI

SEQ ID NO: 1165 - protein, 117 aa, Homo sapiens
  SITE (76): Xaa equals any of the naturally occurring L-amino acids
  SITE (104): Xaa equals any of the naturally occurring L-amino acids
GRAHSLLVTSMGHIKLTDFGLSKVGLMSMTTNLYEGHIEKDAREFLDKQVCGTPEYIAPEVILRQGYGKPVDWWAXGIILYEFLVGCVPFFGDTPEGYLDKSSXMRSTGLRRMRHPT

SEQ ID NO: 1166 - protein, 47 aa, Homo sapiens
VNIPRHQGLQQKKSLIIVGQLDKKKPQIYLPKRFEGRGFKGSGWVIG

SEQ ID NO: 1167 - protein, 49 aa, Homo sapiens
  SITE (4): Xaa equals any of the naturally occurring L-amino acids
FRHXGGGICDKGCLLEINSFIGKIHHTFPLKSDIGYRYLYTLFLKVLVC

SEQ ID NO: 1168 - protein, 111 aa, Homo sapiens
  SITE (110): Xaa equals any of the naturally occurring L-amino acids
IPFRSSGRRMIQSDKGADPPDKKDMKLSTATNPQNGLSQILRLVLQELSLFYSRDVNGVCLLYDLLHSPWLQALLKIYDCLQEFKEKKLVPATPHAQVLSYEVVELLREXP

SEQ ID NO: 1169 - protein, 71 aa, Homo sapiens
  SITE (31): Xaa equals any of the naturally occurring L-amino acids
  SITE (51): Xaa equals any of the naturally occurring L-amino acids
  SITE (58): Xaa equals any of the naturally occurring L-amino acids
  SITE (69): Xaa equals any of the naturally occurring L-amino acids
KHKKISWTWWRAPVVPATRETEAREYVNPGXRSCMSQDRTTAIQPGPQNEXPFKKKRXKKNSGGARTHXPI

SEQ ID NO: 1170 - protein, 78 aa, Homo sapiens
  SITE (23): Xaa equals any of the naturally occurring L-amino acids
EGMIALRFSLREGMSVTARGRRXRPAASVQLKLLQQNPLNLHTQNTNFSTPHTCREDSAPDLESPAFGPSSITRGALV

SEQ ID NO: 1171 - protein, 58 aa, Homo sapiens
TRYDYPFLWIRKLMFRNLSNLLNDIYLATGRTRIQILCLIIVNKIHQITIQNPACERI

SEQ ID NO: 1172 - protein, 136 aa, Homo sapiens
  SITE (70): Xaa equals any of the naturally occurring L-amino acids
HEQQRHGGAESPAPSGPAGLRQRRRRRPAPGEVAGAVRADLRVKRDEGKETKPQTQLETPASQKKHQISXKKKMGPPSLVLCLLSATVFSLLGGSSAFLSHHRLKGRFQRDRRNIRPNIILVLTGRPRMWSWVPCR

SEQ ID NO: 1173 - protein, 254 aa, Homo sapiens
FLSESGIETMWKTLHQLAIPPRLYQICGWFIPWLAIASVVVLTVGWIWGFGFAPADYQQGNSYRIIYLHVPAAIWSMGIYASMAVAAFIGLVWQMKMANLAVAAMAPIGAVFTFIALVTGSAWGKPMWGTWWVWDARLTSELVLLFLYVGVIALWHAFDDRRLAGRAAGILVLIGVVNLPIIHYSVEWWNTLHQGSTRMQQSIDPAMRSPLRWSIFGFLLLSATLTLMRMRNLILLMEKRRPWVSELILKRGRK

SEQ ID NO: 1174 - protein, 47 aa, Homo sapiens
  SITE (21): Xaa equals any of the naturally occurring L-amino acids
  SITE (29): Xaa equals any of the naturally occurring L-amino acids
  SITE (31): Xaa equals any of the naturally occurring L-amino acids
FTSRVKNSQARWLMPVNPSTXGRPGVGGXTXGPGDRRPAGPAWVETP

SEQ ID NO: 1175 - protein, 105 aa, Homo sapiens
  SITE (1): Xaa equals any of the naturally occurring L-amino acids
  SITE (2): Xaa equals any of the naturally occurring L-amino acids
  SITE (77): Xaa equals any of the naturally occurring L-amino acids
  SITE (84): Xaa equals any of the naturally occurring L-amino acids
XXKHLYSEKRLQAPQVLHRAERPACGTYPGTQGPSGGQHPRQPAWLHPQGEEAVDSADARSHPDHEPPGAAFPGPAXVHGWGWXMEKSAFIVTRPCSMSSTPRMQ

SEQ ID NO: 1176 - protein, 220 aa, Homo sapiens
  SITE (1): Xaa equals any of the naturally occurring L-amino acids
  SITE (207): Xaa equals any of the naturally occurring L-amino acids
XSSSPLNVVMVARGDLGVEIGDPELVGIQKALIRRARQLNRAVITATQMMESMITNPMPTRAEVMDVANAVLDGTDAVMLSAETAAGQYPSETVAAMARVCLGAEKIPSINVSKHRLDVQFDNVEEAIAMSAMYAANHLKGVTAIITMTESGRTALMTSRISSGLPIFAMSRHERTLNLTALYRGVTPVHFDSVNDGVAAARGIHYXRAAATAWSPLFYF

SEQ ID NO: 1177 - protein, 84 aa, Homo sapiens
  SITE (8): Xaa equals any of the naturally occurring L-amino acids
WRWLCREXQEGRESGWTLRGRVERGAPKADLPRKLEKPGKTDPSRRTREEENIWKIRSDSCQGPPRPQEGSTAGFAFDWAPGTP

SEQ ID NO: 1178 - protein, 50 aa, Homo sapiens
RNTMGCNNTLKTGMSEGLSSLGVLHLSFASTVFCEIYSSDALPYRSPYKM

SEQ ID NO: 1179 - protein, 50 aa, Homo sapiens
TLICIDSYFWNIFLLIKSLRNIVKMYLTEESNLQKTVHCQKQYTHCLTNT

SEQ ID NO: 1180 - protein, 124 aa, Homo sapiens
TLRIYNQVMILTDPEWQAVLLSLKVSSLAVLFSLPFGIFFAWLLVRCTFPGKALLDSVLHLPLVLPPVVVGYLLLVSMGRRGFIGERLYDWFGITFAFSWRGAVLAAAVMSFPLMVRAIRLALE

SEQ ID NO: 1181 - protein, 63 aa, Homo sapiens
  SITE (33): Xaa equals any of the naturally occurring L-amino acids
  SITE (46): Xaa equals any of the naturally occurring L-amino acids
GCISSQVRKMRSGVKRCYRRLFATKSCCCACPXALGPKEATLQPHXSSWLGFVSTDGLFTHMV

SEQ ID NO: 1182 - protein, 78 aa, Homo sapiens
  SITE (74): Xaa equals any of the naturally occurring L-amino acids
SSYLSLLSSWDYRHALPCLASFCIFCRGGLLPCHPGWSRTPVLKGSAYLDLLKCWDNRHGQPCLAKIHFLKNIXETDT

SEQ ID NO: 1183 - protein, 109 aa, Homo sapiens
  SITE (95): Xaa equals any of the naturally occurring L-amino acids
FLFLFFLRWSLSPRLECSGKIWAHCNLPPWFRRFSCLSLPSELGLQACASHHTRLNFVFLVETGFHHVGQASLHLLTSWIRPPRTSQGAEVAGAXNGARRQRGFLKGVG

SEQ ID NO: 1184 - protein, 64 aa, Homo sapiens
  SITE (10): Xaa equals any of the naturally occurring L-amino acids
  SITE (19): Xaa equals any of the naturally occurring L-amino acids
  SITE (33): Xaa equals any of the naturally occurring L-amino acids
TRPRKDRTEXISSTVVNLXGHLVGFLSFKLGEXKGLGPLAALTAGKGLFFLPLESAIQERIRMI

SEQ ID NO: 1185 - protein, 155 aa, Homo sapiens
  SITE (97): Xaa equals any of the naturally occurring L-amino acids
  SITE (106): Xaa equals any of the naturally occurring L-amino acids
  SITE (132): Xaa equals any of the naturally occurring L-amino acids
HEQEMQEASDHLKKQFETESEVKCNFRQEASRLTLENRDLEEELDMKDRVIKKLQDQVKTLSKTIGKANDVHSSSGPKEYLGMLQYKREDEAKLIQXLILGSEPGXLGFCFSLRTCISVSAKVLGRGGPFSXFSSTASSPSPEFLNLSTVDLLTL

SEQ ID NO: 1186 - protein, 137 aa, Homo sapiens
  SITE (11): Xaa equals any of the naturally occurring L-amino acids
  SITE (36): Xaa equals any of the naturally occurring L-amino acids
  SITE (38): Xaa equals any of the naturally occurring L-amino acids
  SITE (39): Xaa equals any of the naturally occurring L-amino acids
  SITE (43): Xaa equals any of the naturally occurring L-amino acids
RLAGLRCFGRXCPSRHRRVGSSGTQPGARFLPGSAXKXXRPRXPSCYFAQRRCFGFPAKWETFLPVCRRPWETLIFSTAKVKRFWNRSVEGDQVNLLQLLGCRQSPFRGGRLRLSIFTEVQEWEEPTFAVFLQCGFA

SEQ ID NO: 1187 - protein, 41 aa, Homo sapiens
GTRKNQAGWVWWLMPVISAFGEAKAGGSLEVRSLRPAWPTW

SEQ ID NO: 1188 - protein, 40 aa, Homo sapiens
PGAHGLAHFMVRDGTDMRKIPFPSPTLSLMALCSGHTNDG

SEQ ID NO: 1189 - protein, 79 aa, Homo sapiens
PLFSLPFLPRNMCTYKHIHMSTLCLANHLFSQITIVVFDKAGYRPPDPKLVAPKLENLLCLEENTCKLTRNPYCQCTMN

SEQ ID NO: 1190 - protein, 37 aa, Homo sapiens
HIKRFGYGWLRTINNIIKVKLCQSVHINLFKSMKILM

SEQ ID NO: 1191 - protein, 103 aa, Homo sapiens
  SITE (2): Xaa equals any of the naturally occurring L-amino acids
  SITE (14): Xaa equals any of the naturally occurring L-amino acids
  SITE (96): Xaa equals any of the naturally occurring L-amino acids
EXARAEMPTVTVQXEEGSKRDGARILEEVRRKSEFYYYFFWRRTLTLLTRLQYSGVISAHCSLRLWCSSDSASASRVAEITGMCHHTWLIFVFLVXTGFHHVV

SEQ ID NO: 1192 - protein, 132 aa, Homo sapiens
  SITE (62): Xaa equals any of the naturally occurring L-amino acids
  SITE (108): Xaa equals any of the naturally occurring L-amino acids
  SITE (121): Xaa equals any of the naturally occurring L-amino acids
  SITE (129): Xaa equals any of the naturally occurring L-amino acids
LGSLELDTPSQPVNNHHAHSHTPVEKRKYNPTSHHTTTDHIPEKKFKSEALLSTLTSDASKXNTLGCRNNNSTASSNNAYNVNSSQPLGSFTLARYLQELVQGHYLAXAQAVQVQFSWRRXEDLKFKGXLEL

SEQ ID NO: 1193 - protein, 50 aa, Homo sapiens
  SITE (38): Xaa equals any of the naturally occurring L-amino acids
ASCHELYGCKEISFVNNHVILEEASEPQIKAQPQPTPXLQLCETLSRGPS

SEQ ID NO: 1194 - protein, 51 aa, Homo sapiens
  SITE (49): Xaa equals any of the naturally occurring L-amino acids
QEAYLHTITTVNRSKVKHKKYLGFSLLFNPYYWILLSRLTVFQGQEKRXFR

SEQ ID NO: 1195 - protein, 63 aa, Homo sapiens
  SITE (11): Xaa equals any of the naturally occurring L-amino acids
LLAVNVIAGQXAVKRPVEKNLPSQQWNGVSGSPLLVENASQLHCRKGISQLANPKWAYCHKVF

SEQ ID NO: 1196 - protein, 41 aa, Homo sapiens
SWKKVVPKPKFKIKLCNIIFELTTRLDLEKVNIFSPLSLFF

SEQ ID NO: 1197 - protein, 65 aa, Homo sapiens
RDSHQILGLTRLLTWALREMIYTSLESEVNVQEVIEALLFSDQKYLVHLFRQEEFYHQVFPYKTK

SEQ ID NO: 1198 - protein, 98 aa, Homo sapiens
  SITE (26): Xaa equals any of the naturally occurring L-amino acids
GRASPWDQITALGSGMGPLCFDLCMXWGEKFPPAPDCNDCNGWNCHLFSLIGSSSPGGSGLVGGQGRGGHQPECIFFQFHFLRKNLLLKEERDRIRPK

SEQ ID NO: 1199 - protein, 75 aa, Homo sapiens
  SITE (26): Xaa equals any of the naturally occurring L-amino acids
  SITE (75): Xaa equals any of the naturally occurring L-amino acids
FFWFSHFYWEPWEGIITLGTGAEESXVWDSDRGKLVLASGGIAGSAAGDSKLSPPLTPSGGTPGTVCKTVAGCIX

SEQ ID NO: 1200 - protein, 88 aa, Homo sapiens
  SITE (28): Xaa equals any of the naturally occurring L-amino acids
SLISSSPPRCDILSAFYLLGTSALLFLXTVGHLLEFEGKLFDVNTFQFFFQFTWERGMKGRGGFGLVNFCFVFVLGECRTICGLSEVF

SEQ ID NO: 1201 - protein, 36 aa, Homo sapiens
CLCTVKLESHLAKENQKEVCILGIYTILSLRYLSSP

SEQ ID NO: 1202 - protein, 76 aa, Homo sapiens
  SITE (28): Xaa equals any of the naturally occurring L-amino acids
  SITE (60): Xaa equals any of the naturally occurring L-amino acids
PALCPWLVLMPKIEKVLASFSLVHFPGXARQQVFFCFVCLFVCLFLRWRWVQAGQIVPGXGGGGFASRKGLEGMRK

SEQ ID NO: 1203 - protein, 83 aa, Homo sapiens
  SITE (1): Xaa equals any of the naturally occurring L-amino acids
  SITE (6): Xaa equals any of the naturally occurring L-amino acids
  SITE (64): Xaa equals any of the naturally occurring L-amino acids
XDIRNXLPTIGFTLIICEFQVFQSPPGMMLFQVVSSYMCMCVCTRACTHSCTVCVYMYTYMYVXCVYRERAESYSIYSFSLLI

SEQ ID NO: 1204 - protein, 51 aa, Homo sapiens
  SITE (20): Xaa equals any of the naturally occurring L-amino acids
  SITE (40): Xaa equals any of the naturally occurring L-amino acids
SLGQINSLGLMNLWVHNCDXIQQTLRQTALVSNICYPILXRPVPTSSAPLK

SEQ ID NO: 1205 - protein, 54 aa, Homo sapiens
  SITE (48): Xaa equals any of the naturally occurring L-amino acids
PWNNPLPGPPCRSNNIPLPAAPAILMIKWYRTLFSKLSHSDAPYFISXMSANAL

SEQ ID NO: 1206 - protein, 98 aa, Homo sapiens
  SITE (63): Xaa equals any of the naturally occurring L-amino acids
  SITE (68): Xaa equals any of the naturally occurring L-amino acids
SYPGPWETHVAWGPLLPWSLSSHLSRPQSLSSLVLSVLLGLSPCDVGMACLCRSLPKLTDVSXRDHQXPSRMTVLSFKVQRLPFQVWPISHILMALLA

SEQ ID NO: 1207 - protein, 74 aa, Homo sapiens
ILTDWNGESSFTKKRHNPILSCRKISDKVWMREKCTRPVFVMGTQCDHQFNVGASIVVSWGSAVCLQNGQVVAC

SEQ ID NO: 1208 - protein, 103 aa, Homo sapiens
  SITE (20): Xaa equals any of the naturally occurring L-amino acids
  SITE (46): Xaa equals any of the naturally occurring L-amino acids
  SITE (72): Xaa equals any of the naturally occurring L-amino acids
  SITE (91): Xaa equals any of the naturally occurring L-amino acids
  SITE (98): Xaa equals any of the naturally occurring L-amino acids
WAASRTPCVSSPTSSRCTTXCVASSKAPEPGLPKSSPRKRPGVRLXFPSQDAPRSLAVWCERAVCLWHVTDXPSSPAVLLIKSTAELWSDXTDTAKAXRKRKN

SEQ ID NO: 1209 - protein, 65 aa, Homo sapiens
  SITE (6): Xaa equals any of the naturally occurring L-amino acids
QVMTNXLLSILSFNLKRVHCKDPSARGGGRRGRPAVERAVVVENRGLCCRNSREAFFFPVGLTRE

SEQ ID NO: 1210 - protein, 116 aa, Homo sapiens
  SITE (109): Xaa equals any of the naturally occurring L-amino acids
  SITE (113): Xaa equals any of the naturally occurring L-amino acids
SRQARETQCQNYKVRSAARPSYLLASRNTTRPVREERVESRECFPHSADKERPLSHLLLQLWRQSSPTCHIEHKDQSAEKEHPNLIQWTWGKNSPQLSVGKKQGPTHTXLAQXHLP

SEQ ID NO: 1211 - protein, 59 aa, Homo sapiens
  SITE (36): Xaa equals any of the naturally occurring L-amino acids
  SITE (46): Xaa equals any of the naturally occurring L-amino acids
  SITE (57): Xaa equals any of the naturally occurring L-amino acids
PPNSWPLIRALTSSGWLTSDQKHRTGCFWCLGIGRXGAGGQGACHXLALDIEACRTXRV

SEQ ID NO: 1212 - protein, 151 aa, Homo sapiens
  SITE (4): Xaa equals any of the naturally occurring L-amino acids
  SITE (5): Xaa equals any of the naturally occurring L-amino acids
  SITE (146): Xaa equals any of the naturally occurring L-amino acids
EFGXXHTPVSRSSSIIQHVGLPLAPGTHSAPTSLPQSDLSQFQTQTQPLVGQVDDTRRKSEPLPQPPLSLIAENKPVVKPPVADSLANPLQLTPMNSLATSVFSIAIPVDGDEDRNPSTAFYQAFHLNTLKESKSSGIVHLGEVLXPLTTK

SEQ ID NO: 1213 - protein, 105 aa, Homo sapiens
  SITE (18): Xaa equals any of the naturally occurring L-amino acids
  SITE (46): Xaa equals any of the naturally occurring L-amino acids
ATSRNAPLSSKASYPQGXFHSRGQAKPLCLCLGLRPPAQPPRFPSXSPCQSNLVPNAAVKFSGTHLLLPLKNQLQSVMSSLGSHQEQRNRSKDPHSREHPAPYPE

SEQ ID NO: 1214 - protein, 96 aa, Homo sapiens
  SITE (95): Xaa equals any of the naturally occurring L-amino acids
GFLAGEAAPPELDSSLALRCEVEQLEGQTPHLTTVLWTKGRMSMPLIQKPEGTHSPLRPSPTQQSQEGPGWKLGQRGPELAQIPTDHSLKKKSKXP

SEQ ID NO: 1215 - protein, 58 aa, Homo sapiens
  SITE (18): Xaa equals any of the naturally occurring L-amino acids
IAPSAHGSDTHQWGRAHXTAWISSLLLLLHLSTLFLLPSLPTLTSFLYLVIFKIQKTI

SEQ ID NO: 1216 - protein, 63 aa, Homo sapiens
  SITE (11): Xaa equals any of the naturally occurring L-amino acids
  SITE (25): Xaa equals any of the naturally occurring L-amino acids
  SITE (33): Xaa equals any of the naturally occurring L-amino acids
  SITE (60): Xaa equals any of the naturally occurring L-amino acids
DKCFLAKHIVXHKGSVLWQNMMPRXITGRKGGXSLGSRSQGGCTLGGGQEMLSDLSSKGXSSE

SEQ ID NO: 1217 - protein, 66 aa, Homo sapiens
  SITE (3): Xaa equals any of the naturally occurring L-amino acids
  SITE (24): Xaa equals any of the naturally occurring L-amino acids
  SITE (27): Xaa equals any of the naturally occurring L-amino acids
  SITE (36): Xaa equals any of the naturally occurring L-amino acids
  SITE (41): Xaa equals any of the naturally occurring L-amino acids
  SITE (52): Xaa equals any of the naturally occurring L-amino acids
RVXHNPITPQNMPYMQNLNSSCLXDSXGHFLPQLGXLFCQXSFWSLLISNLXKATPGLQTKQISTH

SEQ ID NO: 1218 - protein, 75 aa, Homo sapiens
  SITE (17): Xaa equals any of the naturally occurring L-amino acids
  SITE (32): Xaa equals any of the naturally occurring L-amino acids
  SITE (43): Xaa equals any of the naturally occurring L-amino acids
  SITE (50): Xaa equals any of the naturally occurring L-amino acids
  SITE (74): Xaa equals any of the naturally occurring L-amino acids
TMIPRALPCEESPFPAXHHFHLGEWSRGRRTXFFADRTVKSFXWEDKGRXFTCAGTWAFLHGPRRTWEGHHLKXE

SEQ ID NO: 1219 - protein, 52 aa, Homo sapiens
ETCQTSSSRPTCIVETLGEEREKGAERLFEEIMAKNFLDLMKDRNINIQEVQ

SEQ ID NO: 1220 - protein, 100 aa, Homo sapiens
IMKAFLGKSEMDYPKEARTWEDMRELLSHEFSFYPVCRTSQVSSNGNQPRLFLPAPALSNSPTLWLSPSLLWKHHWTPIELCADSLFVDMVPDGHQATYS

SEQ ID NO: 1221 - protein, 112 aa, Homo sapiens; identical to SEQ ID NO: 684

SEQ ID NO: 1222 - protein, 69 aa, Homo sapiens
QSKTLSKKKKKKKRKRSRRKRKRKKEEEEGDLKQTTLEVVWSRTSAGQRLYSLELEQVGGCIVWKQRNW

SEQ ID NO: 1223 - protein, 64 aa, Homo sapiens
  SITE (25): Xaa equals any of the naturally occurring L-amino acids
GFAHLFPNYTLIIISLIPYLQNEVXDIKANRDWPRWLTPVIPAPCEAEAGGSPKVRSSRPASPI

SEQ ID NO: 1224 - protein, 81 aa, Homo sapiens
  SITE (8): Xaa equals any of the naturally occurring L-amino acids
ITCNTVTXRVDIHPVLIHCRKNSFAYGARSLITINLVLLLGSSIIELSRIGSLFQLAKLFYSQQYFFMYFLNYIVPSGDVN

SEQ ID NO: 1225 - protein, 68 aa, Homo sapiens
  SITE (38): Xaa equals any of the naturally occurring L-amino acids
NVYIRPFHVAAWLPHRMVAWFQGRTSLLRGDGRGRELXVRSHNTFPIFLGVAVTGLSRFKRRANRFLS

SEQ ID NO: 1226 - protein, 55 aa, Homo sapiens
  SITE (16): Xaa equals any of the naturally occurring L-amino acids
  SITE (23): Xaa equals any of the naturally occurring L-amino acids
MSFCAQFTFSLLLYHXSSYVLVXKIMLIKILLEHKFNNFSINHCLFRKHSFVSSN

SEQ ID NO: 1227 - protein, 34 aa, Homo sapiens
PDHKNQFHLIVLKGLLSLHMNCIDFCVFFKWSVA

SEQ ID NO: 1228 - protein, 52 aa, Homo sapiens
GAPFPKKKKKKKKTETEIKEEKRQARFYTMNKTKHSPLTQELMSPSKFPRKR

SEQ ID NO: 1229 - protein, 52 aa, Homo sapiens
SCHCIPAWVIIARPCLKYIINEKKTMLELTDTSVILVLVLLMPSKWWHIQPK

SEQ ID NO: 1230 - protein, 69 aa, Homo sapiens
  SITE (48): Xaa equals any of the naturally occurring L-amino acids
SIPAVFEWMSNLFWFGATRNVYILSRWSIFLQQCTFRIAIGYLMNWIXHKILRISGPSSTPLSSYGHVR

SEQ ID NO: 1231 - protein, 43 aa, Homo sapiens
  SITE (13): Xaa equals any of the naturally occurring L-amino acids
  SITE (43): Xaa equals any of the naturally occurring L-amino acids
TLKAILREVEPRXNQQNFIGIFLKAASGMGKPMDFTHRKTAHX

SEQ ID NO: 1232 - protein, 71 aa, Homo sapiens
  SITE (23): Xaa equals any of the naturally occurring L-amino acids
IHFCTPAIYLKGRFGILNLWKFXGVIVSCFSHCPIFHRMDIMIGIVFIKLCQESKDQCGHMLWLMPVIPTL

SEQ ID NO: 1233 - protein, 114 aa, Homo sapiens
  SITE (1): Xaa equals any of the naturally occurring L-amino acids
XYGPPTLSPEEIEPCASLISVLCVSLYLQVQGCLRGYPWTLDTPRGPAFPRQLPDAAGGRAGPGAAGTEVSSGVDIDRFDNVRALRAREGTRHFTLQIPNLFLKIMFKTYGKNK

SEQ ID NO: 1234 - protein, 114 aa, Homo sapiens
AWLLVVGSAGVSALGVARSRAHAVFSSHLSVLFFSGVGVRQPLHSQRNGPCYGGPSGSGSQKREASFLSVRQSLKRTLIGPAWVTCTRLWAGRRGFMIGSSSVIPVVRERDAGE

SEQ ID NO: 1235 - protein, 57 aa, Homo sapiens
  SITE (26): Xaa equals any of the naturally occurring L-amino acids
  SITE (28): Xaa equals any of the naturally occurring L-amino acids
  SITE (49): Xaa equals any of the naturally occurring L-amino acids
QQGCFAFLSLYVDWSSTYNFFQQLVXCXLNLGKVYHRGLVFGPVSAFHXPSHNLNHF

SEQ ID NO: 1236 - protein, 60 aa, Homo sapiens
KLLLLTKMGCRHVRQAGLELLTSGDPPTSVSQSAGITGNNFMSPLPYLWANLVYSLLTWL

SEQ ID NO: 1237 - protein, 214 aa, Homo sapiens
  SITE (1): Xaa equals any of the naturally occurring L-amino acids
  SITE (33): Xaa equals any of the naturally occurring L-amino acids
  SITE (207): Xaa equals any of the naturally occurring L-amino acids
XIPPRLYQICGWFIPWLAIASVVVLTVGWIWGXGFAPADYQQGNSYRIIYLHVPAAIWSMGIYASMAVAAFIGLVWQMKMANLAVAAMAPIGAVFTFIALVTGSAWGKPMWGTWWVWDARLTSELVLLFLYVGVIALWHAFDDRRLAGRAAGILVLIGVVNLPIIHYSVEWWNTLHQGSTRMQQSIDPAMRSPLRWSIFGFLLLSAXADADADA

SEQ ID NO: 1238 - protein, 143 aa, Homo sapiens
  SITE (129): Xaa equals any of the naturally occurring L-amino acids
RFAGRHLEQLMLLPLPLPAVVLAKVMAHWMVTGLPLLILSPLVAMLLGMDVYGWQVMALTLLLGTPTLGFLGAPGVALTVGLKRGGVLLSILVLPLTIPLLIFATAAMDAASMHCPLTVSGNLGALLAXTATLSPFATAAALR

SEQ ID NO: 1239 - protein, 91 aa, Homo sapiens
PPVVSSTFSLLSRFLHILFPLHKILFHPLCRFRLQLKPHYLSRNLLGSVLVYSHTAVKNYLRLMPVIPALWEAEVGGSPEVRSSKPVWPRW

SEQ ID NO: 1240 - protein, 35 aa, Homo sapiens
IRHEPVILIKKRRTVLPTEKNHEHFSSLQQRYSDS

SEQ ID NO: 1241 - DNA, 1814 bp, Homo sapiens
tttgacagaggtcaaatcatgccatttattgtgtatattttcagaagcaccacacccttttgaatgttgtcattctctatcataataaggatatgatgaatatagtttcctgctgtgaaacaagcccatgcaagagttagttaaaatgtaggctgtatgtaaagaccattagtgcagaaaagatctgagaaattaaggttttagttctctagaggtacagcgggtattatgttggatttggcccataccgcaacagtgcaactctctgatagtctgtcccttttccagctgatgtcccaggcatatgtacacttacatttattacacaacggaacgttgtaaattgtttttatcaaggaccgtaaatctgaatgtcccaccctttacccaatgctgagatcagaactgttgacccttcaataaacgtaggtagaattgggacatactggagtgacagtactagatcttagctatcttaaccatgctaaaaaggcaatattagcagagaggttctgatctacagcatattacttgtgtcattcttttgtggccaagcctgacatacagaatatgttctttgatctgcccagggtacattcttttgtggtggcacacctcttccattaatacccctaatcagtccatgtcaattggacagggatgaagctcatttcttccctagacttgtatatatgacccaggcctggccaattagcattccacctctgaatatgattggttcatagatggaaatgtgacctgagacatagacatatcagagtcatccctgggaactttgccgggttattgagaatgctcttctctcttctattccataatgaactataacaactatgtcaccctggggctgctggggactctctttcctatcacagggagagagcctgccagggaatgagacaaacctataataaataaaagacaagatatggggaggggaaatgagagagagaaaaagacacatccatggtgatgacatttgaaactctggatctaactaacaatgtcagaccttccctgggtggccaagatacatgagccaatgaattatttattttttgtttgaagtactttgagtagatcttatttgtattcatcatgtccatcttgcttggaagactttcccaagcaaattgcagaggtcatgccccactgttgaacataaactctatttccatcacagtgaagtgatgggaatgggcatgggactgggacagagcactgcaggtgaaacacacagttctgaacagactgattcaaatagtgtgggagagaggtcatgaaaacagcacagatcagcatccaaatacaacagcattaacctttatatgcacacacccgttagttcctaccttaccacaaaatccattttccaaaatataaagaacttcaacctattatcctggccttcagaatgggtacagaaagaatgatccaacctatttctaatcatgggtgaaaattattctgggaatttctgaaacatgacaaatataaggagacaggaagcaagagagagagtgaaacatccaaactctgtcaggacaaaggagaagactcacaactcagagaacaatcaagtctttcctttatattgagacttcattgtcactgctatgatccctagatgacctgactcttcaggagaacccaaccaacccaggactctgcacagtacaggaccactcccagcatccctgagggtcgctgtctaagacactggtttaatgaaaccataatccatgcacttgatgagacattctcgggctgtctgaaccacttctgccttcttc

SEQ ID NO: 1242 - DNA, 1814 bp, Homo sapiens; identical to SEQ ID NO: 1241

SEQ ID NO: 1243 - DNA, 107 bp, Homo sapiens
gaaggctgaggcaggagaatcgcttgaacccaggaggtggaagttgcagtgagccaagattgtaccactgcactccagcctgggcaaaagagcaagactgtgtctca

SEQ ID NO: 1244 - DNA, 107 bp, Homo sapiens; identical to SEQ ID NO: 1243

SEQ ID NO: 1245 - DNA, 326 bp, Homo sapiens
gttttggcagaaattaagcatctgtatttagataaaggtagtggtgggttggattttcatagcataagcatagttgctgaagatcaataatatcaaataatgggttcttggtgagggggaaaggaaatgggggaggggtcttttcactcaacagtttggaaatgctaatgattatttgtggttttcagcccagaattcttcatatttgcttgcaagcttctatggcactgccgaattctacagtaaatatttcggacatcctcagccctgttctcctttcccttcagtaaattacatattaaagtagcctggtaactgagcactgg

SEQ ID NO: 1246 - DNA, 326 bp, Homo sapiens; identical to SEQ ID NO: 1245

SEQ ID NO: 1247 - DNA, 326 bp, Homo sapiens
gttttggcagaaattaagcatctgtatttagataaaggtagtggtgggttggattttcatagcataagcatagttgctgaagatcaataatatcaaataatgggttcttggtgaggggaaaaggaaatgggggaggggtcttttcactcaacagtttggaaatgctaatgattatttgtggttttcagcccagaattcttcatatttgcttgcaagcttctatggcactgccgaattctacagtaaatatttcggacatcctcagccctgttctcctttcccttcagtaaattacatattaaagtagcctggtaactgagcactgg

SEQ ID NO: 1248 - DNA, 326 bp, Homo sapiens; identical to SEQ ID NO: 1245

SEQ ID NO: 1249 - DNA, 538 bp, Homo sapiens
ttttctattcaccatctgtgacgggccttgtctcctcctgcaactggtggcagatgtagccagagattttgtgagcttctcaacagcatctttttcctgctcttcttcccttcctctttgtttggtttttattcacatgaaaatttaaagacccataaggaaattcaaagtgaaaatctatgcccaaataagtcaggatctcaagatgaaaatataagttctggaaatggaagtttcctctgcccccgtggtggtatcatagccagcagcctcgttctgtgcttttgaaggtttaatggcctgcatgtgaaggtaggggcgcactatatatatagtaccaggcgtgtgggcgcactggcacggatctgaaaaagcgtaagtttggcatttctaggtttattttaaacttacaacctttaacgccagacacagagcttctttcccacttaatgtaactatacattgattgcttttaattagtgttggatcttttttggtgttttgcagcttgggatatataaaaagtctgacttaaatt

SEQ ID NO: 1250 - DNA, 538 bp, Homo sapiens; identical to SEQ ID NO: 1249

SEQ ID NO: 1251 - DNA, 538 bp, Homo sapiens; identical to SEQ ID NO: 1249

SEQ ID NO: 1252 - DNA, 538 bp, Homo sapiens; identical to SEQ ID NO: 1249

SEQ ID NO: 1253 - DNA, 244 bp, Homo sapiens
gaaaaggaacacagctgggtactttccacagaggtggcgcctgagaccagcttggcattcctgaggtgctaccacgggagatgccgggaagaacacgaaacctgcctgaacacaaaactgaccagggacatccctaaaaatactgcaccgcacttggaggcaccaagcaggagggaagttttaactcctctccgtggtcatgtggctgtgaaaaccatggactgcttctctcccatgagaggcc

SEQ ID NO: 1254 - DNA, 19274 bp, Homo sapiens
agaagtggtgacacgcatctttttgataaggtcagaggctatgacatcaagctgcttcgatacctgtcagtcaaatacatctgtgacctgatggtggagaacaagaaggtgaagtttggcatgaagtaagtacaggcgcccactacaaaatgagcagaggcagtgtgtacagatttgcagggctggcgttagtatgtagctgtcactgcgtgctggccttcttacaaagggctttctgtacattatctcactgtatcttcagacagccctgcaaaataggtaccagtgtccccctcttacagacactgaagcacagagagatgaagtagcttgctcaggttgtatgttagtgactgaggcagccatcagtctctacccagtgctctgctgccaccttctcttacatatctctgtattttttttttccagctccatgttctatgccatgtgtggcagattagaatctcttaatttttttaatttatttttcatagtgacagagtctttgttgcctaaagtggtctcaaacatgtggccctaagcagtcctcctgcctcagcttcccaaagtgctgggattacaagaatgagcccactgtgcctggtcctagaatttcttttaaaattgaacaaaaaaatcagcatatattcaaattttacttcagtgactgctgtcatataaaaataacacatatggaccaaattcaaatataagaagtcaaaactaaaaaatagagcctgggttagtgatgagacttcaggaactttttccaaaattttgttttttaaatgatttttaaatgtttttaaatgatcctaaaaggtggtcttagaaaataaggcatactgaggctaacgttagagctcacctatcttcagatctgaatattgccttattcctcccatcctttatctgtcagagtccccagtgtttattttcagatgctgtttgttcaccctgttcagaagtgggctcagtgactattagagaagacaggagagcagaaaaaaagggttcccataggatcatattatttggctctcatctcattcctgggtcagagtggctacactgtgtgcattttggggtcaggtggaaggttgttttccacctttaggctctgattgaggcttgctgtagtattagagggggagtaacttcccttggttgatatgttggaataggggcagagaaggtagagttctttttttgacatggagcctcaccctgtcaccctggctggagtgcagtggcacaatcttggctcactgcaaccatctgcctcctgggttcaagcaattctcctgcttcagcctcctgagtagctgggattacaggagcgcgctgccacaccccactagttttttatatttttgatagagacaatgtttcaccatgttgtccaggctggtcttgacggggtttctccatgttgggaacatgacctccagccgatgcacccagctgaagttatagttcttaattgtacaaagtaggcactgctgaagggaattattaacaatgaagaatagttttttttagcagaagcttcatttgtgattataacccttatttggggaatggtgtgtgtttgtgtgtgtgttgcgacactgtaacacattgtatccttgtcttgtagtgtaacctcctctgagaaggtggacaaagcccagcgctatgccgacttcactctcctctccatcccgtatccaggtagggggctctcttctagtggcaggcatcctaggactggggaccttgggggccatgagcaagccctctctacttagttacactggcgccctgggagctttcctggagggtttgtgtcaggcagtgtaggacattttggttcccagtcacaggccacactaagcataggatagtgtcctggggaaggggctttccactcaaggggtttagggattttgtactgtcactggtcctagccacagccttgagtgaagtacttcacccctccaagcctcaagttttctcaggagcttggaacgatttagctcagttttgatttatatgaaagtggtctgtgcatgaaaatactgtttaagtgtaaaatgacattattagtactctgtgtgagcaactacacttgctgctgtagcctgagtggatgtcaccctttgggtgcatgtcttgaagtgattgagttatttatggaaattgccccaggcaaggctattctggtggtagaagaacacataattgctatgttcccagtaactggacagtggccacaccatgttgcaaagcacattggtatccacaaagctgcatttgttcctggcacataaaagtgtgtgcaacctgtggccagggctgtattctctgcactggatattaaagctgttggtctagtgtgtagcattcaagttttctggcaatacctgcctgtttagtaagggaggccaaggacctctaacatcagtgcaagatgttgtcagcagacaacagggagtaaatactctttctccttaaaacctctctcctatttctcagcaccagcatctgccttcagtgttgtgttggaccttatctcctcaatattggggccacatagccatgagcaagggcaggcaggttcatctagtgccttgtgggaggggtgtcctcatcatgtgcaagctgggggcaggaatcccagccctagcactgtgtctccttgaacaagtcctataacccttctgagcatcagttccctccttaataaaatgaagataatggtgcttatttaagagtgaagtgccagacccctccataacaggtgtcctgtaaataacaggcctaatgatgagtagttgggaaagcttcagggaacctccttttccctaaaagcaagtttgcgctgatgcagatgatgatgatggtggtgatgatgttgatgatggtgatgatgatgatgatgataatgatgctggagtgagcttggcagtatcagacccacactgatgggtgtatcctacctaagggggtccacactggaaccactgggtaactccatagctggttttcagacatagtttccagctcccaggagatgcttcgggggttccacagactgaactctgcaggtttgcactgcctgaggaaccaggcatcacttcgtttaaatttaggttccaagtaggacttggtttggaaaaaatagttttgctagaagtataaataacattgctccaaaatagtagcacagtgtcctttctgctgtagtttggcaacttgttacaggactcccaaaatgttatcaccctttgacccaggtatttttctaataattggtcattaggctgtaattcagccacttggtgttgaggacgttcatcatgatgtctatttgtaatagcaaaacaagaaatgttttcactaatcagaataatgattgaatgatggcacatccctcagtagaatgaaatattgtatagtcatagaagaatcgaaaatgggctgggcatggtggctcacgcctttaatctcagcactttgggaggcctaggcagtaagattgcttgagcccaggagttcaagaccagcctgggaaacagcgacactctgtctctaccaaaaataaaaaatagaaaatgcttacactttttgacatggaaaacgtcacagagcttaagataggcaggatacagaatcacatagtatactctcaactaagtaaaggaaaatgtgcttataaaaaaggcttaaaaggaagtgtgccaaaatgttaagatgcctgaatgctttccccaaagctttttttgttataaaaggcatcaaaagccgagtgcagtggctcacgcatataatcccagcactttgggaggctgaggcaggcagatcacctgaggtagggagttcaagaccagcctgaccaacatggagaaaccctatctctactaaaaatacaaaattagccgggcgcggtggcgcatgcctgtaatcccagttattcgggaggccgaggcaggagaatcgcttgaacccaggaggcggaggttgcagtgagccaagattgtgccattgcactccagtctgggcaacaagagggaaactccgtctcaaaacaaaaataaaaacaaaaacaaataaaaggcatcaaaagagaccaaaatttgtatgtactgtatctgacagtgtatgtgtgttagggagggtaatgaggatcaataaaaataaaaaagctggagatgggatgagacaccattgcacacccaaataagggggacaggagaatcactttttatttgatagacttgtgttcttgtgggtttttttacataacttctattactttataataagaaaaagaaataaaattactattacccaaaccaagtcacgagctgcactttgatgctatttaaggaatctcagttgagccctgtgatgactttgaggctcatacaggtactcagtagtctcagttctagatgtgtcacactatcttgggcccttggaaatgagaagtattctgggatcgtttctttcagcacaccaaaatagatggtcccaaattctgcagcacaaatctaatttgtttcctccttgagtgaatggcacttctcatcctgcttttggtccctctcctcttgcctgacagtggttccgaagcctattcaggtaatgaacattaggcatttgccctgagtagagtctattttaattctgtttctcacaaaaactgcttctgcatcataggcgggtctgagctcagcctgaggcctgcagtgttgatttgagcagctagagttgggaaaacagcacttcacaagagctctgagggataattgctgtctcttctaaacctgggctcataactcagggcctctgtctgagatctataattcttctttctcccagtgaggctcccaagaataggctaaagtgttatggctgaagattgtttccagacttctcgaggcctggggattagagtgcagggtgtgtatggaatgaaagccacttctggaaaacatgggctgggtctccagggaagctttcctatcttccctgaggtggcctcagacaggaacttggcccaagagttgctgcgacattccatgtgaatcttctttgtggctacttcccctgaatttggacgattgttttcttgcctctgggacctcaccagacttggaggtgtggccaaagccatgtgccgtctgaagtttgtgtagaggccctgattgaggtgctgagaataactgcaagctagccaagtgccttctcccaccatatttcttgaagccaccaggagctccttggaggaccagatgctctctgtgctatagtcagactcagcaggggcaggccacagcccggggggcaagacgcattctctctgaccaaggcagccaactccaagcgcagagcaaagtagttgacttcacgctgtgggctggcactgtgggctcttgttgcagtggcagcgtgatgacaatagtgtgctgccatttgagtaacacttggaccagtgcagtgctaggtgttttatatgtattatgtcatccttaaacagccattttacaaatgacaaaatcaaggcttagagacattaaacaacttgttcagcgttacagtgttaagtaaaaagctgagattttaagctgggaatgttgccaaagccctattctctccagtgtttctctctgttcctgagggcttgtcctggtggagttacttatgatttttccaccaaagaatatagaaaagtgcctctttgcttgctttgttgggcatggcagtgtctcttgagcaccgggttttaggcactgtccgtgggcctttccagtatgttaggatgttcagtcttcactaaaagcctgcaaggctagcattatttgcccccattttagagaagaggaagagtgatcctctgcagctaggctgcagtggctcacgttgtgagtcatgcctttgtttactgggattggcactacagagacctgtaggacaaagggacttgcaatgtgggggaagtgactggtgaccagtgagcatagatggagaaagttacaaagaggctgagagcaggcagtgcctcgtggaaaaggcatgcagccaggaaaccagaggggctctagaggctcgcccctggcttttgcccacccgtgtcagccttggcctcactgaagccactagcttggagaagtgtgagttggcggccccctctccacagcactcagggacctgggtctggccagggctgtctcagaagactttgggctgggaagggagatgtcataactctgcccttcttttccaggctgtgaatttttcaaggaatataaagatcgggattacatggcagaagggctcatatttaactggaagcaggtatgagcaataacatacatcaaattggatctatgtctctttgtaaagggaggccaaggagaacaacaagcagtctttggggaaaacaacaagcagtctttggggaaaataactcccctttcctccctgattgtttctgtcttcctctccctcttctccttgtatatacttgttaaattttcatcattatactttcctcccccctttatttctcttttgtttaagggaatttttcagaaacaagataggaaaagcccttcccttctgtactctctgtgtgaaagctgggggcagcattctttgccttccccagcctgtaggggcaggctatgggaaacctgccggaagctgaacacatattgatcttgcatgtttcagcaacagacatcaaatgtccgactgaaaaactcctactcagctatactgatctggtcacattgatttttaagctgtcactcccaggtagcacaggtatctggcccagagaaggcaagcactgcctgtggtagtcacagcctcaggactgcaagcttccccatcacctaagcctcctctggtggccaacccacatctcacaggagtctttctgtccccaggactacgttgatgccccattgagcatccccgacttcctgactcactctctgaacattgactggagccagtatcaggtgaggggcctgactcaagcattgagggcaggataagggagtggtgaccaaggagactcttgatgcctgccccacaaggccctcgtgtgtttgcctgatgggctggcttgtgcactcagatgcctttggccctctgtcctctcagaaaggaggaattgtgtgtccgttcaactatctcctgatttgctcatgtcccagaaaatcaaagctttctgaacgtgactcattcaaagatttgcatccaccagggggttctgtttccagaggacctcatagagtctgctattccagatctgggctttagttacttttacatttttccttttaaatgtgtgttcagccagaggaagtacagagctgcctgacctcatttgattatagaaacattaaaattacttccaccatgctcttctccgtcattgcacaccatggaaggggcctctagtcttactggaaacatctctctacccttagcccacacagtctgaaggctgccagcagctttgcttgccacttgcttcagacagaacaagtagttttgtttttctgcgacctttcccatgtcctgttcctctgcctggctgccacctctcagcttcctcttgtctggctgacatactgcccttcaggctttggctcgagtgtctgcttcaggaagacttccctgatctgcctcttccttatccctggcgagttggatgcctgcatctatattcccattaaccccctgggcacatccatcatggaattttccactgagctgtagtcactgatttagagatctgcttccctgaaatcctggaggacagggacccacagcttgtgtgtcccagcacagaaacaggcacagagcctagaacttgaaagactgagccagtgagcaacagaaaacattctgcctccctgctagtttcccctgtccccaggtctggacagctcccacccagccttgagatctctctttctttgaaaggctgacccatctatgttaagcaactgggtgctcctagatcaccaatgtcagtaccctgttgtcctgatagcagcaaggtccatcttgttttctctatatatatccagaccctaatcacaaggtttatgctcacagcaactgtttgagtgtatgaagtagggtgatgtcagagttccccaatgcaggtgtttgcaagagagggagcactggggaggaaagcagaccagttgtttgttatggtctggaagcctggagaaggaacaggtttggggtacctgtgctgtggtctcatgtcccaggctgtgcctagacagactgagtagataaaagaaccggcaggcttccttctttatgtgctgcatgcagaggtcaagtagactctgccccaagccaccctctttctggtcccttccggcaccattttttctccttatgcaggtacaaactggatctgatgaactactcagcaaatgagatgtgacagttccaggcactggtcccaaggatgtttgcctctttaggaaggggtcctgtgcgtgtgaggaggtactctgcttagtagatgcaggccctagatctaggtcccagcttgcctggcccttcctgcaaggctctgtggccttgaacagatgacctcacttccccctgaaaatggtgttggcagtacctatttcagagttgtgccaggctcaaatatgatcactgcttgaaagggactcctgaactgaaataccagacagattgtaatgataattatgaagaggctgctagctagctaattcagggaagtgaacactgaaacttccaggcgtgaaggcagcagggctggagtgtagcaggcaggcaggcgcctcccaagaggccacctcttcagtgttgctcaacctgttttgtctcactggggctcctagcatgctcttccttggctgggtgtgggctctgccttttctgcccgcaaagccctggggtgccggtaccctgttccttttcaccatctccccaggtgatctcatccatcgtccacaccatgagcccacagccaggcctctctgatccatacctgcatcacctttcacacatgtcccttcaggcggcccctcagactcaagctgtccagagtagagttggccatggcccaccatttacccagatgctcacacctgaaactcgagttctttgctcccaccacatccatcaccagctcccatcggttctctagtctctgcccctagtgcaactgcaatccttcttgccctcgtctcctgtgcagtgcctagctcaggccaccactgtctcagtgcatctcacagctgaacctggggcctcactgaggagtaactagaaatgaagtgctcagatagcaagcactgaaatgatagagcagggccatcactgtcacccctgccttaaaacctaccactgacttcccattttcctcagaatacaatgcaagaacttgtacatggcctacccagctccatgcagtctggtcttgcctgttcttgtgaccagctgatcttcctgcagcccatggccgggcacggtggctcatgcctgtaatcccagcactttaggaggccaaggcgggcagatcacgagggcaggagatcgagaccatcgtggctaacacagtgaaacccaatctctactaaaaaattagccgggcgtggtggcgggcgcctgtagtgccagctactcgggagactgaggcaggagaatggcgtgaacccgggaggcggagcttgcggtgagctgagatcgcgccactacactccagcctgggcgacagagcgagactccgtctcaaaaaaacaaacaaacaaacaaacaaaagaaggcagccctctccaggttcgcacgtgctgttttctctgccagaaacacgtgtctcctttctctgttgcttatgctgtctcatgtcatcacctctgagaagccttctctgatgtccctacagatcaggcttggctctccagtcatatggttacacagcatcctagaggtccccttttagttgcacacctgcagtggttaactttgtcttccctctcccgtgactccatgattgttgaggtcatattcacccttgtgtgcctggtgccaggcccttcaggaggcatgcagtgtgaggcttactgaatgaatgaatgagtgaatgaatgaatgataggagcagttgtggcaggacacatgtgtcttgctgccctccatgtaaccgaattgaattccgtagaggtatgccccttctttctgtgtcctaagacccctccctggggctgctgtccctcaggcactcagcattgccccagctatgaagaagcagcaaggaacattctgcaatgacctcctagtccctgaacactaagccttagagatgccaaaacagcctctgccctcatggggattagactaggaaaagaggcaacaacgtaaccatcacctacattacagtttttaccagtggtcacagaaaccccaaagagaagataattggtctgggcctttgaaggatgagtaggagtttaccaaccagcagaaagagtactctaggcatagaaacataagcagaggcatggcatttagctcagctcccagagactttttcatgaagcacgtaggatgagagagtcaggcacgagccttgtttgtttgtttgtttgtttgttttttagcatatctcctcggtcatcactttgagcagttccctcagacttctgcttcttactctggtgttataggaagagtacctacagtgattaagaatgtggactttggagtctggcagggctggatttatccctcagctcagccgtgtgaccttggccctctaccagcccagccctccccagcctgtagttcctgccccagccttgggaacttgctgcccctccctgatggtcagcatctcctccagacagccgtcatggtggctggcattccgcagctctcttgtcctcggcagggcctgccctccccgggctgctgcagtcttcccctagcccacctgacgctcactgggcttggtacagtgcagctcttacctccctctcctgcttttccttgccctgtgagaatcactgctccattggcaatggtgtgtctgacacgttgagccagatgagttgagagaccccttgtgcagctactgataatgactttattagcacagcactacagcgcctgtctctgtagtcactaaaagtgggtcagaactctccaggggcgtgggagggtcaggtaaatgaggctgttttaaattcctgggaaagccactccaattacaggtgccgtgttccccctccccctgggaagtgctgttttgctggcatgcgtcaccctctctgcacagccccagaacactgctaagcaattgtatcttaagagaacagagactgccccagctagggaaaagggtgccgcaaaactgggtcaggcccttccatggagttccaggttctgagtgggctgtttcttagagggtctggactagaccttgcacttgggctagaacagaggttctcatctctttaaagcttttgcttaattttccatctcccacctcatgggcctccttttttaaaagactttccctgccagacagactccatttattattcatcaaaagatagtatgcagtaaatagcactaaaaagcaaatgaagcatgtttgaaaaggttgatgttttagtttctgtgatgtgatggcatatgaaggaatgaatctttatgtggccatttggagacattggctacagcctcagggctcttcgtttacctttactggcttcctggacagccacaccaggagcccagcacttagaggaccctaatgtgggcagggggctctgggtcaccctggcctcagcatccgtttctgttcctcactctcacattgggtcagagccccccccccgcccccgccccccgagtagggggtccacaggctgagtggtggagggagaggtggtaggagctgctggagatggaatacgaatgtcccagattatctgggattcaaaacctatggtctgtaaccaaggaccttgtgtagttgttgccccagaataactcttggcattttattttttaaatactttaaattctaaatctgagttaatgtccatttcttctcacttttctccaacagtgttgggatctggtgcaacaaacacaaaactacctgaagctgctgctttccttagttaacagtgatggtgagtctgtctcctccagagccctcgagccactgcacccttggggagttcccagttcattctgcctcaactgtatgtttgttggagttgcacaccttacttttgtgctgtgggagaggaatttggggagttcctagaatcccagaggctgggtgggatttgtccattggtggctttattccatgtcctcaaaatcctagaaaacaaaattaagaactccttaccatctatgccgtgcacagggtattttcacactgtctcagcattgcacaacagcattgtgtgtggggccaggatgggcctctcattcagaaagatgaggcatgagatgagagaatcaatccgggctgctcagtggatgcacacagcctgtagaggccctgttctccagagtcctccacccagtttggctgttttgattggatgggcctggcttgctcaatgtctctagggcagacggactctaaatccctggtagcaatcaggacttctgtaggaggtgcacttgctcaaacaagtggaaatgcattggcttatggaaccaagaaggcccaagaacagagccaggtgaacatcataaagaatctttctctgtttctcaaaaccactgtcttggcctcatggctggcagccattccagacctgtctcccgccatcttagctcccccaggggagactacctcagtctctggagttccagtaaaggtcttatcttatgctcattggcccagtttgggttaagtgcccatccttgaactagtcgctggagggagattcgccacaaagtcgcatgccagcccctggagccaggcactggttctctagctgcgggcattagcacccctcaaagcacttctggaaacgtgtgtctggcatgttaggtgctgcagaaactagagggtggggaaggtagtactagcatgtggttagagttggccagggatagtcagtgtcctgcaattcatgcagccctgcacactgaaaaattgcccactcccgctaccccccaaaaaaatacttgtcgtgccctctgagaaactgggtagggatgtcatccctgcctaaatgacctgggcaaagtggactgtgtaggctgcactgtgtccccagaagtacactgagaactatagtcagaaggaagaaaggaagctacaaagccagacgcctgccactcacccctttctgggactaggctggagaagagccatggggaggccactggggaagacagaagctggtggggcctggctccctccaccaggccaagctggtggtacttcctgctcatcggcccatgtctggttctctcctgggcatcctctcctgcggttcctgagtagatgacagcgggctgctggtacactgtatctcaggctgggatcggacccccctcttcatctccctcctgcgcctttccttgtgggctgtgagtatgaatcggcccctaccaagctctgctctttgggtgtgttaggattgtctccagacagagggtggagcaggggatgccatcgctcagagcagatgtgtttaaccctgtccttccgggtgttcttcagcctgcgttgtcactgggtctggttatggttcagctcctggggatgagaagagggctctgtcacatctcctgtggtctcttccaggatgggctcatccacacgtccctgaagcccactgagatcctctacctcactgtggcctatgactggttcctcttcgggtaagcctttgcaggagttgggttttggggccttagtaacagtttctatatgtgagttgtgtggtggctcccttgacaggggctggaggtaaggataattccacccctcgagaaggaccgaagctgctgatcaggccccacctgccacgctggtgccagtgacacagtctgtgtctggtgaccctgtcctcttggccttgtcatcttggtgctgctgactttgcctctctaccctccttttttcaggcacatgttggtagatcggctcagcaaaggggaggaggtgagtataccacctacgacttgtgggcacagctcagcactgaaagaggggcagtgggtagcctgtctgagttccacgtgttaggggcagctccttgccccaggtgtgcagggatgtggccccctgtcatctcctcctgaggcagcgtggcaggacaggcaccagcacagtagctctgtgttctgggcctcgcgggcctgtgctgtggagaggatacaagcccacacgtcggggtgagcagttacatgacagccttggctgcctgtgatcttccctctcacaggccacttgttctctctgctcagctctggaaccccatcctctaaggcctttctgtgcccctcgtctctgcaactaaaatgcagcagcacttctcttccccaccctcccgtcacacccttcagccacttttcaatgtcagggtgcccggcagcagggtcctgcccctgatggttgcctccaggtcccctttcctctggacctgctcttccttcctcttccaatgtgctcagcactctctcccccatgcctgtcgccttttctgcgcccccatcctgtcggccactctccgcaggccttacctgttagtgcctgttttccttgcaatgcaggtctggagtcggccctgagtgtgttccctagttggcccccttactgcctgggtgaccttgggtggtctgcttcaccttgagtctcctggtgtcaagcgtgagagaatgagtccaggtgcccagcatggaagccgtcccacggtgtcagctccttctctttggcccccactcccccattttcccaaagtgtgtttctcatctttctcaccctcatggggctgcttccttcctgggcatcttatctcgcacctcctccttttgttcctccgtctcagctgctcctctcctcttccaaatctcttcttctgaacacttatcgcgtctgccagggctgtagagctctaagcctactcctcagaggcctccgtgaactccctcagaggcggtgactttggtattgaaatcagtgcttcaagaagcctttttgtagcctctcattttgggactttcccggagctctgggacattctaccctccctgtagtctccctccccgacaaagcagaccagatctgcctgcagagggtggggctgaaccaagtagtgtctgagtttgagcccttggcatctctccatgtagacaagaggctctcctcagctgcaggttcatcttcaggacctttctgttaccccccccagacaatccagacactgatgcgtccaaagcaaaaaaccccaggcctattagttaaacacgattgtgtcgtctccccacctcaccttggaggttcggggaacatattagcatattagcatattaaagactacaaagtctgtagtgaaaacacctgtttaatcttaagtaacacaacattttcatactgacccgacctgggcagccctctccttgtggggggcagctccttgcctgggcacacagagataagaaactgacagggctcgtgggatgcccaagtagggatttctctgagagaggggctcatgggccaggcctttgggaatcaccacagaaatggaagcctggtgtgtgcttcctggaggcccctgggcgaggcactggctggaagggagaagataatttgctcatggaggtgggggtgtggctggggtcaggagcctcctgcctggcccacctcaagcttaagacctgaccctcacagctcctcagcaagggaggctctaggccagacagtggctgcccacacccgcagttctgaaccagtattttgggatgcctcccctaaaaaatgtgattcctttcctttccattatgttcctgctttgtccattattctccctgcgcccaagtcatctctcccgcagctatccttccctgttagcatctctccctgggaatcttagaagaggggagagggtgccatttcactttatcctttttaaccacttgagaacacacatgttgaatttaatgatggtttgaaaaatcactggcctggctgggcacggtggttgacgcctgtaatcccagcacttggggaggctgaggcgggcgggtcatgaggtcaggatattgagaccatcctggctaacacggtgaaaccctgtctctaataaaaatgcgaacaatgagctgggcatggtggcgggcacctgtagtcccagctactcgggaggctgaggcaggagagtggcttgaacccaggaggctgagcttgcagtgagccgagatcacgccattgcactccagcctgggtgacagagcgagactctgtctcaaataaaaaaaaaaaaaatagctggcttaaccctggcagtcccaggaaggaaatcccttcctgcccttgccccggcccacatgcatctgccaggcccttccaaggcctctgtaccacccacaccatttatggaccagaacacccacacagtcccacagcagggccgctctccagcaggggccttgacctgagtggctggccgccctcccctgggagttctgctgccttggttcttctcattgtgcgctgctctttggtctcctttagattttcttcttctgcttcaattttttgaagcatattacctccgaggagttctctgctctgaagacccagaggtaagtggaggcctgcacgtgtcatgctgggccagggcgctctgagaagggctgctccctgggaggcaagaggctgaccacctcattcccgccctgcctccctgcttgttgggctggtgctccctcctgccttcgctctgaggccagggtaggggtccctgctgaaggccactggtgaagaggctcttctgcagggaaggccatgtgggggtcaacttggagtcacactagcagacaggctttgggacagacgagtggtctctcatgaccaagaaaacaggtgtgttgctgcagggagaagccagcccaggagtaggaggactcttaactcccagtgtgcccaagctgactcttgtcctccatggcctacagcaggaagtgtggctgaacactgcagccccctacaaaagggcagaagtctgcttccggcctgggaaatgcaagagtcttggctggcaactgccttaggacccctgtaagagttggggtcttgcctgagttggtttgccttcctaatccgagctacaagcatgttgggccacacttgaacgctcagggcacaagctgatgaggaggatgcagaccttgctgccctcagaaatcttcacctgtgtgttggacagagccttgcagcgtgggtcccagaagtggccctggtgtcttataacactccctaggctaggacccgtctccacaagttgccagtgaattgagctgctttccaggacaggcaggattgggaacgggggacacaataagaccccagatagatctggaatttactgctccggcttccatttctaggaggaagagtttgccagcccgggatggaggcttcaccctggaagacatctgcatgctgagtgagtcctgggccccaacagacttcccttcctccatacatcttcccgtgtacagatcaggcaggaactgtttgtgctaagaggttttttgtttttttttttttcttcccagttatgtggtatagaaaaggtgggggaccagtagtgggagaaggtaacacgctgactgatggcactggcttcttttaggacgaaaggaccgtggcagcaccaccagccttggcagcgacttctccctggtcatggagagttccccaggagccactgggagcttcacctatgaggccgtggagctggtcccagcaggagcgccaactcaggcagcttggtaaggggccagacttggaccaaggtcactcacagctgtggcccggggccatcagcaccagggagccaggctggagccccaagaacaaagcaggcccccaacagaagagctgagaggatagctccgtgctcctgctgtctctactgggcctcagaagtcagccatctggttggtgaagggcactgcctgtggtggcccaggaacataaagggctagggctccctgtgggacagagaagcagctgggcagggtagggcaggggtctggggaggctggtattgggaggagctccattttatcatttgtcggggagatagggggccattttggaaaaagaaaaccaaaaggtaggtgtaagttgatggggaattgggaacttgagggtcagctcctttgagaatctcatgaaattgagaccctgatgactttcaccctggacagatggctcaagatgttgcataacaaagtcctgagtggtggcttatatttataatcccagcactttgggaggccaaggcaggaggatcacttgagcccaggagtttgagatcagtctgggcagcataatgagaccccgtcttttagagggggaaaaaagattttgcataacatatggaggtgggcagtgactgaagagtgaggaatcattttctagcacatacttcaagaccagtaggctggtgtgatttggatgccacaggccctccataaagacccagccctgctgcccatggccctgagctggagagagtgctaatgtttgccaactcatgtgatgttttcccagtggaagtaaagcctaggcctgaaattcagtgagggtgggcagagggctttgcctgcagtggcccccggctcacagccctgctccttccactgcaggaggaagagccactcatcctctccacagagtgtcctctggaaccggccacaaccctcagaggaccgcttgccttcccagcaggggctggcggaagccaggtcttccagctcctcttcctcaaaccattctgataactttttcaggatgggtagcagtcccctggaggtccccaaacccaggtgaggagctccaaagcccttgctgttggaagtgcctagctttcccccttaataagactggagggtcgggggccagcacctgagctagggtctcaagatggggttcctaagcttgcaggcccagtatttggaggatgggttagtgtttggtaataaagcaagggctgatttgt

SEQ ID NO: 1255 - DNA, 2495 bp, Homo sapiens
ttcttcttctgcttcaattttttgaagcatattacctccgaggagttctctgctctgaagacccagaggtaagtggaggcctgcacgtgtcatgctgggccagggcgctctgagaagggctgctccctgggaggcaagaggctgaccacctcattcccgccctgcctccctgcttgttgggctggtgctccctcctgccttcgctctgaggccagtgtaggggtccctgctgaaggccactggtgaagaggctcttctgcagggaaggccatgtgggggtcaacttggagtcacactagcagacaggctttgggacagacgagtggtctctcatgaccaagaaaacaggtgtgttgctgcagggagaagccagcccaggagtaggaggactcttaactcccagtgtgcccaagctgactcttgtcctccatggcctacagcaggaagtgtggctgaacactgcagccccctacaaaagggcagaagtctgcttccggcctgggaaatgcaagagtcttggctggcaactgccttaggacccctgtaagagttggggtcttgcctgagttggtttgccttcctaatccgagctacaagcatgttgggccacacttgaacgctcagggcacaagctgatgaggaggatgcagaccttgctgccactcagaaatcttcacctgtgtgttggacagagccttgcagcgtgggtcccagaagtggcactggtgtcttataacactccctaggctaggacccgtctccacaagttgccagtgaattgagctgctttccaggacaggcaggattgggaacgggggacacaataagaccccagatagatctggaatttactgctccggcttccatttctaggaggaagagtttgccagcccgggatggaggcttcacctggaagacatctgcatgctgagtgagtcctgggccccaacagacttcccttcctccatacatcttcccgtgtacagatcaggcaggaactgtttgtgctaagaggttttttgtttttttttttttcttcccagttatgtggtatagaaaaggtgggggaccagtagtgggagaaggtaacacgctgactgatggcactggcttcttttaggacgaaaggaccgtggcagcaccaccagccttggcagcgacttctccctggtcatggagagttccccaggagccactgggagcttcacctatgaggccgtggagctggtcccagcaggagcgccaactcaggcagcttggtaaggggccagacttggaccaaggtcactcacagctgtggcccggggccatcagcaccagggagccaggctggagccccaagaacaaagcaggcccccaacagaagagctgagaggatagctccgtgctcctgctgtctctactgggcctcagaagtcagccatctggttggtgaagggcactgcctgtggtggcccaggaacataaagggctagggctccctgtgggacagagaagcagctgggcagggtagggcaggggtctggggaggctggtattggaggagctccattttatcatttgtcggggagatagggggccattttggaaaaagaaaaccaaaaggtaggtgtaagttgatggggaattgggaacttgagggtcagctcactttgagaatctcatgaaattgagaccctgatgactttcacactggacagatggctcaagatgttgcataacaaagtcctgagtggtggcttatatttataatcccagcactttgggaggccaaggcaggaggatcacttgagcccaggagtttgagatcagtctgggcagcataatgagaccccgtcttttagcagggggaaaaaagattttgcataacatatggaggtgggcagtgactgaagagtgaggaatcattttctagcacatacttcaagaccagtaggctggtgtgatttggatgccacaggccctccataaagacccagccctgctgcccatggccctgagctggagagagtgctaatgtttgccaactcatgtgatgttttcccagtggaagtaaagcctaggcctgaaattcagtgagggtgggcagagggctttgcctgcagtggcccccggctcacagccctgctccttccactgcaggaggaagagccactcatcctctccacagagtgtcctctggaaccggccacaaccctcagaggaccgcttgccttcccagcaggggctggcggaagccaggtcttccagctcctcttcctcaaaccattctgataactttttcaggatgggtagcagtcccctggaggtccccaaacccaggtgaggagctccaaagcccttgctgttggaagtgcctagctttcccccttaataagactggagggtcgggggccagcacctgagctagggtctcaagatggggttcctaagcttgcaggcccagtatttggaggatgggttagtgtttggtaataaagcaagggctgatttgt

SEQ ID NO: 1256 - DNA, 2493 bp, Homo sapiens
ttcttcttctgcttcaattttttgaagcatattacctccgaggagttctctgctctgaagacccagaggtaagtggaggcctgcacgtgtcatgctgggccagggcgctctgagaagggctgctccctgggaggcaagaggctgaccacctcattcccgccctgcctccctgcttgttgggctggtgctccctcctgccttcgctctgaggccagggtaggggtccctgctgaaggccactggtgaagaggctcttctgcagggaaggccatgtgggggtcaacttggagtcacactagcagacaggctttgggacagacgagtggtctctcatgaccaagaaaacaggtgtgttgctgcagggagaagccagcccaggagtaggaggactcttaactcccagtgtgcccaagctgactcttgtcctccatggcctacagcaggaagtgtggctgaacactgcagccccctacaaaagggcagaagtctgcttccggcctgggaaatgcaagagtcttggctggcaactgccttaggacccctgtaagagttggggtcttgcctgagttggtttgccttcctaatccgagctacaagcatgttgggccacacttgaacgctcagggcacaagctgatgaggaggatgcagaccttgctgccctcagaaatcttcacctgtgtgttggacagagccttgcagcgtgggtcccagaagtggccctggtgtcttataacactccctaggctaggacccgtctccacaagttgccagtgaattgagctgctttccaggacaggcaggattgggaacgggggacacaataagaccccagatagatctggaatttactgctccggcttccatttctaggaggaagagtttgccagcccgggatggaggcttcaccctggaagacatctgcatgctgagtgagtcctgggccccaacagacttcccttcctccatacatcttcccgtgtacagatcaggcaggaactgtttgtgctaagaggtttttcgtttttttttttttcttcccagttatgtggtatagaaaaggtgggggaccagtagtgggagaaggtaacacgctgactgatggcactggcttcttttaggacgaaaggaccgtggcagcaccaccagccttggcagcgacttctccctggtcatggagagttccccaggagccactgggagcttcacctatgaggccgtggagctggtcccagcaggagcgccaactcaggcagcttggtaaggggccagacttggaccaaggtcactcacagctgtggcccggggccatcagcaccagggagccaggctggagccccaagaacaaagcaggcccccaagagaagagctgagaggatagctccgtgctcctgctgtctctactgggcctcagaagtcagccatctggttggtgaagggcactgcctgtggtggcccaggaacataaagggctagggctccctgtgggacagagaagcagctgggcagggtagggcaggggtctggggaggctggtattggaggagctccattttatcatttgtcggggagatagggggccattttggaaaaagaaaaccaaaaggtaggtgtaagttgatggggaattgggaacttgagggtcagctcctttgagaatctcatgaaattgagaccctgatgactttcaccctggacagatggctcaagatgttgcataacaaagtcctgagtggtggcttatatttataatcccagcactttgggaggccaaggcaggaggatcacttgagcccaggagtttgagatcagtctgggcagcataatgagaccccgtcttttagagggggaaaaaagattttgcataacatatggaggtgggcagtgactgaagagtgaggaatcattttctagcacatacttcaagaccagtaggctggtgtgatttggatgccacaggccctccataaagacccagccctgctgcccatggccctgagctggagagagtgctaatgtttgccaactcatgtgatgttttcccagtggaagtaaagcctaggcctgaaattcagtgagggtgggcagagggctttgcctgcagtggcccccggctcacagccctgctccttccactgcaggaggaagagccactcatcctctccacagagtgtcctctggaaccggccacaaccctcagaggaccgcttgccttcccagcaggggctggcggaagccaggtcttccagctcctcttcctcaaaccattctgataactttttcaggatgggtagcagtcccctggaggtccccaaacccaggtgaggagctccaaagcccttgctgttggaagtgcctagctttcccccttaataagactggagggtcgggggccagcacctgagctagggtctcaagatggggttcctaagcttgcaggcccagtatttggaggatgggttagtgtttggtaataaagcaagggctgatttgt

SEQ ID NO: 1257 - DNA, 2493 bp, Homo sapiens
ttcttcttctgcttcaattttttgaagcatattacctccgaggagttctctgctctgaagacccagaggtaagtggaggcctgcacgtgtcatgctgggccagggcgctctgagaagggctgctccctgggaggcaagaggctgaccacctcattcccgccctgcctccctgcttgttgggctggtgctccctcctgccttcgctctgaggccagggtaggggtccctgctgaaggccactggtgaagaggctcttctgcagggaaggccatgtgggggtcaacttggagtcacactagcagacaggctttgggacagacgagtggtctctcatgaccaagaaaacaggtgtgttgctgcagggagaagccagcccaggagtaggaggactcttaactcccagtgtgcccaagctgactcttgtcctccatggcctacagcaggaagtgtggctgaacactgcagccccctacaaaagggcagaagtctgcttccggcctgggaaatgcaagagtcttggctggcaactgccttaggacccctgtaagagttggggtcttgcctgagttggtttgccttcctaatccgagctacaagcatgttgggccacacttgaacgctcagggcacaagctgatgaggaggatgcagaccttgctgccctcagaaatcttcacctgtgtgttggacagagccttgcagcgtgggtcccagaagtggccctggtgtcttataacactccctaggctaggacccgtctccacaagttgccagtgaattgagctgctttccaggacaggcaggattgggaacgggggacacaataagaccccagatagatctggaatttactgctccggcttccatttctaggaggaagagtttgccagcccgggatggaggcttcaccctggaagacatctgcatgctgagtgagtcctgggccccaacagacttcccttcctccatacatcttcccgtgtacagatcaggcaggaactgtttgtgctaagaggttttttgtttttttttttttcttcccagttatgtggtatagaaaaggtgggggaccagtagtgggagaaggtaacacgctgactgatggcactggcttcttttaggacgaaaggaccgtggcagcaccaccagccttggcagcgacttctccctggtcatggagagttccccaggagccactgggagcttcacctatgaggccgtggagctggtcccagcaggagcgccaactcaggcagcttggtaaggggccagacttggaccaaggtcactcacagctgtggcccggggccatcagcaccagggagccaggctggagccccaagaacaaagcaggcccccaagagaagagctgagaggatagctccgtgctcctgctgtctctactgggcctcagaagtcagccatctggttggtgaagggcactgcctgtggtggcccaggaacataaagggctagggctccctgtgggacagagaagcagctgggcagggtagggcaggggtctggggaggctggtattggaggagctccattttatcatttgtcggggagatagggggccattttggaaaaagaaaaccaaaaggtaggtgtaagttgatggggaattgggaacttgagggtcagctcctttgagaatctcatgaaattgagaccctgatgactttcaccctggacagatggctcaagatgttgcataacaaagtcctgagtggtggcttatatttataatcccagcactttgggaggccaaggcaggaggatcacttgagcccaggagtttgagatcagtctgggcagcataatgagaccccgtcttttagagggggaaaaaagattttgcataacatatggaggtgggcagtgactgaagagtgaggaatcattttctagcacatacttcaagaccagtaggctggtgtgatttggatgccacaggccctccataaagacccagccctgctgcccatggccctgagctggagagagtgctaatgtttgccaactcatgtgatgttttcccagtggaagtaaagcctaggcctgaaattcagtgagggtgggcagagggctttgcctgcagtggcccccggctcacagccctgctccttccactgcaggaggaagagccactcatcctctccacagagtgtcctctggaaccggccacaaccctcagaggaccgcttgccttcccagcaggggctggcggaagccaggtcttccagctcctcttcctcaaaccattctgataactttttcaggatgggtagcagtcccctggaggtccccaaacccaggtgaggagctccaaagcccttgctgttggaagtgcctagctttcccccttaataagactggagggtcgggggccagcacctgagctagggtctcaagatggggttcctaagcttgcaggcccagtatttggaggatgggttagtgtttggtaataaagcaagggctgatttgt

SEQ ID NO: 1258 - DNA, 19206 bp, Homo sapiens
agaagtggtgacacgcatctttttgataaggtcagaggctatgacatcaagctgcttcgatacctgtcagtcaaatacatctgtgacctgatggtggagaacaagaaggtgaagtttggcatgaagtaagtacaggcgcccactacaaaatgagcagaggcagtgtgtacagatttgcagggctggcgttagtatgtagctgtcactgcgtgctggccttcttacaaagggctttctgtacattatctcactgtatcttcagacagccctgcaaaataggtaccagtgtccccctcttacagacactgaagcacagagagatgaagtagcttgctcaggttgtatgttagtgactgaggcagccatcagtctctacccagtgctctgctgccaccttctcttacatatctctgtattttttttttccagctccatgttctatgccatgtgtggcagattagaatctcttaatttttttaatttatttttcatagtgacagagtctttgttgcctaaagtggtctcaaacatgtggccctaagcagtcctcctgcctcagcttcccaaagtgctgggattacaagaatgagcccactgtgcctggtcctagaatttcttttaaaattgaacaaaaaaatcagcatatattcaaattttacttcagtgactgctgtcatataaaaataacacatatggaccaaattcaaatataagaagtcaaaactaaaaaatagagcctgggttagtgatgagacttcaggaactttttccaaaattttgttttttaaatgatttttaaatgtttttaaatgatcctaaaaggtggtcttagaaaataaggcatactgaggctaacgttagagctcacctatcttcagatctgaatattgccttattcctcccatcctttatctgtcagagtccccagtgtttattttcagatgctgtttgttcaccctgttcagaagtgggctcagtgactattagagaagacaggagagcagaaaaaaagggttcccataggatcatattatttggctctcatctcattcctgggtcagagtggctacactgtgtgcattttggggtcaggtggaaggttgttttccacctttaggctctgattgaggcttgctgtagtattagagggggagtaacttcccttggttgatatgttggaataggggcagagaaggtagagttctttttttgacatggagcctcaccctgtcaccctggctggagtgcagtggcacaatcttggctcactgcaaccatctgcctcctgggttcaagcaattctcctgcttcagcctcctgagtagctgggattacaggagcgcgctgccacaccccactagttttttatatttttgatagagacaatgtttcaccatgttgtccaggctggtcttgacggggtttctccatgttgggaacatgacctccagccgatgcacccagctgaagttatagttcttaattgtacaaagtaggcactgctgaagggaattattaacaatgaagaatagttttttttagcagaagcttcatttgtgattataacccttatttggggaatggtgtgtgtttgtgtgtgtgttgcgacactgtaacacattgtatccttgtcttgtagtgtaacctcctctgagaaggtggacaaagcccagcgctatgccgacttcactctcctctccatcccgtatccaggtagggggctctcttctagtggcaggcatcctaggactggggaccttgggggccatgagcaagccctctctacttagttacactggcgccctgggagctttcctggagggtttgtgtcaggcagtgtaggacattttggttcccagtcacaggccacactaagcataggatagtgtcctggggaaggggctttccactcaaggggtttagggattttgtactgtcactggtcctagccacagccttgagtgaagtacttcacccctccaagcctcaagttttctcaggagcttggaacgatttagctcagttttgatttatatgaaagtggtctgtgcatgaaaatactgtttaagtgtaaaatgacattattagtactctgtgtgagcaactacacttgctgctgtagcctgagtggatgtcaccctttgggtgcatgtcttgaagtgattgagttatttatggaaattgccccaggcaaggctattctggtggtagaagaacacataattgctatgttcccagtaactggacagtggccacaccatgttgcaaagcacattggtatccacaaagctgcatttgttcctggcacataaaagtgtgtgcaacctgtggccagggctgtattctctgcactggatattaaagctgttggtctagtgtgtagcattcaagttttctggcaatacctgcctgtttagtaagggaggccaaggacctctaacatcagtgcaagatgttgtcagcagacaacagggagtaaatactctttctccttaaaacctctctcctatttctcagcaccagcatctgccttcagtgttgtgttggaccttatctcctcaatattggggccacatagccatgagcaagggcaggcaggttcatctagtgccttgtgggaggggtgtcctcatcatgtgcaagctgggggcaggaatcccagccctagcactgtgtctccttgaacaagtcctataacccttctgagcatcagttccctccttaataaaatgaagataatggtgcttatttaagagtgaagtgccagacccctccataacaggtgtcctgtaaataacaggcctaatgatgagtagttgggaaagcttcagggaacctccttttccctaaaagcaagtttgcgctgatgcagatgatgatgatggtggtgatgatgttgatgatggtgatgatgatgatgatgataatgatgctggagtgagcttggcagtatcagacccacactgatgggtgtatcctacctaagggggtccacactggaaccactgggtaactccatagctggttttcagacatagtttccagctcccaggagatgcttcgggggttccacagactgaactctgcaggtttgcactgcctgaggaaccaggcatcacttcgtttaaatttaggttccaagtaggacttggtttggaaaaaatagttttgctagaagtataaataacattgctccaaaatagtagcacagtgtcctttctgctgtagtttggcaacttgttacaggactcccaaaatgttatcaccctttgacccaggtatttttctaataattggtcattaggctgtaattcagccacttggtgttgaggacgttcatcatgatgtctatttgtaatagcaaaacaagaaatgttttcactaatcagaataatgattgaatgatggcacatccctcagtagaatgaaatattgtatagtcatagaagaatcgaaaatgggctgggcatggtggctcacgcctttaatctcagcactttgggaggcctaggcagtaagattgcttgagcccaggagttcaagaccagcctgggaaacagcgacactctgtctctaccaaaaataaaaaatagaaaatgcttacactttttgacatggaaaacgtcacagagcttaagataggcaggatacagaatcacatagtatactctcaactaagtaaaggaaaatgtgcttataaaaaaggcttaaaaggaagtgtgccaaaatgttaagatgcctgaatgctttccccaaagctttttttgttataaaaggcatcaaaagccgagtgcagtggctcacgcatataatcccagcactttgggaggctgaggcaggcagatcacctgaggtagggagttcaagaccagcctgaccaacatggagaaaccctatctctactaaaaatacaaaattagccgggcgcggtggcgcatgcctgtaatcccagttattcgggaggccgaggcaggagaatcgcttgaacccaggaggcggaggttgcagtgagccaagattgtgccattgcactccagtctgggcaacaagagggaaactccgtctcaaaacaaaaataaaaacaaaaacaaataaaaggcatcaaaagagaccaaaatttgtatgtactgtatctgacagtgtatgtgtgttagggagggtaatgaggatcaataaaaataaaaaagctggagatgggatgagacaccattgcacacccaaataagggggacaggagaatcactttttatttgatagacttgtgttcttgtgggtttttttacataacttctattactttataataagaaaaagaaataaaattactattacccaaaccaagtcacgagctgcactttgatgctatttaaggaatctcagttgagccctgtgatgactttgaggctcatacaggtactcagtagtctcagttctagatgtgtcacactatcttgggcccttggaaatgagaagtattctgggatcgtttctttcagcacaccaaaatagatggtcccaaattctgcagcacaaatctaatttgtttcctccttgagtgaatggcacttctcatcctgcttttggtccctctcctcttgcctgacagtggttccgaagcctattcaggtaatgaacattaggcatttgccctgagtagagtctattttaattctgtttctcacaaaaactgcttctgcatcataggcgggtctgagctcagcctgaggcctgcagtgttgatttgagcagctagagttgggaaaacagcacttcacaagagctctgagggataattgctgtctcttctaaacctgggctcataactcagggcctctgtctgagatctataattcttctttctcccagtgaggctcccaagaataggctaaagtgttatggctgaagattgtttccagacttctcgaggcctggggattagagtgcagggtgtgtatggaatgaaagccacttctggaaaacatgggctgggtctccagggaagctttcctatcttccctgaggtggcctcagacaggaacttggcccaagagttgctgcgacattccatgtgaatcttctttgtggctacttcccctgaatttggacgattgttttcttgcctctgggacctcaccagacttggaggtgtggccaaagccatgtgccgtctgaagtttgtgtagaggccctgattgaggtgctgagaataactgcaagctagccaagtgccttctcccaccatatttcttgaagccaccaggagctccttggaggaccagatgctctctgtgctatagtcagactcagcaggggcaggccacagcccggggggcaagacgcattctctctgaccaaggcagccaactccaagcgcagagcaaagtagttgacttcacgctgtgggctggcactgtgggctcttgttgcagtggcagcgtgatgacaatagtgtgctgccatttgagtgtcacttggaccagtgcagtgctaggtgttttatatgtattatgtcatccttaaacagccattttacaaatgacaaaatcaaggcttagagacattaaacaacttgttcagcgttacagtgttaagtaaaaagctgagattttaagctgggaatgttgccaaagccctattctctccagtgtttctctctgttcctgagggcttgtcctggtggagttacttatgatttttccaccaaagaatatagaaaagtgcctctttgcttgctttgttgggcatggcagtgtctcttgagcaccgggttttaggcactgtccgtgggcctttccagtatgttaggatgttcagtcttcactaaaagcctgcaaggctagcattatttgcccccattttagagaagaggaagagtgatcctctgcagctaggctgcagtggctcacgttgtgagtcatgcctttgtttactgggattggcactacagagacctgtaggacaaagggacttgcaatgtgggggaagtgactggtgaccagtgagcatagatggagaaagttacaaagaggctgagagcaggcagtgcctcgtggaaaaggcatgcagccaggaaaccagaggggctctagaggctcgcccctggcttttgcccacccgtgtcagccttggcctcactgaagccactagcttggagaagtgtgagttggcggccccctctccacagcactcagggacctgggtctggccagggctgtctcagaagactttgggctgggaagggagatgtcataactctgcccttcttttccaggctgtgaatttttcaaggaatataaagatcgggattacatggcagaagggctcatatttaactggaagcaggtatgagcaataacatacatcaaattggatctatgtctctttgtaaagggaggccaaggagaacaacaagcagtctttggggaaaacaacaagcagtctttggggaaaataactcccctttcctccctgattgtttctgtcttcctctccctcttctccttgtatatacttgttaaattttcatcattatactttcctcccccctttatttctcttttgtttaagggaatttttcagaaacaagataggaaaagcccttcccttctgtactctctgtgtgaaagctgggggcagcattctttgccttccccagcctgtaggggcaggctatgggaaacctgccggaagctgaacacatattgatcttgcatgtttcagcaacagacatcaaatgtccgactgaaaaactcctactcagctatactgatctggtcacattgatttttaagctgtcactcccaggtagcacaggtatctggcccagagaaggcaagcactgcctgtggtagtcacagcctcaggactgcaagcttccccatcacctaagcctcctctggtggccaacccacatctcacaggagtctttctgtccccaggactacgttgatgccccattgagcatccccgacttcctgactcactctctgaacattgactggagccagtatcaggtgaggggcctgactcaagcattgagggcaggataagggagtggtgaccaaggagactcttgatgcctgccccacaaggccctcgtgtgtttgcctgatgggctggcttgtgcactcagatgcctttggccctctgtcctctcagaaaggaggaattgtgtgtccgttcaactatctcctgatttgctcatgtcccagaaaatcaaagctttctgaacgtgactcattcaaagatttgcatccaccagggggttctgtttccagaggacctcatagagtctgctattccagatctgggctttagttacttttacatttttccttttaaatgtgtgttcagccagaggaagtacagagctgcctgacctcatttgattatagaaacattaaaattacttccaccatgctcttctccgtcattgcacaccatggaaggggcctctagtcttactggaaacatctctctacccttagcccacacagtctgaaggctgccagcagctttgcttgccacttgcttcagacagaacaagtagttttgtttttctgcgacctttcccatgtcctgttcctctgcctggctgccacctctcagcttcctcttgtctggctgacatactgcccttcaggctttggctcgagtgtctgcttcaggaagacttccctgatctgcctcttccttatccctggcgagttggatgcctgcatctatattcccattaaccccctgggcacatccatcatggaattttccactgagctgtagtcactgatttagagatctgcttccctgaaatcctggaggacagggacccacagcttgtgtgtcccagcacagaaacaggcacagagcctagaacttgaaagactgagccagtgagcaacagaaaacattctgcctccctgctagtttcccctgtccccaggtctggacagctcccacccagccttgagatctctctttctttgaaaggctgacccatctatgttaagcaactgggtgctcctagatcaccaatgtcagtaccctgttgtcctgatagcagcaaggtccatcttgttttctctatatatatccagaccctaatcacaaggtttatgctcacagcaactgtttgagtgtatgaagtagggtgatgtcagagttccccaatgcaggtgtttgcaagagagggagcactggggaggaaagcagaccagttgtttgttatggtctggaagcctggagaaggaacaggtttggggtacctgtgctgtggtctcatgtcccaggctgtgcctagacagactgagtagataaaagaaccggcaggcttccttctttatgtgctgcatgcagaggtcaagtagactctgccccaagccaccctctttctggtcccttccggcaccattttttctccttatgcaggtacaaactggatctgatgaactactcagcaaatgagatgtgacagttccaggcactggtcccaaggatgtttgcctctttaggaaggggtcctgtgcgtgtgaggaggtactctgcttagtagatgcaggccctagatctaggtcccagcttgcctggcccttcctgcaaggctctgtggccttgaacagatgacctcacttccccctgaaaatggtgttggcagtacctatttcagagttgtgccaggctcaaatatgatcactgcttgaaagggactcctgaactgaaataccagacagattgtaatgataattatgaagaggctgctagctagctaattcagggaagtgaacactgaaacttccaggcgtgaaggcagcagggctggagtgtagcaggcaggcaggcgcctcccaagaggccacctcttcagtgttgctcaacctgttttgtctcactggggctcctagcatgctcttccttggctgggtgtgggctctgccttttctgcccgcaaagccctggggtgccggtaccctgttccttttcaccatctccccaggtgatctcatccatcgtccacaccatgagcccacagccaggcctctctgatccatacctgcatcacctttcacacatgtcccttcaggcggcccctcagactcaagctgtccagagtagagttggccatggcccaccatttacccagatgctcacacctgaaactcgagttctttgctcccaccacatccatcaccagctcccatcggttctctagtctctgcccctagtgcaactgcaatccttcttgccctcgtctcctgtgcagtgcctagctcaggccaccactgtctcagtgcatctcacagctgaacctggggcctcactgaggagtaactagaaatgaagtgctcagatagcaagcactgaaatgatagagcagggccatcactgtcacccctgccttaaaacctaccactgacttcccattttcctcagaatacaatgcaagaacttgtacatggcctacccagctccatgcagtctggtcttgcctgttcttgtgaccagctgatcttcctgcagcccatggccgggcacggtggctcatgcctgtaatcccagcactttaggaggccaaggcgggcagatcacgagggcaggagatcgagaccatcctggctaacacagtgaaacccaatctctactaaaaaattagccgggcgtggtggcgggcgcctgtagtgccagctactcgggagactgaggcaggagaatggcgtgaacccgggaggcggagcttgcggtgagctgagatcgcgccactacactccagcctgggcgacagagcgagactccgtctcaaaaaaacaaacaaacaaacaaacaaaagaaggcagccctctccaggttcgcacgtgctgttttctctgccagaaacacgtgtctcctttctctgttgcttatgctgtctcatgtcatcacctctgagaagccttctctgatgtccctacagatcaggcttggctctccagtcatatggttacacagcatcctagaggtccccttttagttgcacacctgcagtggttaactttgtcttccctctcccgtgactccatgattgttgaggtcatattcacccttgtgtgcctggtgccaggcccttcaggaggcatgcagtgtgaggcttactgaatgaatgaatgagtgaatgaatgaatgataggagcagttgtggcaggacacatgtgtcttgctgccctccatgtaaccgaattgaattccgtagaggtatgccccttctttctgtgtcctaagacccctccctggggctgctgtccctcaggcactcagcattgccccagctatgaagaagcagcaaggaacattctgcaatgacctcctagtccctgaacactaagccttagagatgccaaaacagcctctgccctcatggggattagactaggaaaagaggcaacaacgtaaccatcacctacattacagtttttaccagtggtcacagaaaccccaaagagaagataattggtctgggcctttgaaggatgagtaggagtttaccaaccagcagaaagagtactctaggcatagaaacataagcagaggcatggcatttagctcagctcccagagactttttcatgaagcacgtaggatgagagagtcaggcacgagccttgtttgtttgtttgtttgtttgttttttagcatatctcctcggtcatcactttgagcagttccctcagacttctgcttcttactctggtgttataggaagagtacctacagtgattaagaatgtggactttggagtctggcagggctggatttatccctcagctcagccgtgtgaccttggccctctaccagcccagccctccccagcctgtagttcctgccccagccttgggaacttgctgcccctccctgatggtcagcatctcctccagacagccgtcatggtggctggcattccgcagctctcttgtcctcggcagggcctgccctccccggctgctgcagtcttcccctagcccacctgacgctcactgggcttggtacagtgcagctcttacctccctctcctgcttttccttgccctgtgagaatcactgctccattggcaatggtgtgtctgacacgttgagccagatgagttgagagaccccttgtgcagctactgataatgactttattagcacagcactacagcgcctgtctctgtagtcactaaaagtgggtcagaactctccaggggcgtgggagggtcaggtaaatgaggctgttttaaattcctgggaaagccactccaattacaggtgccgtgttccccctccccctgggaagtgctgttttgctggcatgcgtcaccctctctgcacagccccagaacactgctaagcaattgtatcttaagagaacagagactgccccagctagggaaaagggtgccgcaaaactgggtcaggcccttccatggagttccaggttctgagtgggctgtttcttagagggtctggactagaccttgcacttgggctagaacagaggttctcatctctttaaagcttttgcttaattttccatctcccacctcatgggcctccttttttaaaagactttccctgccagacagactccatttattattcatcaaaagatagtatgcagtaaatagcactaaaaagcaaatgaagcatgtttgaaaaggttgatgttttagtttctgtgatgtgatggcatatgaaggaatgaatctttatgtggccatttggagacattggctacagcctcagggctcttcgtttacctttactggcttcctggacagccacaccaggagcccagcacttagaggaccctaatgtgggcagggggctctgggtcaccctggcctcagcatccgtttctgttcctcactctcacattgggtcagagccccccccccgcccccgccccccgagtagggggtccacaggctgagtggtggagggagaggtggtaggagctgctggagatggaatacgaatgtcccagattatctgggattcaaaacctatggtctgtaaccaaggaccttgtgtagttgttgccccagaataactcttggcattttattttttaaatactttaaattctaaatctgagttaatgtccatttcttctcacttttctccaacagtgttgggatctggtgcaacaaacacaaaactacctgaagctgctgctttccttagttaacagtgatggtgagtctgtctcctccagagccctcgagccactgcacccttggggagttcccagttcattctgcctcaactgtatgtttgttggagttgcacaccttacttttgtgctgtgggagaggaatttggggagttcctagaatcccagaggctgggtgggatttgtccattggtggctttattccatgtcctcaaaatcctagaaaacaaaattaagaactccttaccatctatgccgtgcacagggtattttcacactgtctcagcattgcacaacagcattgtgtgtggggccaggatgggcctctcattcagaaagatgaggcatgagatgagagaatcaatccgggctgctcagtggatgcacacagcctgtagaggccctgttctccagagtcctccacccagtttggctgttttgattggatgggcctggcttgctcaatgtctctagggcagacggactctaaatccctggtagcaatcaggacttctgtaggagttgcacttgctcaaacaagtggaaatgcattggcttatggaaccaagaaggcccaagaacagagccaggtgaacatcataaagaatctttctctgtttctcaaaaccactgtcttggcctcatggctggcagccattccagacctgtctcccgccatcttagctcccccaggggagactacctcagtctctggagttccagtaaaggtctgagcttatgctcattggcccagtttgggttaagtgcccatccttgaactagtcgctggagggagatttgccacaaagtcgcatgccagcccctggagccaggcactggttctctagctgcgggcattagcacccctcaaagcacttctggaaacgtgtgtctggcatgttaggtgctgcagaaactagagggtggggaaggtagtactagcatgtggttagagttggccagggatagtcagtgtcctgcaattcatgcagccctgcacactgaaaaattgcccactcccgctaccccccaaaaaaatacttgtcgtgccctctgagaaactgggtagggatgtcatccctgcctaaatgacctgggcaaagtggactgtgtaggctgcactgtgtccccagaagtacactgagaactatagtcagaaggaagaaaggaagctacaaagccagacgcctgccactcacccctttctgggactaggctggagaagagccatggggaggccactggggaagacagaagctggtggggcctggctccctccaccaggccaagctggtggtacttcctgctcatcggcccatgtctggttctctcctgggcatcctctcctgcggttcctgagtagatgacagcgggctgctggtacactgtatctcaggctgggatcggacccccctcttcatctccctcctgcgcctttccttgtgggctgtgagtatgaatcggcccctaccaagctctgctctttgggtgtgttaggattgtctccagacagagggtggagcaggggatgccatcgctcagagcagatgtgtttaaccctgtccttccgggtgttcttcagcctgcgttgtcactgggtctggttatggttcagctcctggggatgagaagagggctctgtcacatctcctgtggtctcttccaggatgggctcatccacacgtccctgaagcccactgagatcctctacctcactgtggcctatgactggttcctcttcgggtaagcctttgcaggagttgggttttggggccttagtaacagtttctatatgtgagttgtgtggtggctcccttgacaggggctggaggtaaggataattccacccctcgagaaggaccgaagctgctgatcaggccccacctgccacgctggtgccagtgacacagtctgtgtctggtgaccctgtcctcttggccttgtcatcttggtgctgctgactttgcctctctaccctccttttttcaggcacatgttggtagatcggctcagcaaaggggaggaggtgagtataccacctacgacttgtgggcacagctcagcactgaaagaggggcagtgggtagcctgtctgacttccacgtgttaggggcagctccttgccccaggtgtgcagggatgtggccccctgtcatctcctcctgaggcagcgtggcaggacaggcaccagcacagtagctctgtgttctgggcctcgcgggcctgtgctgtggagaggatacaagcccacacgtcggggtgagcagttacatgacagccttggctgcctgtgatcttccctctcacaggccacttgttctctctgctcagctctggaaccccatcctctaaggcctttctgtgcccctcgtctctgcaactaaaatgcagcagcacttctcttccccaccctcccgtcacacccttcagccacttttcaatgtcagggtgcccggcagcagggtcctgcccctgatggttgcctccaggtcccctttcctctggacctgctcttccttcctcttccaatgtgctcagcactctctcccccatgcctgtcgccttttctgcgcccccatcctgtcggccactctccgcaggccttacctgttagtgcctgttttccttgcaatgcaggtctggagtcggccctgagtgtgttccctagttggcccccttactgcctgggtgaccttgggtggtctgcttcaccttgagtctcctggtgtcaagcgtgagagaatgagtccaggtgcccagcatggaagctgtcccacggtgtcagctccttctctttggcccccactcccccattttcccaaagtgtgtttctcatctttctcaccctcatggggctgcttccttcctgggcatcttatctcgcacctcctccttttgttcctccgtctcagctgctcctctcctcttccaaatctcttcttctgaacacttatcgcgtctgccagggctgtagagctctaagcctactcctcagaggcctccgtgaactccctcagaggcggtgactttggtattgaaatcagtgcttcaagaagcctttttgtagcctctcattttgggactttcccggagctctgggacattctaccctccctgtagtctccctccccgacaaagcagaccagatctgcctgcagagggtggggctgaaccaagtagtgtctgagtttgagcccttggcatctctccatgtagacaagaggctctcctcagctgcaggttcatcttcaggacctttctgttaccccccccagacaatccagacactgatgcgtccaaagcaaaaaaccccaggcctattagttaaacacgattgtgtcgtctccccacctcaccttggaggttcggggaacatattagcatattagcatattaaagactacaaagtctgtagtgaaaacacctgtttaatcttaagtaacacaacattttcatactgacccgacctgggcagccctctccttgtggggggcagctccttgcctgggcacacagagataagaaactgacagggctcgtgggatgccaagtagggatttctctgagagaggggctcatgggccaggcctttgggaatcaccacagaaatggaagcctggtgtgtgcttcctggaggcccctgggcgaggcactggctggaagggagaagataatttgctcatggaggtgggggtgtggctggggtcaggagcctcctgcctgtgcccacctcaagcttaagacctgaccctcacagctcctcagcaagggaggctctaggccagacagtggctgcccacacccgcagttctgaaccagtattttgggatgcctcccctaaaaaatgtgattcctttcctttccattatgttcctgctttgtccattattctccctgcgcccaagtcatctctcccgcagctatccttccctgttagcatctctccctgggaatcttagaagaggggagagggtgccatttcactttatcctttttaaccacttgagaacacacatgttgaatttaatgatggtttgaaaaatcactggcctggctgggcacggtggttgacgcctgtaatcccagcacttggggaggctgaggcgggcgggtcatgaggtcaggatattgagaccatcctggctaacacggtgaaaccctgtctctaataaaaatgcgaacaatgagctgggcatggtggcgggcacctgtagtcccagctactcgggaggctgaggcaggagagtggcttgaacccaggaggctgagcttgcagtgagccgagatcacgccattgcactccagcctgggtgacagagcgagactctgtctcaaataaaaaaaaaaaaaatagctggcttaaccctggcagtcccaggaaggaaatcccttcctgccttgccccggcccacatgcatctgccaggcccttccaaggcctctgtaccacccacaccatttatggaccagaacacccacacagtcccacagcagggccgctctccagcaggggccttgacctgagtggctggccgccctcccctgggagttctgctgccttggttcttctcattgtgcgctgctctttggtctcctttagattttcttcttctgcttcaattttttgaagcatattacctccgaggagttctctgctctgaagacccagaggtaagtggaggcctgcacgtgtcatgctgggccagggcgctctgagaagggctgctccctgggaggcaagaggctgaccacctcattcccgccctgcctccctgcttgttgggctggtgctccctcctgccttcgctctgaggccagggtaggggtccctgctgaaggccactggtgaagaggctcttctgcagggaaggccatgtgggggtcaacttggagtcacactagcagacaggctttgggacagacgagtggtctctcatgaccaagaaaacaggtgtgttgctgcagggagaagccagcccaggagtaggaggactcttaactcccagtgtgcccaagctgactcttgtcctccatggcctacagcaggaagtgtggctgaacactgcagccccctacaaaagggcagaagtctgcttccggcctgggaaatgcaagagtcttggctggcaactgccttaggacccctgtaagagttggggtcttgcctgagttggtttgccttcctaatccgagctacaagcatgttgggccacacttgaacgctcagggcacaagctgatgaggaggatgcagaccttgctgccctcagaaatcttcacctgtgtgttggacagagccttgcagcgtgggtcccagaagtggccctggtgtcttataacactccctaggctaggacccgtctccacaagttgccagtgaattgagctgctttccaggacaggcaggattgggaacgggggacacaataagaccccagatagatctggaatttactgctccggcttccatttctaggaggaagagtttgccagcccgggatggaggcttcaccctggaagacatctgcatgctgagtgagtcctgggccccaacagacttcccttcctccatacatcttcccgtgtacagatcaggcaggaactgtttgtgctaagaggttttttgtttttttttttttcttcccagttatgtggtatagaaaaggtgggggaccagtagtgggagaaggtaacacgctgactgatggcactggcttcttttaggacgaaaggaccgtggcagcaccaccagccttggcagcgacttctccctggtcatggagagttccccaggagccactgggagcttcacctatgaggccgtggagctggtcccagcaggagcgccaactcaggcagcttggtaaggggccagacttggaccaaggtcactcacagctgtggcccggggccatcagcaccagggagccaggctggagccccaagaacaaagcaggcccccaacagaagagctgagaggatagctccgtgctcctgctgtctctactgggcctcagaagtcagccatctggttggtgaagggcactgcctgtggtggcccaggaacataaagggctagggctccctgtgggacagagaagcagctgggcagggtagggcaggggtctggggaggctggtattggaggagctccattttatcatttgtcggggagatagggggccattttggaaaaagaaaaccaaaaggtaggtgtaagttgatggggaattgggaacttgagggtcagctcctttgagaatctcatgaaattgagaccctgatgactttcaccctggacagatggctcaagatgttgcataacaaagtcctgagtggtggcttatatttataatcccagcactttgggaggccaaggcaggaggatcacttgagcccaggagtttgagatcagtctgggcagcataatgagaccccgtcttttagagggggaaaaaagattttgcataacatatggaggtgggcagtgactgaagagtgaggaatcattttctagcacatacttcaagaccagtaggctggtgtgatttggatgccacaggccctccataaagacccagccctgctgcccatggccctgagctggagagagtgctaatgtttgccaactcatgtgatgttttcccagtggaagtaaagcctaggcctgaaattcagtgagggtgggcagagggctttgcctgcagtggcccccggctcacagccctgctccttccactgcaggaggaagagccactcatcctctccacagagtgtcctctggaaccggccacaaccctcagaggaccgcttgccttcccagcaggggctggcggaagccaggtcttccagctcctcttcctcaaaccattctgataactttttcaggatgggtagcagtcccctggaggtccccaaacccaggtgaggagctccaaagcccttgctgttggaagtgcctagctttcccccttaataagactggagggtcgggggccagcacctgagctagggtctcaagatggggttcct

SEQ ID NO: 1259 - DNA, 31348 bp, Homo sapiens
agaagtggtgacacgcatctttttgataaggtcagaggctatgacatcaagctgcttcgatacctgtcagtcaaatacatctgtgacctgatggtggagaacaagaaggtgaagtttggcatgaagtaagtacaggcgcccactacaaaatgagcagaggcagtgtgtacagatttgcagggctggcgttagtatgtagctgtcactgcgtgctggccttcttacaaagggctttctgtacattatctcactgtatcttcagacagccctgcaaaataggtaccagtgtccccctcttacagacactgaagcacagagagatgaagtagcttgctcaggttgtatgttagtgactgaggcagccatcagtctctacccagtgctctgctgccaccttctcttacatatctctgtattttttttttccagctccatgttctatgccatgtgtggcagattagaatctcttaatttttttaatttatttttcatagtgacagagtctttgttgcctaaagtggtctcaaacatgtggccctaagcagtcctcctgcctcagcttcccaaagtgctgggattacaagaatgagcccactgtgcctggtcctagaatttcttttaaaattgaacaaaaaaatcagcatatattcaaattttacttcagtgactgctgtcatataaaaataacacatatggaccaaattcaaatataagaagtcaaaactaaaaaatagagcctgggttagtgatgagacttcaggaactttttccaaaattttgttttttaaatgatttttaaatgtttttaaatgatcctaaaaggtggtcttagaaaataaggcatactgaggctaacgttagagctcacctatcttcagatctgaatattgccttattcctcccatcctttatctgtcagagtccccagtgtttattttcagatgctgtttgttcaccctgttcagaagtgggctcagtgactattagagaagacaggagagcagaaaaaaagggttcccataggatcatattatttggctctcatctcattcctgggtcagagtggctacactgtgtgcattttggggtcaggtggaaggttgttttccacctttaggctctgattgaggcttgctgtagtattagagggggagtaacttcccttggttgatatgttggaataggggcagagaaggtagagttctttttttgacatggagcctcaccctgtcaccctggctggagtgcagtggcacaatcttggctcactgcaaccatctgcctcctgggttcaagcaattctcctgcttcagcctcctgagtagctgggattacaggagcgcgctgccacaccccactagttttttatatttttgatagagacaatgtttcaccatgttgtccaggctggtcttgacggggtttctccatgttgggaacatgacctccagccgatgcacccagctgaagttatagttcttaattgtacaaagtaggcactgctgaagggaattattaacaatgaagaatagttttttttagcagaagcttcatttgtgattataacccttatttggggaatggtgtgtgtttgtgtgtgtgttgcgacactgtaacacattgtatccttgtcttgtagtgtaacctcctctgagaaggtggacaaagcccagcgctatgccgacttcactctcctctccatcccgtatccaggtagggggctctcttctagtggcaggcatcctaggactggggaccttgggggccatgagcaagccctctctacttagttacactggcgccctgggagctttcctggagggtttgtgtcaggcagtgtaggacattttggttcccagtcacaggccacactaagcataggatagtgtcctggggaaggggctttccactcaaggggtttagggattttgtactgtcactggtcctagccacagccttgagtgaagtacttcacccctccaagcctcaagttttctcaggagcttggaacgatttagctcagttttgatttatatgaaagtggtctgtgcatgaaaatactgtttaagtgtaaaatgacattattagtactctgtgtgagcaactacacttgctgctgtagcctgagtggatgtcaccctttgggtgcatgtcttgaagtgattgagttatttatggaaattgccccaggcaaggctattctggtggtagaagaacacataattgctatgttcccagtaactggacagtggccacaccatgttgcaaagcacattggtatccacaaagctgcatttgttcctggcacataaaagtgtgtgcaacctgtggccagggctgtattctctgcactggatattaaagctgttggtctagtgtgtagcattcaagttttctggcaatacctgcctgtttagtaagggaggccaaggacctctaacatcagtgcaagatgttgtcagcagacaacagggagtaaatactctttctccttaaaacctctctcctatttctcagcaccagcatctgccttcagtgttgtgttggaccttatctcctcaatattggggccacatagccatgagcaagggcaggcaggttcatctagtgccttgtgggaggggtgtcctcatcatgtgcaagctgggggcaggaatcccagccctagcactgtgtctccttgaacaagtcctataacccttctgagcatcagttccctccttaataaaatgaagataatggtgcttatttaagagtgaagtgccagacccctccataacaggtgtcctgtaaataacaggcctaatgatgagtagttgggaaagcttcagggaacctccttttccctaaaagcaagtttgcgctgatgcagatgatgatgatggtggtgatgatgttgatgatggtgatgatgatgatgatgataatgatgctggagtgagcttggcagtatcagacccacactgatgggtgtatcctacctaagggggtccacactggaaccactgggtaactccatagctggttttcagacatagtttccagctcccaggagatgcttcgggggttccacagactgaactctgcaggtttgcactgcctgaggaaccaggcatcacttcgtttaaatttaggttccaagtaggacttggtttggaaaaaatagttttgctagaagtataaataacattgctccaaaatagtagcacagtgtcctttctgctgtagtttggcaacttgttacaggactcccaaaatgttatcaccctttgacccaggtatttttctaataattggtcattaggctgtaattcagccacttggtgttgaggacgttcatcatgatgtctatttgtaatagcaaaacaagaaatgttttcactaatcagaataatgattgaatgatggcacttccctcagtagaatgaaatattgtatagtcatagaagaatcgaaaatgggctgggcatggtggctcacgcctttaatctcagcactttgggaggcctaggcagtaagattgcttgagcccaggagttcaagaccagcctgggaaacagcgacactctgtctctaccaaaaataaaaaatagaaaatgcttacactttttgacatggaaaacgtcacagagcttaagataggcaggatacagaatcacatagtatactctcaactaagtaaaggaaaatgtgcttataaaaaaggcttaaaaggaagtgtgccaaaatgttaagatgcctgaatgctttccccaaagctttttttgttataaaaggcatcaaaagccgagtgcagtggctcacgcatataatcccagcactttgggaggctgaggcaggcagatcacctgaggtagggagttcaagaccagcctgaccaacatggagaaaccctatctctactaaaaatacaaaattagccgggcgcggtggcgcatgcctgtaatcccagttattcgggaggccgaggcaggagaatcgcttgaacccaggaggcggaggttgcagtgagccaagattgtgccattgcactccagtctgggcaacaagagggaaactccgtctcaaaacaaaaataaaaacaaaaacaaataaaaggcatcaaaagagaccaaaatttgtatgtactgtatctgacagtgtatgtgtgttagggagggtaatgaggatcaataaaaataaaaaagctggagatgggatgagacaccattgcacacccaaataagggggacaggagaatcactttttatttgatagacttgtgttcttgtgggtttttttacataacttctattactttataataagaaaaagaaataaaattactattacccaaaccaagtcacgagctgcactttgatgctatttaaggaatctcagttgagccctgtgatgactttgaggctcatacaggtactcagtagtctcagttctagatgtgtcacactatcttgggcccttggaaatgagaagtattctgggatcgtttctttcagcacaccaaaatagatggtcccaaattctgcagcacaaatctaatttgtttcctccttgagtgaatggcacttctcatcctgcttttggtccctctcctcttgcctgacagtggttccgaagcctattcaggtaatgaacattaggcatttgccctgagtagagtctattttaattctgtttctcacaaaaactgcttctgcatcataggcgggtctgagctcagcctgaggcctgcagtgttgatttgagcagctagagttgggaaaacagcacttcacaagagctctgagggataattgctgtctcttctaaacctgggctcataactcagggcctctgtctgagatctataattcttctttctcccagtgaggctcccaagaataggctaaagtgttatggctgaagattgtttccagacttctcgaggcctggggattagagtgcagggtgtgtatggaatgaaagccacttctggaaaacatgggctgggtctccagggaagctttcctatcttccctgaggtggcctcagacaggaacttggcccaagagttgctgcgacattccatgtgaatcttctttgtggctacttcccctgaatttggacgattgttttcttgcctctgggacctcaccagacttggaggtgtggccaaagccatgtgccgtctgaagtttgtgtagaggccctgattgaggtgctgagaataactgcaagctagccaagtgccttctcccaccatatttcttgaagccaccaggagctccttggaggaccagatgctctctgtgctatagtcagactcagcaggggcaggccacagcccggggggcaagacgcattctctctgaccaaggcagccaactccaagcgcagagcaaagtagttgacttcacgctgtgggctggcactgtgggctcttgttgcagtggcagcgtgatgacaatagtgtgctgccatttgagtgtcacttggaccagtgcagtgctaggtgttttatatgtattatgtcatccttaaacagccattttacaaatgacaaaatcaaggcttagagacattaaacaacttgttcagcgttacagtgttaagtaaaaagctgagattttaagctgggaatgttgccaaagccctattctctccagtgtttctctctgttcctgagggcttgtcctggtggagttacttatgatttttccaccaaagaatatagaaaagtgcctctttgcttgctttgttgggcatggcagtgtctcttgagcaccgggttttaggcactgtccgtgggcctttccagtatgttaggatgttcagtcttcactaaaagcctgcaaggctagcattatttgcccccattttagagaagaggaagagtgatcctctgcagctaggctgcagtggctcacgttgtgagtcatgcctttgtttactgggattggcactacagagacctgtaggacaaagggacttgcaatgtgggggaagtgactggtgaccagtgagcatagatggagaaagttacaaagaggctgagagcaggcagtgcctcgtggaaaaggcatgcagccaggaaaccagaggggctctagaggctcgcccctggcttttgcccacccgtgtcagccttggcctcactgaagccactagcttggagaagtgtgagttggcggccccctctccacagcactcagggacctgggtctggccagggctgtctcagaagactttgggctgggaagggagatgtcataactctgcccttcttttccaggctgtgaatttttcaaggaatataaagatcgggattacatggcagaagggctcatatttaactggaagcaggtatgagcaataacatacatcaaattggatctatgtctctttgtaaagggaggccaaggagaacaacaagcagtctttggggaaaacaacaagcagtctttggggaaaataactcccctttcctccctgattgtttctgtcttcctctccctcttctccttgtatatacttgttaaattttcatcattatactttcctcccccctttatttctcttttgtttaagggaatttttcagaaacaagataggaaaagcccttcccttctgtactctctgtgtgaaagctgggggcagcattctttgccttccccagcctgtaggggcaggctatgggaaacctgccggaagctgaacacatattgatcttgcatgtttcagcaacagacatcaaatgtccgactgaaaaactcctactcagctatactgatctggtcacattgatttttaagctgtcactcccaggtagcacaggtatctggcccagagaaggcaagcactgcctgtggtagtcacagcctcaggactgcaagcttccccatcacctaagcctcctctggtggccaacccacatctcacaggagtctttctgtccccaggactacgttgatgccccattgagcatccccgacttcctgactcactctctgaacattgactggagccagtatcaggtgaggggcctgactcaagcattgagggcaggataagggagtggtgaccaaggagactcttgatgcctgccccacaaggccctcgtgtgtttgcctgatgggctggcttgtgcactcagatgcctttggccctctgtcctctcagaaaggaggaattgtgtgtccgttcaactatctcctgatttgctcatgtcccagaaaatcaaagctttctgaacgtgactcattcaaagatttgcatccaccagggggttctgtttccagaggacctcatagagtctgctattccagatctgggctttagttacttttacatttttccttttaaatgtgtgttcagccagaggaagtacagagctgcctgacctcatttgattatagaaacattaaaattacttccaccatgctcttctccgtcattgcacaccatggaaggggcctctagtcttactggaaacatctctctacccttagcccacacagtctgaaggctgccagcagctttgcttgccacttgcttcagacagaacaagtagttttgtttttctgcgacctttcccatgtcctgttcctctgcctggctgccacctctcagcttcctcttgtctggctgacatactgcccttcaggctttggctcgagtgtctgcttcaggaagacttccctgatctgcctcttccttatccctggcgagttggatgcctgcatctatattcccattaaccccctgggcacatccatcatggaattttccactgagctgtagtcactgatttagagatctgcttccctgaaatcctggaggacagggacccacagcttgtgtgtcccagcacagaaacaggcacagagcctagaacttgaaagactgagccagtgagcaacagaaaacattctgcctccctgctagtttcccctgtccccaggtctggacagctcccacccagccttgagatctctctttctttgaaaggctgacccatctatgttaagcaactgggtgctcctagatcaccaatgtcagtaccctgttgtcctgatagcagcaaggtccatcttgttttctctatatatatccagaccctaatcacaaggtttatgctcacagcaactgtttgagtgtatgaagtagggtgatgtcagagttccccaatgcaggtgtttgcaagagagggagcactggggaggaaagcagaccagttgtttgttatggtctggaagcctggagaaggaacaggtttggggtacctgtgctgtggtctcatgtcccaggctgtgcctagacagactgagtagataaaagaaccggcaggcttccttctttatgtgctgcatgcagaggtcaagtagactctgccccaagccaccctctttctggtcccttccggcaccattttttctccttatgcaggtacaaactggatctgatgaactactcagcaaatgagatgtgacagttccaggcactggtcccaaggatgtttgcctctttaggaaggggtcctgtgcgtgtgaggaggtactctgcttagtagatgcaggccctagatctaggtcccagcttgcctggcccttcctgcaaggctctgtggccttgaacagatgacctcacttccccctgaaaatggtgttggcagtacctatttcagagttgtgccaggctcaaatatgatcactgcttgaaagggactcctgaactgaaataccagacagattgtaatgataattatgaagaggctgctagctagctaattcagggaagtgaacactgaaacttccaggcgtgaaggcagcagggctggagtgtagcaggcaggcaggcgcctcccaagaggccacctcttcagtgttgctcaacctgttttgtctcactggggctcctagcatgctcttccttggctgggtgtgggctctgccttttctgcccgcaaagccctggggtgccggtaccctgttccttttcaccatctccccaggtgatctcatccatcgtccacaccatgagcccacagccaggcctctctgatccatacctgcatcacctttcacacatgtcccttcaggcggcccctcagactcaagctgtccagagtagagttggccatggcccaccatttacccagatgctcacacctgaaactcgagttctttgctcccaccacatccatcaccagctcccatcggttctctagtctctgcccctagtgcaactgcaatccttcttgccctcgtctcctgtgcagtgcctagctcaggccaccactgtctcagtgcatctcacagctgaacctggggcctcactgaggagtaactagaaatgaagtgctcagatagcaagcactgaaatgatagagcagggccatcactgtcacccctgccttaaaacctaccactgacttcccattttcctcagaatacaatgcaagaacttgtacatggcctacccagctccatgcagtctggtcttgcctgttcttgtgaccagctgatcttcctgcagcccatggccgggcacggtggctcatgcctgtaatcccagcactttaggaggccaaggcgggcagatcacgagggcaggagatcgagaccatcgtggctaacacagtgaaacccaatctctactaaaaaattagccgggcgtggtggcgggcgcctgtagtgccagctactcgggagactgaggcaggagaatggcgtgaacccgggaggcggagcttgcggtgagctgagatcgcgccactacactccagcctgggcgacagagcgagactccgtctcaaaaaaacaaacaaacaaacaaacaaaagaaggcagccctctccaggttcgcacgtgctgttttctctgccagaaacacgtgtctcctttctctgttgcttatgctgtctcatgtcatcacctctgagaagccttctctgatgtccctacagatcaggcttggctctccagtcatatggttacacagcatcctagaggtccccttttagttgcacacctgcagtggttaactttgtcttccctctcccgtgactccatgattgttgaggtcatattcacccttgtgtgcctggtgccaggcccttcaggaggcatgcagtgtgaggcttactgaatgaatgaatgagtgaatgaatgaatgataggagcagttgtggcaggacacatgtgtcttgctgccctccatgtaaccgaattgaattccgtagaggtatgccccttctttctgtgtcctaagacccctccctggggctgctgtccctcaggcactcagcattgccccagctatgaagaagcagcaaggaacattctgcaatgacctcctagtccctgaacactaagccttagagatgccaaaacagcctctgccctcatggggattagactaggaaaagaggcaacaacgtaaccatcacctacattacagtttttaccagtggtcacagaaaccccaaagagaagataattggtctgggcctttgaaggatgagtaggagtttaccaaccagcagaaagagtactctaggcatagaaacataagcagaggcatggcatttagctcagctcccagagactttttcatgaagcacgtaggatgagagagtcaggcacgagccttgtttgtttgtttgtttgtttgttttttagcatatctcctcggtcatcactttgagcagttccctcagacttctgcttcttactctggtgttataggaagagtacctacagtgattaagaatgtggactttggagtctggcagggctggatttatccctcagctcagccgtgtgaccttggccctctaccagcccagccctccccagcctgtagttcctgccccagccttgggaacttgctgcccctccctgatggtcagcatctcctccagacagccgtcatggtggctggcattccgcagctctcttgtcctcggcagggcctgccctccccggctgctgcagtcttcccctagcccacctgacgctcactgggcttggtacagtgcagctcttacctccctctcctgcttttccttgccctgtgagaatcactgctccattggcaatggtgtgtctgacacgttgagccagatgagttgagagaccccttgtgcagctactgataatgactttattagcacagcactacagcgcctgtctctgtagtcactaaaagtgggtcagaactctccaggggcgtgggagggtcaggtaaatgaggctgttttaaattcctgggaaagccactccaattacaggtgccgtgttccccctccccctgggaagtgctgttttgctggcatgcgtcaccctctctgcacagccccagaacactgctaagcaattgtatcttaagagaacagagactgccccagctagggaaaagggtgccgcaaaactgggtcaggcccttccatggagttccaggttctgagtgggctgtttcttagagggtctggactagaccttgcacttgggctagaacagaggttctcatctctttaaagcttttgcttaattttccatctcccacctcatgggcctccttttttaaaagactttccctgccagacagactccatttattattcatcaaaagatagtatgcagtaaatagcactaaaaagcaaatgaagcatgtttgaaaaggttgatgttttagtttctgtgatgtgatggcatatgaaggaatgaatctttatgtggccatttggagacattggctacagcctcagggctcttcgtttacctttactggcttcctggacagccacaccaggagcccagcacttagaggaccctaatgtgggcagggggctctgggtcaccctggcctcagcatccgtttctgttcctcactctcacattgggtcagagccccccccccgcccccgccccccgagtagggggtccacaggctgagtggtggagggagaggtggtaggagctgctggagatggaatacgaatgtcccagattatctgggattcaaaacctatggtctgtaaccaaggaccttgtgtagttgttgccccagaataactcttggcattttattttttaaatactttaaattctaaatctgagttaatgtccatttcttctcacttttctccaacagtgttgggatctggtgcaacaaacacaaaactacctgaagctgctgctttccttagttaacagtgatggtgagtctgtctcctccagagccctcgagccactgcacccttggggagttcccagttcattctgcctcaactgtatgtttgttggagttgcacaccttacttttgtgctgtgggagaggaatttggggagttcctagaatcccagaggctgggtgggatttgtccattggtggctttattccatgtcctcaaaatcctagaaaacaaaattaagaactccttaccatctatgccgtgcacagggtattttcacactgtctcagcattgcacaacagcattgtgtgtggggccaggatgggcctctcattcagaaagatgaggcatgagatgagagaatcaatccgggctgctcagtggatgcacacagcctgtagaggccctgttctccagagtcctccacccagtttggctgttttgattggatgggcctggcttgctcaatgtctctagggcagacggactctaaatccctggtagcaatcaggacttctgtaggagttgcacttgctcaaacaagtggaaatgcattggcttatggaaccaagaaggcccaagaacagagccaggtgaacatcataaagaatctttctctgtttctcaaaaccactgtcttggcctcatggctggcagccattccagacctgtctcccgccatcttagctcccccaggggagactacctcagtctctggagttccagtaaaggtctgagcttatgctcattggcccagtttgggttaagtgcccatccttgaactagtcgctggagggagatttgccacaaagtcgcatgccagcccctggagccaggcactggttctctagctgcgggcattagcacccctcaaagcacttctggaaacgtgtgtctggcatgttaggtgctgcagaaactagagggtggggaaggtagtactagcatgtggttagagttggccagggatagtcagtgtcctgcaattcatgcagccctgcacactgaaaaattgcccactcccgctaccccccaaaaaaatacttgtcgtgccctctgagaaactgggtagggatgtcatccctgcctaaatgacctgggcaaagtggactgtgtaggctgcactgtgtccccagaagtacactgagaactatagtcagaaggaagaaaggaagctacaaagccagacgcctgccactcacccctttctgggactaggctggagaagagccatggggaggccactggggaagacagaagctggtggggcctggctccctccaccaggccaagctggtggtacttcctgctcatcggcccatgtctggttctctcctgggcatcctctcctgcggttcctgagtagatgacagcgggctgctggtacactgtatctcaggctgggatcggacccccctcttcatctccctcctgcgcctttccttgtgggctgtgagtatgaatcggcccctaccaagctctgctctttgggtgtgttaggattgtctccagacagagggtggagcaggggatgccatcgctcagagcagatgtgtttaaccctgtccttccgggtgttcttcagcctgcgttgtcactgggtctggttatggttcagctcctggggatgagaagagggctctgtcacatctcctgtggtctcttccaggatgggctcatccacacgtccctgaagcccactgagatcctctacctcactgtggcctatgactggttcctcttcgggtaagcctttgcaggagttgggttttggggccttagtaacagtttctatatgtgagttgtgtggtggctcccttgacaggggctggaggtaaggataattccacccctcgagaaggaccgaagctgctgatcaggccccacctgccacgctggtgccagtgacacagtctgtgtctggtgaccctgtcctcttggccttgtcatcttggtgctgctgactttgcctctctaccctccttttttcaggcacatgttggtagatcggctcagcaaaggggaggaggtgagtataccacctacgacttgtgggcacagctcagcactgaaagaggggcagtgggtagcctgtctgagttccacgtgttaggggcagctccttgccccaggtgtgcagggatgtggccccctgtcatctcctcctgaggcagcgtggcaggacaggcaccagcacagtagctctgtgttctgggcctcgcgggcctgtgctgtggagaggatacaagcccacacgtcggggtgagcagttacatgacagccttggctgcctgtgatcttccctctcacaggccacttgttctctctgctcagctctggaaccccatcctctaaggcctttctgtgcccctcgtctctgcaactaaaatgcagcagcacttctcttccccaccctcccgtcacacccttcagccacttttcaatgtcagggtgcccggcagcagggtcctgcccctgatggttgcctccaggtcccctttcctctggacctgctcttccttcctcttccaatgtgctcagcactctctcccccatgcctgtcgccttttctgcgcccccatcctgtcggccactctccgcaggccttacctgttagtgcctgttttccttgcaatgcaggtctggagtcggccctgagtgtgttccctagttggcccccttactgcctgggtgaccttgggtggtctgcttcaccttgagtctcctggtgtcaagcgtgagagaatgagtccaggtgcccagcatggaagccgtcccacggtgtcagctccttctctttggcccccactcccccattttcccaaagtgtgtttctcatctttctcaccctcatggggctgcttccttcctgggcatcttatctcgcacctcctccttttgttcctccgtctcagctgctcctctcctcttccaaatctcttcttctgaacacttatcgcgtctgccagggctgtagagctctaagcctactcctcagaggcctccgtgaactccctcagaggcggtgactttggtattgaaatcagtgcttcaagaagcctttttgtagcctctcattttgggactttcccggagctctgggacattctaccctccctgtagtctccctccccgacaaagcagaccagatctgcctgcagagggtggggctgaaccaagtagtgtctgagtttgagcccttggcatctctccatgtagacaagaggctctcctcagctgcaggttcatcttcaggacctttctgttaccccccccagacaatccagacactgatgcgtccaaagcaaaaaaccccaggcctattagttaaacacgattgtgtcgtctccccacctcaccttggaggttcggggaacatattagcatattagcatattaaagactacaaagtctgtagtgaaaacacctgtttaatcttaagtaacacaacattttcatactgacccgacctgggcagccctctccttgtggggggcagctccttgcctgggcacacagagataagaaactgacagggctcgtgggatgccaagtagggatttctctgagagaggggctcatgggccaggcctttgggaatcaccacagaaatggaagcctggtgtgtgcttcctggaggcccctgggcgaggcactggctggaagggagaagataatttgctcatggaggtgggggtgtggctggggtcaggagcctcctgcctgtgcccacctcaagcttaagacctgaccctcacagctcctcagcaagggaggctctaggccagacagtggctgcccacacccgcagttctgaaccagtattttgggatgcctcccctaaaaaatgtgattcctttcctttccattatgttcctgctttgtccattattctccctgcgcccaagtcatctctcccgcagctatccttccctgttagcatctctccctgggaatcttagaagaggggagagggtgccatttcactttatcctttttaaccacttgagaacacacatgttgaatttaatgatggtttgaaaaatcactggcctggctgggcacggtggttgacgcctgtaatcccagcacttggggaggctgaggcgggcgggtcatgaggtcaggatattgagaccatcctggctaacacggtgaaaccctgtctctaataaaaatgcgaacaatgagctgggcatggtggcgggcacctgtagtcccagctactcgggaggctgaggcaggagagtggcttgaacccaggaggctgagcttgcagtgagccgagatcacgccattgcactccagcctgggtgacagagcgagactctgtctcaaataaaaaaaaaaaaaatagctggcttaaccctggcagtcccaggaaggaaatcccttcctgccttgccccggcccacatgcatctgccaggcccttccaaggcctctgtaccacccacaccatttatggaccagaacacccacacagtcccacagcagggccgctctccagcaggggccttgacctgagtggctggccgccctcccctgggagttctgctgccttggttcttctcattgtgcgctgctctttggtctcctttagattttcttcttctgcttcaattttttgaagcatattacctccgaggagttctctgctctgaagacccagaggtaagtggaggcctgcacgtgtcatgctgggccagggcgctctgagaagggctgctccctgggaggcaagaggctgaccacctcattcccgccctgcctccctgcttgttgggctggtgctccctcctgccttcgctctgaggccagggtaggggtccctgctgaaggccactggtgaagaggctcttctgcagggaaggccatgtgggggtcaacttggagtcacactagcagacaggctttgggacagacgagtggtctctcatgaccaagaaaacaggtgtgttgctgcagggagaagccagcccaggagtaggaggactcttaactcccagtgtgcccaagctgactcttgtcctccatggcctacagcaggaagtgtggctgaacactgcagccccctacaaaagggcagaagtctgcttccggcctgggaaatgcaagagtcttggctggcaactgccttaggacccctgtaagagttggggtcttgcctgagttggtttgccttcctaatccgagctacaagcatgttgggccacacttgaacgctcagggcacaagctgatgaggaggatgcagaccttgctgccctcagaaatcttcacctgtgtgttggacagagccttgcagcgtgggtcccagaagtggccctggtgtcttataacactccctaggctaggacccgtctccacaagttgccagtgaattgagctgctttccaggacaggcaggattgggaacgggggacacaataagaccccagatagatctggaatttactgctccggcttccatttctaggaggaagagtttgccagcccgggatggaggcttcaccctggaagacatctgcatgctgagtgagtcctgggccccaacagacttcccttcctccatacatcttcccgtgtacagatcaggcaggaactgtttgtgctaagaggttttttgtttttttttttttcttcccagttatgtggtatagaaaaggtgggggaccagtagtgggagaaggtaacacgctgactgatggcactggcttcttttaggacgaaaggaccgtggcagcaccaccagccttggcagcgacttctccctggtcatggagagttccccaggagccactgggagcttcacctatgaggccgtggagctggtcccagcaggagcgccaactcaggcagcttggtaaggggccagacttggaccaaggtcactcacagctgtggcccggggccatcagcaccagggagccaggctggagccccaagaacaaagcaggcccccaagagaagagctgagaggatagctccgtgctcctgctgtctctactgggcctcagaagtcagccatctggttggtgaagggcactgcctgtggtggcccaggaacataaagggctagggctccctgtgggacagagaagcagctgggcagggtagggcaggggtctggggaggctggtattggaggagctccattttatcatttgtcggggagatagggggccattttggaaaaagaaaaccaaaaggtaggtgtaagttgatggggaattgggaacttgagggtcagctcctttgagaatctcatgaaattgagaccctgatgactttcaccctggacagatggctcaagatgttgcataacaaagtcctgagtggtggcttatatttataatcccagcactttgggaggccaaggcaggaggatcacttgagcccaggagtttgagatcagtctgggcagcataatgagaccccgtcttttagagggggaaaaaagattttgcataacatatggaggtgggcagtgactgaagagtgaggaatcattttctagcacatacttcaagaccagtaggctggtgtgatttggatgccacaggccctccataaagacccagccctgctgcccatggccctgagctggagagagtgctaatgtttgccaactcatgtgatgttttcccagtggaagtaaagcctaggcctgaaattcagtgagggtgggcagagggctttgcctgcagtggcccccggctcacagccctgctccttccactgcaggaggaagagccactcatcctctccacagagtgtcctctggaaccggccacaaccctcagaggaccgcttgccttcccagcaggggctggcggaagccaggtcttccagctcctcttcctcaaaccattctgataactttttcaggatgggtagcagtcccctggaggtccccaaacccaggtgaggagctccaaagcccttgctgttggaagtgcctagctttcccccttaataagactggagggtcgggggccagcacctgagctagggtctcaagatggggttcctaagcttgcaggcccagtatttggaggatgggttagtgtttggtaataaagcaagggctgatttgtagagtggtttgagactccttcctcgaaccctagcataatgcaggggaacccagaagtgccgtggctgttatgtgataggtggggaatagggactgcctccacttgttacctttggcagatcccagcctcctaggcgcacctcccattgtgattgaagagatagatctagattctgagtcccttctggctcccacatctaaagtctgaattggtggggcagtgagaacagtgttagggagctgagctacatgtgtgtggctgggacaaacgatggtgactgcacacctggaaagggagcagctcagccaggatggccatgccagggccgtggctgaagggcgctgcaggaatggtgcctcctgggtgagtttaaagctgagcacaggccagaggctaggattgagggctggtctggcacttggggaaagcatttcctaccactttcatactcccatcgaaagaatcctgtgaattgctttgtgttctaaagttttgagaatgtctagcctttctggagtgaataaagcagcgtgggacttcaggcccttagtgaattccagggaaaaaggggcatttagaagaatgggcatgagctttggcatccatcccaggttcaagtcaagctctgccacatgtccatgtgattttcagactcagtttagtccttggtagtaataggtctgttaagaagaaaaacattctgaaacttctggaaccttcctcccatcacccctctatggtttttccctctgggcaaaaacaggcaatgaaggaagttggggaagaacatcctctgcacataggcagagcagataagcgggaggcaagtgggcgttccagactgcactgcccacaggggccccatgtgctcacccctgcgtgaactcttcagctcagaacactgcctgagtgctggagctgagcctgtgaaaccaccgccacacgccgtctggccccatgggaggtgtggtggaagtggtggggcagagatggggccagacagacaagcccatgtgccggtgccccgtcccatcctgtgtgtgcatgcctgctgccgcaccacccttgtctgtgcccagctgtcctcagggccactctgaggctgcagtggcactgtttgaccctcactgttctaggctgtggctctaggtcatggttcctgcccccttttctgcctgtccagcattgctgaacaactagggaggaaaccagaggttcctcttgtcctctgggtcctgcctcagtcttaactgcccagaatgcagtgagctcccaagctgaggcagcaccccatcacccgttaccacaccctggctctccatctcctgcctgccaaaagatcccactttccaatcctgtgatagtgtccctcagtctcacaggtgactttctgcttgcagggcgtgtctcaggctcttgtagccagtccaggatggccaccaaggccccctcttgggaggctgaggagaattggggttgtcctcctgacctcagagccctgcacatgggggcttggccaagcttgggatagctggaccaagatgggtgcaaggctttgaaaggtgtggggtgggcagctgtgaggtgtttgatctttccgctggtctgtttgggggatgcctgtctggagccagacttcttctgacttggatgcctgttggtcagaggttttgaaagtctagattactcagatttggagcattctaattatgtatttccattaccattaaaattaatttagtctcttatcttaaagtgcctaagggatcctgtcattaccctccctgcttcttaggtaacaatagcctgtgaggtctttaatgtggtaggagaagctgtttggaaagaaaccttttagtgaagctgtctgtgacagccaaaattctcctaatgtgaattctttgggtttttatacactccaaattctacaggcatctctcttttaaagcaggattcccccatggaatgaatctgtgaagctttgttcaaagttaagtagtaggtatgaatcaggttgggaagaaagttctgtggggtgccaattcttactaaccccgagcccacagcccttactggcaagcccagtggtttttaatcattgttagctgttgttgctgcagcagcttctgattaagttgcatttctggaccattgttaaatctctcatcagcgacagggttgagggctgggacaggccaggaccaatgctctgagctcacatgcctcccccagctctggttagcaggtcgctccaccttgcatggcctcggcctcggcctctgctctggagtcatgcatcctttaggagtagggaggttgctagcacaggattgtccatgcccaaggagggttggtgccaccactgagcccagcttgaagccaggctacctgaagagcaggtgaagtttgcggagggatgcccagcagcctggttgaatagctgagtagcaacacagggaccaacctctgctgcccagttagctactcttcccccagccaccaccacctgctaactgctctttgagcaacgagctctgtcttaggctgtctgcttgtgggtgggagcagggtaagtttagattaggtgacagccaggtcccctcagagcccaggattctatatcttagctcaagtattaactctgtgtgacttcatgacatgtcacttgatgactttgggtttccattttcttatctgtgtaatcagaggcttaggtaacgccaaggtccttcctagctgtataccttcaaaccttctgtatcagccttgtcagatgttttcaaatgcaagtaacagaaaacacatttcaaactgaccgaaacaataaaggaaacacatttacagtcagccctccatatctgtcgtttccacatccatgatcagccaaccagattgaaaacattcaagataacataaacaatagaaagtaatacagatgtgaacatgcagtgtaacaaccatgtacagagcactgacactgtatcagataatcgagatgatttaaagcatatgggaggatgtgcataggttatatgcaaatacaagtgactcttgaacaatgcagggattagggctgtcccctacacatgcagttgaaatctgggtataactctgactccccaaaagctacagatagcctgctgttgactagaagccttaccaataacataaagtcagttaacacatgttttgtatatctgttatatactgtatttttaggtaagctagagaaaaataaaatgttaagaaaatcataaggaagggaacctatatttcctgtgtgttcagtagaagtggatcataataaaggtcttcatgctgaggaaaaaatagagggaggggctgtcttgctgtgtagggcagcagaggcaggagataatctgcatatgagtggacctgtgcagttcatgcgtgtgttcaaggatcagctgtgctactacattttatgtaagggacttgagcatccaaggacttggtattggtggggtggtaagtgggtggcaatcctggaaccaattccctgcaacaaaaaggaataataaggaacaactgtatatggaaaagcctagtggaaaatcagtcttcaggtgcagcctgatcaaggttccagctctatttccccgtagtttgttcccattgcctcctgcatgttagctttgttctctggccagcttccctgatggtggcaaaatggctgacagcacctcccaggatgacacgctgcttcctttctcacatccagggtcagatgagagcctcttttttcagttataggtagaagctgtgtgctttactcccgttggaggttacgtggtggtccatgaaccaatttctgagtcacccaccccttatcaggaagaaagatgagtatattatcagcaagggctttggtcagacctgggtttccgtcgtagctttgcagtcctagctgtctgacttggaaaaatcacttcctttctgagctcagttattttatcctgtttttaaagggggaaaaatgattcaggcccccctcccgtaagtttgggttaaaatgaaataatgggttgggcatggtggctcatgtctgtaatccagcactttgggaggccaaggtcagagaatcgtttgaacccaggaattcaagactaggctgagcaccatagtgagaccttgccaatacaaaagatagattagatagatagattggatggatggatggatggatggatggattgggatggactgggatggactgggatggatggagtaaatactcatagtagataccttttcacgaatgctcagtaaactgtagctgtggttaaggacttggccttagtcatttgtccgagagcctgtaggctctgtcatggcactaggcagctgcgtaaaaggccaggcctccatcccgacctgtgtattcttgcctgggttgagccagctcggtttgtgtgagtattcttgtacccccttccagaaaggactagctaaaagacacctgctctgagttggccatcagcagggcatcgggggagttgggagccggtaggaactgcagctctgggtgctgtgaagagggccctgagccgcatccaactaaggaagtgaaatgttgctgagctcccaccctcctaggcagaggtctgagccgctgggatgtggacaggtgacctctgaagcgttgttcagctccgccaccatccagtttgagggttgcttggtcccatgttctctccagtcctgtagtgggagagcagagggggtggagcttggatccctctgtttgctgctcagggcaaaagactttgggctcttgttgaagctggttaagttacctgtgttcttagactgactggaaggcttttcctcccttctcagtatgtgggcacaggtccttactcccggtgacatgatgcactgtaggtgtcccctgcagccagctaatccatggtggtatttgtgaacaccttcctgcttagcatggccctttgctctcaaccccaggagctgaatggtcactttgtagcccttcctttgacaaaggcctcacgtaggaagactcctttgtagccagtgtgctcactcttgaaaaatcccagagtctgcagaagatggctgcttgctgagagatgcttctgtcccctgggatcacacaccctgctgctgtctgtgctgcctaatccatccgacagctgctgcaagtgcggttcttggccggtgttacctactgagacatgggggaagtaaagggaagtgacaagcccaggggacctggaatccttgaggggagccagtcagtaactccatcccattggtcatgtttcccttgccagtgttactctttggctcttggggagtggttttggggcctgagaaacttccccatgctcccagccccagctgtgcctcaacctagtcagcatcccttccattccctcaacattctggtttttagctgttgttttcccacaagctgctagaactggaaaagattctaccctgcagcttgaacaatagacgagatttgtggagctaggatgcatctcagggttgtgccggctgaaggcctggtgtgacctggagggggcacagggcaggctgctcctggggagctgtctctttgatttacagactgcctgagcccaagtttctccatctagaaacaaggaagccctgctctgtcgggccctaggggcttccgtcaggtgacagaccatatcccgttctcatccctaatgctgccatcacgcaccttctagagtttagcaggaatgatgaatgtgacaagtctgtatgttgtagggggttccgatttatggcagccttaacatagaaaaccatctgttttccctggtcccaaggtggttctgtttcaggacaaatgtgtaatcattcttggttttaaaaatctcttctcagccgggcgcactggctcacgcctgtaatcccagcactttgggaggctgaggcaggcggatcaccagagatcaggagttcaagaccagcctggccaacatggtgaaaccctatctctactaaaaatagacacaaaaaaattagccgggcatggtggcgggcgtctgtaatcccagctacttgggattacagttgggaggctgaggagaattgcttgaacccaggaggcagaggttgcagtgagctgagatcacgccactgcactccagcctgggcgacaagagcagggaaaaacaaaaacagaaacctcttctcacactgtctagctgtgatacctcaagcaggtgtcttcacctgtcttacagatggggatggttaaggattgccagagttgcagtgcctggctggctgcactccagtggcagctgcttggggataagactagcacggtgaccagtcgggctgtcacctcagactaggagcccttgacatcagccagctgggggagccaagggcagtgaacatttttctccacccccaatccctgctcttcattcctgtttctggatccctactggagtacctcctgctgtttttggatgaaagaataaagggtcaagcatcaaagatgatgtcctggggactgggacctggggtagcaggtggaagggccttgtttgatgtctccctattgcctccccgacccacactggctggactactgcccaggacagaagaggggggttggctgtgagtggggaggaggtggaagcggtagattcccagcacaaccttcttcctcccacccccaaaacctccatctgaagaaggcctgaggaagctgtcaggctgcctgcctgattcatcccttccctctgggcatagccactgagtctgctgggctgatgcttctgaatacaaactatggcacctggaaggcactgcagagaaaggggggacctcagggctcccattccatcactcttgagtctaggtcataccctccacaatccccaagaggcccgtactgtctcttctgatgggactcctgggttctgtgttgcccaccctgcaaatctgcatgccagcaagtatgggtgacccggctggctgctgggtcaccttcatttgggtgctagccttgctgccttcctttggtgctgttgagattgtccttgccgtgttcactcccagcgcaggcatgccctggccccaggctgtggctccgattcactcttactgccatgctttgttctcattttttgcttccacagtaagtctgcacaaaatactgtcctcacagctgagcttacctggtgatctattcttttttctcggtcactacttgtccagcttttttttttagacttttggagacagtgattgacaacagaacctagcagccagggctgcgctagtcccctagccccctccagagcctgtgtcaggcatatgactgactgcatcctctcccctctctctcctctctgccccagatcagtggaccatcccctgcccggatcctctctctccacagactatggcagctggcagatggtaacgggctgtggcagtattcaggagcgggctgtcctgcacacagactcctctctccctttcagcttcccggatgagctccctaacagttgtctgtaagtgtcttgcttgagaaggcaggatgctcccctgcccatgggaaaagctggtgagcagtcaggagtgctgggtaggaatgaggctggcgctcaggagctggcctggcctcctgccctcccctctctcagctgctggacccgaggtatgaaggaggcctgtggctggtcaggaagtgcactggtttgtgtgttcactctgcagcctctaaaacccatccactggtgtctcaggtgcacccaaagggaaagctgctggactgtaactatagaagattctatttctgtataagcctttgcctgacatgagaatcgtttgaaggcagaacagtgggatagtgaaggtaggtgtatggtggaggccagagccagagtggtgctgggttagcccgaagctttgctcctgagcagaacctagggttacttgctgtctctacccgccttgtcttctgtttttgcctctgggcaggaataagaattggatggggattctagatcccacacctacaaaaccctgagtttccagcccttaacagtgtgtccacctgactggagcagctgcctctggggaaaccacctgcccctggcctgttctgccgcttcatggatgtcaggcaggagaaagcctctggtggccaggggagcaagccctgctcctcagctgtggtgcctgagggcctctcagcaagccttccataccatgggctggatgaatggcacatgctggggccttaccaccagcaccgcaatccagctcatccccccacccctgttggcaggtgggaggcagggtgccttggggagttgggaagggaaagggggccctggatcctagctgagggcagtcaggagccagtcagaccttgaaattccaggatggcacaggtcctggctctgcagctgtgaagtcatcaaagagcttctgaggtcactgtgcctggcacagcctcctctgcagccagcccctaggctagaaacaagatcttagatgttcgaaggcttaaaaaaaaaaaaattgcaggccgggcatggtggctcacgcctgtagtcccagcacttagggaggccgaggcgggcggatcacctaaggttgggagttcgagaccaacctgaccaacatggagaaaccccgtctctactaaaaatacaaaattagctgggcgaggtggtgaatgcctattagtaatcccagctactcgggaggctgaggcaggagaatcgtttgaacctgggaagcggaggttgccgtgagtcgagatcatgccattgcactccagcctgggcaacaagagcgaaactctctcaaaaaaaaaaaaaaaaaattgcacctttctgtaaagacttcctactccagccccatttgcccaagagccatctctgaaggaagcacagatatccctgcttgatagcactcctcacttacctggggttagccactgaaacaggcaactccagccccagatcacccaccctagaacctacaatttaggccccaggcagcactctaagctgctagccaagcctttagttctgggaggttctcagaggagggctggattccgtatgatctgaaggcctgcaagactgtgggatgtggtcagagttgattcctgtgaagccgtgcagcatgtgggttcagcacttgggctttgttatcagaaaaacttaaggccaaatcctagctgctctattcaccagctgtatcttcaagtgtcagccttgccttttctgagcctgttagctcatctctcaagaaggaatggcactgtagtacctcccttgcctggtgtgtgtccttaaatgggtcacataacctctcctcttttctcatctctcagtaggtggtggtctctgtccctttcacctctcagaaatgggcagccatgtcaggggggtggggcagggcagtgagaatgctcatgtatggatctttggatgttccctgtgagtgtaaactcttggtctgtttctccctcgtatgctataaggagaagctaaggcaagcatgcatggcctttggcctgtgtgaaattagaaagtaaaaagatctcaggccatgcttcttccccagttgccaggagagacttcaggattgttgatggtagtacaggaatccagtctcagctccatgttcttagtgctgctgcaggagtgatttgacttttctttgccccagagcctactgcttccatctctcacatttcactcccaccgatctgctttccctagagtcctgtctatctccccccatacttacctcaggactgtcatttatcctcagacatccctctgctcccacaagccctgggtacaagtcattgagccgttgggattgggttcacttcagctgcctctgacagatttccagggagggactgtccagggattggtttcttgagggcagatttggagcaagattagtaggcatggatggtcttagtatttaggtgtatgggaatgtgagggctcttctcatgtaagtctgtgacccctagagagggccctccagggacccattgggggaacactatgtgagtacctgaactttgagtccagagtccatgggcctcttctattaaaggcccttggggatgtcacacagcctcatgtggagtcatgctttgataagcctgagttgtgcgcacttgtttcccttcttgacttgtaatttcagggtaaggaaagaagaggggctttcatctgtgatcagagcctacagaggccaagagaggaatggggaatagaatcagaacacagatctttctggaaaagccagcaccctttcagctgtttacctggaaaccacagtgactgaaggtgtagctaaagccctagaggtttccagtggggaaccctggcttcaacccagcagacagtgggttcttccagggcaatagcttcctcctaagatgcgtcatgtctaggcctcaaggctggggccttttttttcttttcttttttttttttttttagacacagtctcactctgttgcccaggctggagtgcagtggtgcagtctggctcactgtgacctctgcctcccgggatcaagtgattctcctgccttcagcctcccaagtagctgggattacaggcatatgccaccatgtccagtgaatttttatattttcagtagagacagggttttgccatgttggccaagctagtctcgaactcctgacctgcctcggcctcccaaagtgctgggattacagccaaggctgaggactttcaacagctgcagcgtgctgccagatttcaggggcctccttactgttaggtataagacttcatgcctcagcttgctcttcctgaggagtggaagcagagagctgctggggcaaattccctcctgcttagctaccctccttcccagtgatcgcaaagatagttattttcacaacaggtcaggtcaggccaggcacagttgctcacgcctgtaatcccagtactgtgggacgccaaggcaggcggatcagttgagtccaggagtttgagaccagcctgggcaacatggtaaaaccctatcatggtggcatgtgcctgtagtcccagctacttgaggggctgaggtgggaggatggcttgaggctacagtgagcgctgattgtgtcactgcattccagcctgggcaatagagtgagaccttgtctcaagaaaaaaaaaaaaaaggttagtgtcccagtaaaagctcctgctctaggtgggaacagtagcctgagggcttagaggaatggtttaagggaaaacagggccagatatttggggcctgaaccacaaggatagcatggccgtaggacagacactggccttgtacagtcagaagaagcacaaggacaggtggtatggagggagggaggatgaggatactgggtcctgtcccagggtaatgtctttgttctttctcttgacctccccataggcttgcagccctgagtgatcgagagactcggctgcaggaggtgcgctcagccttcttggctgcgtacagcagcacagtggggcttcgggcagtagcccccagtccttccggtgccatcgggggcctgctggagcaatttgcccgtggtgttggactccggagcatcagcagcaatgccttgtgaagaagccagcccatgacattttcctgctcctctctcagctgagcccttagcagagaatcaaagccatgcctggccgaaggggtacttccaggtcaggggaaatttcagtcccccatctccatcatgaacatggcagccccaaagctgagcaaggccaaagacagggttttccaacccccagcctcttgactggtgaccaccaccccttcttgtcactgtctcccacccaccccatctttgctgggattcccatcaactctcagaactgtgtggggtttccctggggccttgtggaagccatgacttcacaaagaccctacctgtcagttcttgtttctggggaggagggatcacctgcactgagaatgaggcagtttgacacagatcacaaaataaaatcaaagtctttttgaatagcca

SEQ ID NO: 1260 - DNA, 347 bp, Homo sapiens
cacttgagaacacacatgttgaatttaatgatggtttgaaaaatcactggcctggctgggcacggtggttgacgcctgtaatcccagcacttggggaggctgaggcgggcgggtcatgaggtcaggatattgagaccatcctggctaacacggtgaaaccctgtctctaataaaaatgcgaacaatgagctgggcatggtggcgggcacctgtagtcccagctactcgggaggctgaggcaggagagtggcttgaacccaggaggctgagcttgcagtgagccgagatcacgccattgcactccagcctgggtgacagagcgagactctgtctcaaataaaaaaaaa

SEQ ID NO: 1261 - DNA, 347 bp, Homo sapiens; identical to SEQ ID NO: 1260

SEQ ID NO: 1262 - DNA, 564 bp, Homo sapiens
ggaggcccctgtgtggagccctgggtcaccagcctcagtactgacagataggtttctctggcagggggtgcagatgatgcctgggcagatgtggaggacgtcacggaggaggactgtgctcttcggtcagtgctgggttgctgtggtcaggggcttgtgttggggatggggtgtctggccagagatggccatgttcatattgtccgtgggtatttgtcactggttcaggtgagtggattggcttcttcctcttctgtctgccaagtctgtgcccctgaaatatggctgttgaagtccactgggtagcagccaaatacctgagcagtctgtccccatcttgactgcacacctggattcacagagaacatcccactcttggggttcctggtactgcaggcccgagatagggcccagacatctatatttgttttaaagccccacagagttgccagtttgcagctatgatgctgattaccaacctgccagatctcacccagtacagctggtactgaggcacagggcaagggctacagtccatacataggagacatgaggtctagcctg

SEQ ID NO: 1263 - DNA, 678 bp, Homo sapiens
cacacgccgtctggccccatgggaggtgtggtggaagtggtggggcagagatggggccagacagacaagcccatgtgccggtgccccgtcccatcctgtgtgtgcatgcctgctgccgcaccacccttgtctgtgcccagctgtcctcagggccactctgaggctgcagtggcactgtttgaccctcactgttctaggctgtggctctaggtcatggttcctgcccccttttctgcctgtccagcattgctgaacaactagggaggaaaccagaggttcctcttgtcctctgggtcctgcctcagtcttaactgcccagaatgcagtgagctcccaagctgaggcagcaccccatcacccgttaccacaccctggctctccatctcctgcctgccaaaagatcccactttccaatcctgtgatagtgtccctcagtctcacaggtgactttctgcttgcagggcgtgtctcaggctcttgtagccagtccaggatggccaccaaggccccctcttgggaggctgaggagaattggggttgtcctcctgacctcagagccctgcacatgggggcttggccaagcttgggatagctggaccaagatgggtgcaaggctttgaaaggtgtggggtgggcagctgtgaggtgtttgatctttccgctggtctgtttggggga

SEQ ID NO: 1264 - DNA, 678 bp, Homo sapiens; identical to SEQ ID NO: 1263

SEQ ID NO: 1265 - DNA, 347 bp, Homo sapiens; identical to SEQ ID NO: 1260

SEQ ID NO: 1266 - DNA, 564 bp, Homo sapiens; identical to SEQ ID NO: 1262

SEQ ID NO: 1267 - DNA, 564 bp, Homo sapiens; identical to SEQ ID NO: 1262

SEQ ID NO: 1268 - DNA, 678 bp, Homo sapiens; identical to SEQ ID NO: 1263

SEQ ID NO: 1269 - DNA, 10537 bp, Homo sapiens
gcggcaccgcccgggaagctgcgcgagggtcgacagcctccgccacatcctccacctctcttggtccagcgagcgttgccgggccagggtcaagcggagggctccgacggcgcggacggagcgaagcgccgagccatggcgcaccaaacgggcatccacggtgagggcggatggcgggcgggcagggggcctcggtctgggctctcggaagcgccccccccccggctctcggcccctccctccaccccacaccagccgggagaaagcttcctgttctcttttgcagccgcgggtcgcctggggtgggcacatctgggggagtacggacgtggtgtgcatagctgggagtgggtgtatgtgtacgtacacaactggggtggaagtatctgtgtgcctacctggagatgaatgtggctgtgtgtgcccatctgtatatttttgttcctttccgggagtgggtgtacacgcatgtgcacacgtcttccgtgtacagtcctgcctgtgcacctctggatgtgactcgcttgtgtacatctagggtcattcatgcactggcactagtgactgtttgaatggacactgtaggtcgcataggaccctctttagacatcagtgtttcatggcagtgtgcacatgtatgtgggtgtctgtgtgtgtgcacagttggagcgcgtctcagtgtgcatttttgccaaggatgcatataccgcatgtgtctgacttgaatgggcttgtttatgtgtgttaggagaaggccctgacctttgctcctcccaggacactcactctccccaggctagggaaaacccggaacagagacttctacgtgggatggagaaagctgcctatctgaccttgacctctgacctccctcccattttccactgtgactttctgagtctgcctcagtctggttggaagatcccagctccaggctgcagacagagaagaggtccagatatggggttttgtggggagagtcctggccctaaagaatccaggccagctcccacccccagcccccagccctaggaagcttcaccattcccgcatcacaccctcccctcccctaggggtcccagtttccttcttggacaggctgtgagagaagcaatggctgggagccaggtgccctgactctacctggggctcagtgtcctcctctgtcactggcctgagagagctgcctggcctgtggggaaggcccgggctgtttgcccagacagcctggcgggtttggccatcagccacccctcccaccacactaggatcccctgcctggggctgccaccatcgacctgcctgaccacctgaatcctggtgcggttgtggccacttggtggctgggctgccctgagaaggtttccctggccccgcgaaggcaggggcctgggtcagggccagggctcccagatgggccagcctttctccaggaggagctggcgggcaggcttcatgactcagccccacaggagggaactgcctcctggccagcttcttccttcccctttgtctggtcatagctgctgcctcccagcctccagccctggtggaggagatcccaggaagttagccaccccataccccttccctgctgcctcactccctcctttcccatagtgagacaggcccaccgagggggtcactggggactgggctgcccctagccctccttccacctgtgagcagcccacttcttcccatttctggcctgggaagttggcagcagagatcaccctggaggaccaggtgccagccctgtcctgaccataggtgtggatctgctgaccgcagagtaggcaggaaagggacctgtaatgtgaggctcacttgagtcggagggagggtgttcatgaatcattgataatagaggctcaggtgtcccaggcctggcctctggattattgatggtggctgggcaggcattggggctggggtgggcagggatgtgcctttccctgtgggggtgtcagtttgccctggtaacactagaaggggcccgtcggcctgtcccttaggggagcttcttggccttccttctgggaaggtctgggcaggtagaaggggcagctcagcacagtcagcttgctgttattatcataataaaagattaattgttattaatagaggccaccatcgccaagccctttctcccatttacccctcaccacagccctgccaagtttggggctattatttccattttatacactgaagttcagagaggtcaggagtcacacagctgagggagaagtggagccccagaggccaggcttggggcctcagggacctgcttgggatctgccgatggaaagttctgtcctggcccagtgggatggtgtccacctgcctacagttccatgccatgtttctctgagccctaagggtctgctgagctcagttgggccccagcccacccagtggccttggagggtggtgcatagcctgaggtctcagattaacggtcactctgcaaagggggggcacctgaggacataaccagagtttgttttcctaaaggcccccccgcccctgagttgcccagtcctggccctataaatattctctgacctcaggcctccagctgtgttcctgacggaattcccctgacccttgggcagcctcaaggtcacactggcctagccctgctcacccagggacccaagcagggcccttccccacatgggccgtggtggtttccctgtccactagtagatccaccacttatggctccccagctctcaccatggtcctcacctctgccctggggtccttggtcactcactggctctcaccttccagctctacagcccaatgaccaagatggagtctcttttttttttttttttctgaggcggagtttcactcttgttgcccaggctggagtgcaatggtgtgatctcagctcactgtaacctccgcctcccgggttcaagcgattttcctgcctcagcctcccgagtagctgggattacaggtgcgtgctaccatgcctggctaatttttgtatttttagtagagatggggttttgccatgttggccaggctggtcttgaactcctgacctcaggtgatctgcccgccttggcctcccaaattgctgggattacaggtgagagccaccgcacctgaccaagatggagtctcttagtgagtttcggggagccattccttctcctggaagctgccccaactgcctgagggttaaggtcatgttgtccccccaccccccacagggctgtatctgggctggctgtggctcctcggggtctcagggttagacagcctggctggagggctgggactggggctgcacacatgggtgtcatgcgtgtccatgtgcttctgtgtacactttgatacatcctgttgcctgcacacacgtctcagccaagctctgcacttgcctgcctgtgtgcgtgttagcaagccggggactatatctctgtgtgtgtttgtgtatctaaacatgcgtgtccatttgtgtttgagcaactgagcatgtgttcatgtatgagggtgtttgaatttctgctcctctgtcacacatgcgtgttgtgtgttacattcacacatgctggattgagctgtgtgtgtgtgtgtgaatgggcatagtggtcattgcacagtgggggcatttgtctgtgttcttttttctgtgtatatgaccgtgctgagtgtgtccaggccagcccagagctcggccatcctgcggggcagggggcagatggaggctattcactgtggctggcctggcttatgccagagcctgcccatcttctggtgggttgtcccatccctgcccaccccgccccatcaccagacctatcccagccagcaggccactcgcctgccacctctgctggctaaatttgggagcttgtgttcagtggctgtctcaggttcccagtcacatggggggctgtatttaacctggttcccagctcagccaccagaccctgtgggacagagcaggccccatactcgtctctgtccactctgcccactcatcccccaccatgtttcttgttcttatagccacggaagagctgaaggaattctttgccaaggcacgggctggctctgtgcggctcatcaaggttgtgattgaggacggtgagtgcccctcacaggccagggtataggcttgggggtggactctgctgcctctgtgggtgggggaaggaggatgttggcccctggcctgccgggacctcaatttcccactctggaaatgggtgtgaggccatcctgacaaaggagagcctcacagggcagcatcagaggtgggcgcgattgtcacctctgttatgcagagcaggaagccgaagctggggtcagcaaatagagccctgtcctggggtcctgccacctcccagaggctgcatggatattcagatgggcctggccaggatgccgagctgggctgggcagaggggcaggggataagtgaatccagcactgccccttgtggctggtgccacccgcctcatttgttggtggcctggcctggctcagctgctgtccgaggggagacctaaggagatcctgcacccttctcttggaagtgcccccatgatggggagaagggatgagtgtctggctcatctgagagtaggatgggagggttctaggcttggctgggctttggccttgcccctgaggacctgggagctgtatagagggcagtgctggggacactgggacttgagctgaggcctgaagtggggagggtttggggaggcagaggattaaactgaggaggattgggaggtcagaggccagagaacattttttcacctttcctccatgccaatggactgtccctttgggtgaggggtacagactttgggactggggtgggccaggctccccagaggtcctcccagctcttctcattagccattcagcagcaggcactttggatggctgcctgaatgggcctggtgctcagctggctttccacgcgttgtgttggctcaaagcaggatctgccattccaggttttagggccttggcagtgctttgcccagggagtccaaattctgatgccctcagagactgggcaggggtcactgtggcagaatattagtgatggcttcctggagtggcaggccacagccaccccacccttaaaaaggcagttgtactcattgaccccagtcctcggccctccctgttgcctcccagacaagatgtccctgcagatttttttttttttttttttttttgagacggagtttcgctctgtcacccaggctggagtgtagtggtgtgatctcagcttactgcaagctccgcctcccgggttcacgccattctcctgcctcagcctcccgagtagctgggactacaggcgaccaccactgcgcccggctaattttgtatttttagtagagacggggtttcaccatggtctcaatctcctgacttcgtgatccgcccacctcggcctcccaaagtgctgggattacgggcataagccaccgtgcccagccgtccctgaagattttaagcaggaggaatctctggattgacttttatctcagttctgcatgacagttattggggtacctgggagtgcccaggagggtccaggcccccgatgggcagccactgtccatctccaattgaggatggctccagtgtggccagagggcctgatttttctagagaggctgagaattctacttcttatgtaaaatttcccagtttgaaaatgttagcaacaaattaagcaatgttgacagtgctgtaggggccaacacaggccgtgactactcaaagtcactgtgactgtgatcctgtctgagttctgggtgggcaggtgaggaggccgaggcctcagagggcctggtctgttggggcgtccaggcatcggggcccctgcccagatcaggagagtctggtggactgacaccaggacccccagccaggctgactgcccctttgccccagttattgctccaggctagacctgtgtatacccaggctggtgtctggtgcccagatgaggtcccagtctacaagtgcagctggatgccccatttcagccaaggagctagcaggcctgtggggcctaggcacttagatggtggctgctttggatctgcgacattttctttctttttttgagacggagtttcgctcttgttgcccaggctggagtgcaatggcgccatctcctgctcaccacaacctccgcctcctgggttcaagcgattctcccacctcagcctcccgagcagctgggattacaggccactacacccagctaattttgtatttttagtagagacggggtttctccatgttggtcagggtggtctcgaactcccaacctcaggcgatccgcctgcctctgcctcccaaagtgctgggattataggcgtgagccaccgcgcccggcaaggatctgtgacattttcgaggggactgcagctggcaggtagccgcaggatgtctgtttatccagggtctggtaggagcccctgctcctcctttccagaggcttttacccctgtaggtccctgtggcctggggctgtgacctgcccctcagcacatttgtcctgaggggagtctgctgcggttcttctgctggagccccaggggaggaggcgagcaggaggcagtttcgtggggactgtgggctgagcagctgtgcggtggggatggggtccaagggagcacccaggggtgtggtgtccgtgaggggctgacggctgcgtgtctttgtgtggctgtttgtgttggtgatctgcgcacgtgtgtgtgtgtgggggggtgtgtgcacgcgctggggatgtgcaggggggcagcccccaggtggcagctttgtgccttcccttgctcactcattcagccacacagcctcacacttctgggacctgggggctccagggaaggtgaggggcagccggcggctctgagccagctgggcagccacggcgaggctggaggtctgcagcgggaggcgcagtgggagctgggagcggctgctcatccggcctctgcccccagagcagctcgtgctgggtgcctcgcaggagccagtaggccgctgggatcaggactatgacagggccgtgctgccactgctggacgcccagcagccctgctacctgctctaccgcctcgactcacagaatgctcaggggcttcgaatggctcttcctcgcctggtcgcctgataactcccccgtgagtcctgggccagtgggaagtgaggaggggagctggggctgagccaggcaacaaggccttgccctgggggatccaagaggggacacaggcctgcccctggagggtgggggaagagctgtcaggccgtgccctagggagtctgagagagggtcaagtccctgtgcccgcagcctgggtacctcttgctctccaggcatcagcctggctccggaggctgtgatcaggctggacgagggctccccctgctggtgggggccacctgctgcgtcctggccccgggctggccctctgccaggtgtgccagcgcagtgagcccaccgagttcctccagaggcacctgtctgttccgggagaggcagccctgcccagaggcctcttacggtttggcccttgcccttcaggtgcggctgaagatgctgtacgcggccacgcgggccacagtgaaaaaggagtttggaggtggccacatcaaggatgagctcttcgggactgtgaaggtaatcctaagccaggacttaccgggacacaatcctgggcccacagagaggggtcactgtgcagggtcagagagcaagctagtgccagcttcgggaggaagatgggggcgctgggggagtccaagggctgcaagctggcgtgctccgtgggcctcctctagccaatccccaggtgcccatttatggctctgcattcacccccacccctgcaggatgacctctcttttgctgggtaccagaaacacctgtcgtcctgtgcggcacctgccccgctgacctcggctgagagagagctccagcagatccgcattaacgaggtgggtggggagcagaggccccagccttgagccctcagggtcatatcggcccagtggcagcctgtgctgcctgggagccacaccctgctttgggccggtgagggcctccctcaccattcccctacccacaggtgaagacagagatcagtgtggaaagcaagcaccagaccctgcagggcctcgccttccccctgcagcctgaggcccagcgggcactccagcagctcaagcagaaaatggtcaactacatccagatggtgggtgcctgctccctaccctggcacatgctgccaccacccctactcctgcccatgcacatgtgcagatgtacatggagtccccactccaccagcctgcagtctgtccccttcagctcgtccatgtgcttgtgggaacacatggtccaccccacccctccctgatccctacctattccgcctggggcgcagacactgtgtgcacatagatgtgttctggtcccttgtccccaggccctgctcatacacaggtacacctgtgagcacactgccccattccgccctccacccatacccctggggtcacactgacccctcagccccgaggcccttcctgtcagagatcccctctgttgtctccttgaccaccccgtttccctaggcagggtccttctgccctggctgttccggctgccgctttcaagcaaaacggctcctcccttccaagatgcttccgccagaggccttgcctctgaggatgggctggcccagtggcagtatctccctgaggttgtgaccctccacaccatcctgtcccaggagtcactaccgttgactacccttggtgggagttccttctctagcacaaccttcaaaggggcagagttggggctgggcccaggactggcctcttcagagggacccccatagagggatggccattgcaggggagtcttgggagagggaggtcacatcaggctcctgcccaccagctaatcctgtttgagggcttcctggggagaggggcctgggcccaccccgacctggtgctctcccatcttcccttggccctgggcagaagctggacctagagcgggaaaccattgagctggtgcacacagagcccacggatgtggcccagctgccctcccgggtgccccgagatgctgcccgctaccacttcttcctctacaagcacacccatgagggcgacccccttgagtctgtaggtgagtggccatggcagggctcccaagcctgtggctgggtgggagcagggctggtctgcagtggggcaggcctgctctgggtgcgaaggtcagcaggtttctcaggcctcccaggctcacctcctgccccccaacagtgttcatctactccatgccggggtacaagtgcagcatcaaggagcgaatgctctactccagctgcaagagccgcctcctcgactccgtggagcaggacttccatctggagatcgccaagaaagtaggcgccctccccagggcctcacctccccaggccctatcactccaatctccatgtggggcgctggggtcctgagatgacggcagagcaggaatcgttgctgtcgtgttgatcatagggcatctgaggcccaaggagcaacacgcatggcccaaggctgcccagctgatcggtggctcagaaaagtccaagtcctggctaccatgtcatgtcctttccctgggcctggagacagggaggaggtgaccccagcgagcagagtccaaggcatgcagggcagcaggccctaagctcttgctttcctgggagtggcattccaggtggggaatcaaggggagacctcaggagaccccagggctaggatgtgagagtaaggggtgccccaggagtgggggctaccaggggtggtgtgtgtcagagcccctcccattggggtgaccactgccttgccccatgcagattgagattggcgatggggcagagctgacggcagagttcctctacgacgaggtgcaccccaagcaacacgccttcaagcaggccttcgccaagcccaagggcccagggggcaagcggggccataagcgcctcatccgcggcccgggtgaaaatggggatgacagctaggaggctggagcagggccggccacgtgtggactgtggggctgcccaccttccgctccctgccaccatcctccttcctgggctccaggaaagtgtttctgggaggtcaggagggctggcagctgaacgcacttgcagcgtccgagggccaccgggctggcattttgtgacccttccctgttgctgtccctgcatctcgtctgtgtgcccagggtgtccggggaccctgcctggctggcttaagggggctgggtcaggggcctggcatgaacctggcctcccggggagctgagactagggtcccagcacagcccagaaacctttggccacaagaagtggggtcagtcagggctggggcaggggtcactgcagtttgggatggttgaatgctgtattttctaaagaataaaatatttttaaatcaagac

SEQ ID NO: 1270 - DNA, 10543 bp, Homo sapiens
gcggcaccgcccgggaagctgcgcgagggtcgacagcctccgccacatcctccacctctcttggtccagcgagcgttgccgggccagggtcaagcggagggctccgacggcgcggacggagcgaagcgccgagccatggcgcaccaaacgggcatccacggtgagggcggatggcgggcgggcagggggcctcggtctgggctctcggaagcgcccccccccggctctcggcccctccctccaccccacaccagccgggagaaagcttcctgttctcttttgcagccgcgggtcgcctggggtgggcacatctgggggagtacggacgtggtgtgcatagctgggagtgggtgtatgtgtacgtacacaactggggtggaagtatctgtgtgcctacctggagatgaatgtggctgtgtgtgcccatctgtatatttttgttcctttccgggagtgggtgtacacgcatgtgcacacgtcttccgtgtacagtcctgcctgtgcacctctggatgtgactcgcttgtgtacatctagggtcattcatgcactggcactagtgactgtttgaatggacactgtaggtcgcataggaccctctttagacatcagtgtttcatggcagtgtgcacatgtatgtgggtgtctgtgtgtgtgcacagttggagcgcgtctcagtgtgcatttttgccaaggatgcatataccgcatgtgtctgacttgaatgggcttgtttatgtgtgttaggagaaggccctgacctttgctcctcccaggacactcactctccccaggctagggaaaacccggaacagagacttctacgtgggatggagaaagctgcctatctgaccttgacctctgacctccctcccattttccactgtgactttctgagtctgcctcagtctggttggaagatcccagctccaggctgcagacagagaagaggtccagatatggggttttgtggggagagtcctggccctaaagaatccaggccagctcccacccccagcccccagccctaggaagcttcaccattcccgcatcacaccctcccctcccctaggggtcccagtttccttcttggacaggctgtgagagaagcaatggctgggagccaggtgccctgactctacctggggctcagtgtcctcctctgtcactggcctgagagagctgcctggcctgtggggaaggcccgggctgtttgcccagacagcctggcgggtttggccatcagccacccctcccaccacactaggatcccctgcctggggctgccaccatcgacctgcctgaccacctgaatcctggtgcggttgtggccacttggtggctgggctgccctgagaaggtttccctggccccgcgaaggcaggggcctgggtcagggccagggctcccagatgggccagcctttctccaggaggagctggcgggcaggcttcatgactcagccccacaggagggaactgcctcctggccagcttcttccttcccctttgtctggtcatagctgctgcctcccagcctccagccctggtggaggagatcccaggaagttagccaccccataccccttccctgctgcctcactccctcctttcccatagtgagacaggcccaccgagggggtcactggggactgggctgcccctagccctccttccacctgtgagcagcccacttcttcccatttctggcctgggaagttggcagcagagatcaccctggaggaccaggtgccagccctgtcctgaccataggtgtggatctgctgaccgcagagtaggcaggaaagggacctgtaatgtgaggctcacttgagtcggagggagggtgttcatgaatcattgataatagaggctcaggtgtcccaggcctggcctctggattattgatggtggctgggcaggcattggggctggggtgggcagggatgtgcctttccctgtgggggtgtcagtttgccctggtaacactagaaggggcccgtcggcctgtcccttaggggagcttcttggccttccttctgggaaggtctgggcaggtagaaggggcagctcagcacagtcagcttgctgttattatcataataaaagattaattgttattaatagaggccaccatcgccaagccctttctcccatttacccctcaccacagccctgccaagtttggggctattatttccattttatacactgaagttcagagaggtcaggagtcacacagctgagggagaagtggagccccagaggccaggcttggggcctcagggacctgcttgggatctgccgatggaaagttctgtcctggcccagtgggatggtgtccacctgcctacagttccatgccatgtttctctgagccctaagggtctgctgagctcagttgggccccagcccacccagtggccttggagggtggtgcatagcctgaggtctcagattaacggtcactctgcaaagggggggcacctgaggacataaccagagtttgttttcctaaaggcccccccgcccctgagttgcccagtcctggccctataaatattctctgacctcaggcctccagctgtgttcctgacggaattcccctgacccttgggcagcctcaaggtcacactggcctagccctgctcacccagggacccaagcagggcccttccccacatgggccgtggtggtttccctgtccactagtagatccaccacttatggctccccagctctcaccatggtcctcacctctgccctggggtccttggtcactcactggctctcaccttccagctctacagcccaatgaccaagatggagtctcttttttttttttttttctgaggcggagtttcactcttgttgcccaggctggagtgcaatggtgtgatctcagctcactgtaacctccgcctcccgggttcaagcgattttcctgcctcagcctcccgagtagctgggattacaggtgcgtgctaccatgcctggctaatttttgtatttttagtagagatggggttttgccatgttggccaggctggtcttgaactcctgacctcaggtgatctgcccgccttggcctcccaaattgctgggattacaggtgagagccaccgcacctgaccaagatggagtctcttagtgagtttcggggagccattccttctcctggaagctgccccaactgcctgagggttaaggtcatgttgtccccccaccccccacagggctgtatctgggctggctgtggctcctcggggtctcagggttagacagcctggctggagggctgggactggggctgcacacatgggtgtcatgcgtgtccatgtgcttctgtgtacactttgatacatcctgttgcctgcacacacgtctcagccaagctctgcacttgcctgcctgtgtgcgtgttagcaagccggggactatatctctgtgtgtgtttgtgtatctaaacatgcgtgtccatttgtgtttgagcaactgagcatgtgttcatgtatgagggtgtttgaatttctgctcctctgtcacacatgcgtgttgtgtgttacattcacacatgctggattgagctgtgtgtgtgtgtgtgtgtgtgtgaatgggcatagtggtcattgcacagtgggggcatttgtctgtgttcttttttctgtgtatatgactgtgctgagtgtgtccaggccagcccagagctcggccatcctgcggggcagggggcagatggaggctattcactgtggctggcctggcttatgccagagcctgcccatcttctggtgggttgtcccatccctgcccaccccgccccatcaccagacctatcccagccagcaggccactcgcctgccacctctgctggctaaatttgggagcttgtgttcagtggctgtctcaggttcccagtcacatggggggctgtatttaacctggttcccagctcagccaccagaccctgtgggacagagcaggccccatactcgtctctgtccactctgcccactcatcccccaccatgtttcttgttcttatagccacggaagagctgaaggaattctttgccaaggcacgggctggctctgtgcggctcatcaaggttgtgattgaggacggtgagtgcccctcacaggccagggtataggcttgggggtggactctgctgcctctgtgggtgggggaaggaggatgttggcccctggcctgccgggacctcaatttcccactctggaaatgggtgtgaggccatcctgacaaaggagagcctcacagggcagcatcagaggtgggcgcaattgtcacctctgttatgcagagcaggaagccgaagctggggtcagcaaatagagccctgtcctggggtcctgccacctcccagaggctgcatggatattcagatgggcctggccaggatgccgagctgggctgggcagaggggcaggggataagtgaatccagcactgccccttgtggctggtgccacccgcctcatttgttggtggcctggcctggctcagctgctgtccgaggggagacctaaggagatcctgcacccttctcttggaagtgcccccatgatggggagaagggatgagtgtctggctcatctgagagtaggatgggagggttctaggcttggctgggctttggccttgcccctgaggacctgggagctgtatagagggcagtgctggggacactgggacttgagctgaggcctgaagtggggagggtttggggaggcagaggattaaactgaggaggattgggaggtcagaggccagagaacattttttcacctttcctccatgccaatggactgtccctttgggtgaggggtacagactttgggactggggtgggccaggctccccagaggtcctcccagctcttctcattagccattcagcagcaggcactttggatggctgcctgaatgggcctggtgctcagctggctttccacgcgttgtgttggctcaaagcaggatctgccattccaggttttagggccttggcagtgctttgcccagggagtccaaattctgatgccctcagagactgggcaggggtcactgtggcagaatattagtgatggcttcctggagtggcaggccacagccaccccacccttaaaaaggcagttgtactcattgaccccagtcctcggccctccctgttgcctcccagacaagatgtccctgcagatttttttttttttttttttttttgagacggagtttcgctctgtcacccaggctggagtgtagtggtgtgatctcagcttactgcaagctccgcctcccgggttcacgccattctcctgcctcagcctcccgagtagctgggactacaggcgaccaccactgcgcccggctaattttgtatttttagtagagacggggtttcaccatggtctcaatctcctgacttcgtgatccgcccacctcggcctcccaaagtgctgggattacgggcataagccaccgtgcccagccgtccctgaagattttaagcaggaggaatctctggattgacttttatctcagttctgcatgacagttgttggggtacctgggactgcccaggagggtccaggcccccgatgggcagccactgtccatctccaattgaggatggctccagtgtggccagagggcctgatttttctagagaggctgagaattctacttcttatgtaaaatttcccagtttgaaaatgttagcaacaaattaagcaatgttgacagtgctgtaggggccaacacaggccgtgactactcaaagtcactgtgactgtgatcctgtctgagttctgggtgggcaggtgaggaggccgaggcctcagagggcctggtctgttggggcgtccaggcatcggggcccctgcccagatcaggagagtctggtggactgacaccaggacccccagccaggctgactgcccctttgccccagttattgctccaggctagacctgtgtatacccaggctggtgtctggtgcccagatgaggtcccagtctacaagtgcagctggatggcccatttcagccaaggagctagcaggcctgtggggcctaggcacttagatggtggctgctttggatctgcgacattttctttctttttttgagacggagtttcgctcttgttgcccaggctggagtgcaatggcgccatctcctgctcaccacaacctccgcctcctgggttcaagcgattctcccacctcagcctcccgagcagctgggattacaggccactacacccagctaattttgtatttttagtagagacggggtttctccatgttggtcagggtggtctcgaactcccaacctcaggcgatccgcctgcctctgcctcccaaagtgctgggattataggcgtgagccaccgcgcccggcaaggatctgtgacattttcgaggggactgcagctggcaggtagccgcaggatgtctgtttatccagggtctggtaggagcccctgctcctcctttccagaggcttttacccctgtaggtccctgtggcctggggctgtgacctgcccctcagcacatttgtcctgaggggagtctgctgcggttcttctgctggagccccaggggaggaggcgagcaggaggcagtttcgtggggactgtgggctgagcagctgtgcggtggggatggggtccaagggagcacccaggggtgtggtgtccgtgaggggctgacggctgcgtgtctttgtgtggctgtttgtgttggtgatctgcgcacgtgtgtgtgtgggggggggtgtgtgcacgcgctggggatgtgcaggggggcagcccccaggtggcagctttgtgccttcccttgctcactcattcagccacacagcctcacacttctgggacctgggggctccagggaaggtgaggggcagccggcggctctgagccagctgggcagccacggcgaggctggaggtctgcagcgggaggcgcagtgggagctgggagcggctgctcatccggcctctgcccccagagcagctcgtgctgggtgcctcgcaggagccagtaggccgctgggatcaggactatgacagggccgtgctgccactgctggacgcccagcagccctgctacctgctctaccgcctcgactcacagaatgctcagggcttcgaatggctcttcctcgcctggtcgcctgataactcccccgtgagtcctgggccagtgggaagtgaggaggggagctggggctgagccaggcaacaaggccttgccctgggggatccaagaggggacacaggcctgcccctggagggtgggggaagagctgtcaggccgtgccctagggagtctgagagagggtcaagtccctgtgcccgcagcctgggtacctcttgctctccaggcatcagcctggctccggaggctgtgatcaggctggacgagggctccccctgctggtgggggccacctgctgcgtcctggccccgggctggccctctgccaggtgtgccagcgcagtgagcccaccgagttcctccagaggcacctgtctgttccgggagaggcagccctgcccagaggcctcttacggtttggcccttgcccttcaggtgcggctgaagatgctgtacgcggccacgcgggccacagtgaaaaaggagtttggaggtggccacatcaaggatgagctcttcgggactgtgaaggtaatcctaagccaggacttaccgggacacaatcctgggcccacagagaggggtcactgtgcagggtcagagagcaagctagtgccagcttcgggaggaagatgggggcgctgggggagtccaagggctgcaagctggcgtgctccgtgggcctcctctagccaatccccaggtgcccatttatggctctgcattcacccgcacccctgcaggatgacctctcttttgctgggtaccagaaacatctgtcgtcctgtgcggcacctgccccgctgacctcggctgagagagagctccagcagatccgcattaacgaggtgggtggggagcagaggccccagccttgagccctcagggtcatatcggcccagtggcagcctgtgctgcctgggagccacaccctgctttgggccggtgagggcctccctcaccattcccctacccacaggtgaagacagagatcagtgtggaaagcaagcaccagaccctgcagggcctcgccttccccctgcagcctgaggcccagcgggcactccagcagctcaagcagaagatggtcaactacatccagatggtgggtgcctgctccctaccctggcacatgctgccaccacccctactcctgcccatgcacatgtgcagatgtacatggagtccccactccaccagcctgcagtctgtccccttcagctcgtccatgtgcttgtgggaacacatggtccaccccacccctccctgatccctacctattccgcctggggcgcagacactgtgtgcacatagatgtgttctggtcccttgtccccaggccctgctcatacacaggtacacctgtgagcacactgccccattccgccctccacccatacccctggggtcacactgacccctcagccccgaggcccttcctgtcagagatcccctctgttgtctccttgaccaccccgtttccctaggcagggtccttctgccctggctgttccggctgccgctttcaagcaaaacggctcctcccttccaagatgcttccgccagaggccttgcctctgaggatgggctggcccagtggcagtatctccctgaggttgtgaccctccacaccatcctgtcccaggagtcactaccgttgactacccttggtgggagttccttctctagcacaaccttcaaaggggcagagttggggctgggcccaggactggcctcttcagagggacccccatagagggatggccattgcaggggagtcttgggagagggaggtcacatcaggctcctgcccaccagctaatcctgtttgagggcttcctggggagaggggcctgggcccaccccgacctggtgctctcccatcttcccttggccctgggcagaagctggacctagagcgggaaaccattgagctggtgcacacagagcccacggatgtggcccagctgccctcccgggtgccccgagatgctgcccgctaccacttcttcctctacaagcacacccatgagggcgacccccttgagtctgtaggtgagtggccatggcagggctcccaagcctgtggctgggtgggagcagggctggtctgcagtggggcaggcctgctctgggtgcgaaggtcagcaggtttctcaggcctcccaggctcacctcctgccccccaacagtgttcatctactccatgccggggtacaagtgcagcatcaaggagcgaatgctctactccagctgcaagagccgcctcctcgactccgtggagcaggacttccatctggagatcgccaagaaagtaggcgccctccccagggcctcacctccccaggccctatcactccaatctccatgtggggcgctggggtcctgagatgacggcagagcaggaatcgttgctgtcgtgttgatcatagggcatctgaggcccaaggagcaacacgcatggcccaaggctgcccagctgatcggtggctcagaaaagtccaagtcctggctaccatgtcatgtcctttccctgggcctggagacagggaggaggtgaccccagcgagcagagtccaaggcatgcagggcagcaggccctaagctcttgctttcctgggagtggcattccaggtggggaatcaaggggagacctcaggagaccccagggctaggatgtgagagtaaggggtgccccaggagtgggggctaccaggggtggtgtgtgtcagagcccctcccattggggtgaccactgccttgccccatgcagattgagattggcgatggggcagagctgacggcagagttcctctacgacgaggtgcaccccaagcaacacgccttcaagcaggccttcgccaagcccaagggcccagggggcaagcggggccataagcgcctcatccgcggcccgggtgaaaatggggatgacagctaggaggctggagcagggccggccacgtgtggactgtggggctgcccaccttccgctccctgccaccatcctccttcctgggctccaggaaagtgtttctgggaggtcaggagggctggcagctgaacgcacttgcagcgtccgagggccaccgggctggcattttgtgacccttccctgttgctgtccctgcatctcgtctgtgtgcccagggtgtccggggaccctgcctggctggcttaagggggctgggtcaggggcctggcatgaacctggcctcccggggagctgagactagggtcccagcacagcccagaaacctttggccacaagaagtggggtcagtcagggctggggcaggggtcactgcagtttgggatggttgaatgctgtattttctaaagaataaaatatttttaaatcaagac

SEQ ID NO: 1271 - DNA, 1664 bp, Homo sapiens
gttcatccagtgagggacatttttacagggcacatgaccttaatctttttcattaatcttggttaattcatttccaggaggtcaagtctcttgtggttctgtggaatcaccagatgctcctgtgggtgtggcttagtctgagctgatgtaacaagtagctctgtgttgctggcaccatctggctgtagcagggttcagtgtgggaggccttgcctgtgaactgttctagaaggcaagctgcagggctgcataacactccattttccactgtgagtgctggggggacagtggttagcagatgacataggcccagtcttcagggtgagcgcaggaagatgaatgagaaaacccttcaattctgtgtagctgggctctctggggatgagaaactcaggggttggggggcacagaggaggcctcaatgcaggctagtgagggtggggagcaagacagtaaatggagctgaagctggggccagatgccaggtaggccacacatttcatcatcacatctctcagcaaccccagcccaaaaagctggcctcctttccaatcttcccagccaaagtccctggacaagctgattggaccaaccagagtcagatgctcatccctgactcatcacagtggcctggaagatgccacatgttgactagttggtagcagcaggcaggtactggtaccagtaaggcaaggctgctggatatagacacagaaggtcattaggacatgggaagttcctcaccaggctctggccctctttcaacctctgggcctttgcacatgcagtgccctcttctcagaaaacctttctggctgggactagtaagtggctcacgcctgtaattccaacgctttgggagtccgaggcgggcagatcacctgaggtcgggagttcgagatcagactgaccaacatagagaaaccccgtctctactaaaaatacaaaattagccaggcatggtggtgcatgcctgtaatcctaaccactcgggaggctgaggcaggagtgaacccgggaggcggaggttgcagtgagccgagatcgcgccagtgcacttcagcctgggcaacaagagggaaactccatctcaaaaaaaaaaaaaaagaaaaagaaaaagaaagaaaacttttccctccactctgctgggctgtttcattctcccctctaggtttccaatcttcgccttctcctggcagcccctcacattgtctcggcgggctctcaccaccatacactccatctagtgggtgaaggcgggcctaggcccgtgagggcaaagcctagcggccatgatcaccccgaggtgcccaggaccccacgggaggcgctcaagaaacggcccctggggaagagctggcgcgcccacccacaagcagaccccttcctgggtgcaaacccgtgtacgctgggacccactcctattcggagacccacctggcttggggcgcacagatcgggcgcgcgtgcacgatccgccccacccacagaccaccgtgatcagggcgcacagacacacacgcgcgtcctcccacgcacgctcggtcacacgcaggcccccctctcctgccacagaggaacgcgctggcgtgcgcacggcggatcaatcatcatccttagacccacccggaccgaggcgcaggctgcgcgcacgcgcggccccg

SEQ ID NO: 1272 - DNA, 1664 bp, Homo sapiens
gttcatccagtgagggacatttttacagggcacatgaccttaatctttttcattaatcttggttaattcatttccaggaggtcaagtctcttgtggttctgtggaatcaccagatgctcctgtgggtgtggcttagtctgagctgatgtaacaagtagctctgtgttgctggcaccatctggctgtagcagggttcagtgtgggaggccttgcctgtgaactgttctagaaggcaagctgcagggctgcataacactccattttccactgtgagtgctggggggacagtggttagcagatgacataggcccagtcttcagggtgagcgcaggaagatgaatgagaaaacccttcaattctgtgtagctgggctctctggggatgagaaactcaggggttggggggcacagaggaggcctcaatgcaggctagtgagggtggggagcaagacagtaaatggagctgaagctggggccagatgccaggtaggccacacatttcatcatcacatctctcagcaaccccagcccaaaaagctggcctcctttccaatcttcccagccaaagtccctggacaagctgattggaccaaccagagtcagatgctcatccctgactcatcacagtggcctggaagatgccacatgttgactagttggtagcagcaggcaggtactggtaccagtaaggcaaggctgctggatatagacacagaaggtcattaggacatgggaagttcctcaccaggctctggccctctttcaacctctgggcctttgcacatgcagtgccctcttctcagaaaacctttctggctgggactagtaagtggctcacgcctgtaattccaacgctttgggagtccgaggcgggcagatcacctgaggtcgggagttcgagatcagactgaccaacatagagaaaccccgtctctactaaaaatacaaaattagccaggcatggtggtgcatgcctgtaatcctaaccactcgggaggctgaggcaggagtgaacccgggaggcggaggttgcagtgagccgagatcgcgccagtgcacttcagcctgggcaacaagagggaaactccatctcaaaaaaaaaaaaaaagaaaaagaaaaagaaagaaaacttttccctccactctgctgggctgtttcattctcccctctaggtttccaatcttcgccttctcctggcagcccctcacattgtctcggcgggctctcaccaccatacactccatctagtgggtgaaggcgggcctaggcccgtgagggcaaagcctagcggccatgatcaccccgaggtgcccaggaccccacgggaggcgctcaagaaacggcccctggggaagagctggcgcgcccacccacaagcagaccccttcctgggtgcaaacccgtgtacgctgggacccactcctattcggagacccacctggcttggggcgcacagatcgggcgcgcgcgcacgatccgccccacccacagaccaccgtgatcagggcgcacagacacacacgcgcgtcctcccacgcacgctcggtcacacgcaggcccccctctcctgccacagaggaacgcgctggcgtgcgcacggcggatcaatcatcatccttagacccacccggaccgaggcgcaggctgcgcgcacgcgcggccccg

SEQ ID NO: 1273 - DNA, 288 bp, Homo sapiens
ctccaatgtaaaacatctaaaggtgaggtcttgacgcatcccaacttgtttaaccccttgtcttccctttctcagtaaagggcgacacctacctgcctagttgcttgagcttggcattggctgcttatttctcatgttttattgatgactaattcctgctgattctatcatctaaacatacctcctcagttctcctcacctcctctccactctatctctactgactctacctttctctggcccaagtcaccatcatcttttccccagacgactgcaatttcctggtct

SEQ ID NO: 1274 - DNA, 216 bp, Homo sapiens
tatgctggctgcccttcctcctgaccttgaccggtagattgaagactgctgtgaaggacttggtcctggtcatttctcctcgttgtccatattctgtttctgcagaagaccttggtgccatgaatgtatatatttctagatgtcttaaattcataaatcgtaagtttctttttcatattccagacctaaataaataactgcctccttgatgtctta

SEQ ID NO: 1275 - DNA, 2100 bp, Homo sapiens
taaaaacagaactctgattcatgaatttgccaatggcttgtccttctcaggggaacctccctgggcacagtgaaacccttcttggggcacgacctcatgcttgatgtgaaggtcatcacagaacatcagctctgcctgaagggtggccggcagcccagtcaggcttaacccgaggggtactcaaacggaggttcttgacaccttatcagggtgtgtacgcttctgcagaacgaaggttccttcccatgctttgccaggattggttttgaagaattactgacctagttgacagtctcgtgaataaaaatggcaatgatgaaaacaaacctgcaaatgaatcattcattatgaatttgaaaacaaaaacaaaaagaatcaggggttagtcaatttatgactcagaaaataatgacagataactggataagggtaaagtgacagataactggatgggggtaaagagtatcttctatagtgtatttgctgttggtttccttttttttcttttctttcaaaaagattttttaaacagagcaacttttgtgtggagtctaaatggcttaattacatagtctgtaagtgagaaaactccgctggatgactccatgtacttgctttctctcccttcacggaaacatgcaaggtgagagaaaggagtggaaatgagacaggcaagcatgagatgggcaagctggctgctttcctgttgtgatgtggtttggagaaaaaagaacaaaagccctttactcaagctgtaactcccagccagtcagcatcaaaggcccaagaagctattaaccacaaattaattaaccccttgctttagagaactaaggacctttctgaggccctacgtgcctagctaggcttaactttcacctcatcatgaacttttccttattttagtactaaaaatcatgcccacaggtggagatttaagatgctaatgagacatatgttgtatgaagcagcatcttaagccaccgtacatgtgcccgaaaaacctcacctctacatgccctgacttccccttactgcagacctccacaaagggaacccacaccttgactttggagagcaacccacttcctttcttggtgtttggtcccttatgtccataagctttcataaaatctttctctttgctactgtatgctgtgatctcttttgatttctatcctgggggatcaaaaaagcccacagggcgttggtgccagaaatcagctgtgcaagcacagaaagggagcagaggctgttgcctggctcaactggtgaggagcaagactggagaatgagcatgcagtgagttctaatactagcacatttcttacccactcaacacctgatcccttcccgacacatccaggagccttggttctctccttcctccaactctctgagagtgaatgctgctgagaaccactgtggttttaaaatactccgtgcaatacaaagaactctcagatgcatcctgtggtttgagagcacctttatgtgtcattctcatcattaacctcaatgaatgcatactaatgatctaatatgcaccagaagctacacaaaaacactttgtagttgttagccaattcattttggctacagccagccagaaaagaggaaactgaggcacagagaagcaaatgtcaaccctacctggaagtgtcagtctgaaaagatcagttgagtcttcctctaccagaccccaacttgtctggtctcgtgaagaaagacagaaatggatggaaaaccattcttatcaccttcttgctggagagttagggaagagtcagctggtccctaacaacaaactttgccctactccagtactgccaaaggggtctttgttgtaacatggcctacaaggagaggacatctttctgggaaagcacctagaatgtggctggcacatattcaatgcccagtaaatgtagctattattttttcaatcaacactcttacataccccttttccactcaccctcttctccctttttttggtcacccaataagcagaaattccagatgcatccttcggggtggttgggagcaaaggatccccagggtgcactgtgccctgggctgaggtatctctgaggtgct

SEQ ID NO: 1276 - DNA, 26225 bp, Homo sapiens
acagcgggaggggacgccagcgcctgcagaggctgagcagggaaaaagccagtgccccagcggaagcacagctcagagctggtctgccatggacatcctggtcccactcctgcagctgctggtgctgcttcttaccctgcccctgcacctcatggctctgctgggctgctggcagcccctgtgcaaaagctacttcccctacctgatggccgtgctgactcccaagagcaaccgcaagatggagagcaagaaacgggagctcttcagccagataaaggggcttacaggagcctccgggaaagtggccctactggagctgggctgcggaaccggagccaactttcagttctacccaccgggctgcagggtcacctgcctagacccaaatccccactttgagaagttcctgacaaagagcatggctgagaacaggcacctccaatatgagcggtttgtggtggctcctggagaggacatgagacagctggctgatggctccatggatgtggtggtctgcactctggtgctgtgctctgtgcagagcccaaggaaggtcctgcaggaggtccggagagtactgagaccggtaagcagggtgggaaggggatgggtgtggggcaggcaaacgcagcatcagccgccccagggttcggcccccagaatggggcgtctgaggtagtaagtagcacattagacaccccatccacctctacctgctggtgaataggagacatgaccagtgccatgacggggcacaattgggtgctgtggaagcaacaggaggatcacctaccaccatgggacagggaggggagtggggaggacacctaaggaactgaggtttaaatcgagatctgtgcttgggaggctgaagcagaaggatgacttgagcccaggagttcaagaccagccaaggcaacatagtgagatgccgtctctacaaaaaaaaaaaaaaaaaaaaatacaaaagctagccaggcgtggtggcacatgcctatagtcctagctactcaggaagctgaggtgggaggatcacttgagcccgagttcaaagttacagtgaactatgatcgcaccactgcactccagcctgggccacagagtgagaccctgtatcaaaaaaaataaataaataaataaaaagagagagagagagagagatctgagggattaagcagagtgtggacggggtggggaaaataaaagagtgttctaggtaaagatagtaggggaagtagagtagaatccatcagactgtggagagaacgttcagaatagtttccaggtttctagcatgagcaactgaggggagagctgatgaaaagtgccatttgctgagatggaagaaagctgttttggacttactaggtttgagatcacctagggagagtatagtgaggcgaggagcttgaggaaccccagcttcagtcaagagttgggcctgaggtttccctgggatgttcacagcgatgtccaggaagcagcttgtgcatgcatctgggttttgtgagagaggttgtgcgtgtatctcagaatacaataagcccagctgggcgaggtggctcacgcctgtaatccagcactttgggaggcaaggcaggtggatctcttgaggccaggagtttgaaaccagactggccaacatggtgaaaccctgtctctactgaaaaatacaaaaagtagccgggcgtggtggctcatgcctgtaatcccagctacttgggaggctgaggcaggagaatcgcttgaacctgagaggtggaggttgcagtgcgccgagatcacgccattgcactccagcctgagcaacagactgagactctgtctcaaaaaataataataataataataatacaatgagccctccactcctgtttctcagtttccccttctgcatgccctcggttattctggtcaggctttaaagatctcccaccagccactcctttcagttatgaggttcttcacatgcactttgaaggcggtagcaggggatgcagaaaaggtcaggggcacgacagtttgctccatgaactctcagaccagcagctcccatttcaccaagaagtttgactgtcttgatcagcgcgatagggagcagggtcagaatggagccaagtgacactaactctctcatccctcccagggaggtgtgctctttttctgggagcatgtggcagaaccatatggaagctgggccttcatgtggcagcaagttttcgagcccacctggaaacacattggggatggctgctgcctcaccagagagacctggaaggatcttgagaacgcccagttctccgaaatccaaatggaacgacagccccctcccttgaagtggctacctgttgggccccacatcatgggaaaggctgtcaaataatctttcccaagctccaaggcactcatttgctccttccccagcctccaattagaacaagccacccaccagcctatctatcttccactgagagggacctagcagaatgagagaagacattcatgtaccacctactagtccctctctccccaacctctgccagggcaatctctaacttcaatcccgccttcgacagtgaaaaagctctacttctacgctgacccagggaggaaacactaggaccctgttgtatcctcaactgcaagtttctggactagtctcccaacgtttgcctcccaatgttgtccctttccttcgttcccatggtaaagctcctctcgctttcctcctgaggctacacccatgcgtctctaggaactggtcacaaaagtcatggtgcctgcatccctgccaagcccccctgaccctctctccccactaccaccttcttcctgagctgggggcaccagggagaatcagagatgctggggatgccagagcaagactcaaagaggcagaggttttgttctcaaatattttttaataaatagacgaaaccacgaaaccactagactgatggcagcaaactaaggtcagatgagaggggaaactagagaaggagcagcctgagtcagtgacacaacctcctccccgaccctctaggttaaggcacttccggggaggcaggtccttggggtcctgttacacagggtgaatgggagaggaagggattaggatcccttctccccacctttgcatcaggacacccctgcccttctcaccctaccccatggccctgtccctgatttacccactctcatctcacagcactctaaggggaagttgggtgggaggagttcttgtgggtgggagaggtctgtgcccctgaggaagccgatcctgccaaatcttgatgcgacaccagcagcccactctaccctcttcatcccaaggagccatctctggggaagggatggagggcagccacaggccaggctgggacatgggaacctaggcggtgcctggccctggatgcccatcggggcccagctcgggatgcccgtcagcagccaggatggggtgtgcatccgggccctcccgccgggggctgccccagttgttcctcaggatggtgcccgtcttctcctccttgaactgctgtcggtcttcccgaggaatcttcaccgcatggtactggggcacggtggcctcggggtgcttcgcccgtttgaagaatcccatctataaggacaccaggccagaccatgaggagcctgaagagctgcggtccctggagcagatgcctagcgcggcacagctcctcaccctcaccatccctgctgcggcagaaaggaaataggctgaatagcatctggtgtggtgggcagcacccacggtgctcccatcagtgctgtgtccccaggttctcattcacagcaagagagagaccagaagggcgtccaagaggcaggaccaagggtatctcccttggcccctgaaagagggccttgagggtggagcatcaggaccggactcaagatttgtaccccctctagcttcttaagagacccaatagtgtcccccagaacacaaacaagacctgaggaagaaaatggcttcctagtcccctgcatctctggaatgatacctctcaagcctcataaacatgcaccccgtgtacttgtaccttgggcggcacgccccttacagcaataccctcttgtccatcaatacagtagtctagccccaccctaaatgaggaccatgctggcccttacacaccagggtgggaatgtgcccctgcacactcacactcagaggcccaggactcctacatgctcagactgcatggcatctccttacacattcatctccttgcacactcatgcccatagaaaaaagcatgcatgcgacctccccacactcccacatgctcacaccccatgagcccaccaaccctttgtgcacgcctcaggctgtgtagacttacccttatatctgcacccttctaattacctctcacctcacatcactctcatgcaatctcatttttcaccctgaacattcctgatcccctgaatgctgggaattctccttatattcacacacatacatacccacacacactagacacatgcacacacacaacagttaccccacagtccctggacccccaacttccatggctgaaggctgcacagccagacaggcccggtgatagttggtgggaaaagatgagctctggctgctccgatggaagaagccacactaggatgtcgagggagaagcagggcagaggaagcagaggatggaaagattgaggaaggacaggatcccctatctctgctctgtcttccttccatgggagcagggagcaagcatcctgggaccagtttcacagaggcatcaatctcccctaagactgggaaggttcccaacagcttggatgccactccagagcctggtctactgatgattcacacttgccaaagggtggctcagtctctgattggtcccaaagagcaggcacaggcaggggcagttctccagagccccaaggacatgtgtggttctgaacatagcccccgatgtggcagatggctcagcatatgaccccggtgatgtatgtgattccgtgtactgacgtgtgcatgtgcatacttttacattgagccctggataccagtatgattcggtatacagctctgggtgtacaagaatgcttccatgcagagcctggtatgtggaagctctgagttccgccatgagggcagtcccctggaggccgttctccgtgcttgttggccttcttggccacatttacctttccagttttcactgccacattctagttaagtcagatcacacttctctgcctccacgactttgcctaccatggtcctgctggacccacctacctcatccccttacatcctcaccctactaccccaccttcctctgaggactggttccagtgctacctcctctcaagcttttttccctctaaactcccactccattttctcaactcaacacttcctgccttgtccttgactacaggctcaccactcccatcccactggactataaaatccctgagaacgagatctgcatctgatttcttttttttttttttttttttttttttgagacagagtcctgctcagtcccccaggttgcagtgcagtggcgcaatcttggctcactgcaacctccacctcccgggttcaagcgattctcctgtctcagcctcccaagtagctgggattacaggcaccccccaccatgcccagctaattttttttatttgtttgtatttttaacagagacaggatttcaccatgttggccagcttggtcttgaactcctgacctcaggtgatccactcacctcagcctcccaaagtgctgggattacaggcatgagccaccatgcccggcttttttttttttttttttttttgagatggagtctcgctctgtcacccaggctggagtgcaatggcgccatctcggctcactgcaaccccacctttcgagttcaatcgattctcctgcctcagcctcccaagtagctggatctacaggtgcgtgccaccacgcccagctaattttgtattttaagtagagatggggtttcaccatgttgtccaggctggtctcgaactcctgacctcaagtgatccacctgcctaggcctcccaaagtgctgagattccaggcatgagccactgcacccagcctgcatctgatttatctttgaaacatccagggactaatagagttcctgagacatgcagggcaagtgttcagtgcagatttgctgaatacatgagtgtgtgggtgggtgacagaaccacaatacaaaatgctgctcacccaaccaggaagtccacccccatcagccccacctccaagcctcaccttccacaggagcagcaccagcagtgctagcaccagcagcccagccagtacagccaggaggatgacccaccagggcactccttctgccaccacagccatggggtccaagtataccatcactgggatctggggagcaaggggtcaatggagcaagaggtcaatggaacaagaactggagggagcaggaaagaagagagtcctccccacctatcccccaaccctgcagctcaccactgtggaggcatctcggagcatcaagttctttatggaggacttcactgtgatgttggcccggacaatcacttccagggacttcacagctgagtactcctaagggaacagggaaggagacccttctcctaaatgccccatgtctccctcccttccccttacctcctgaaattataaatgtaatggtgcccaacacagaggatgtttctgcctggtttgggttaagagtatgctgcgtttgggctgggcacagtggctcacacctgtaatcccagcactttgggaggccaaggcagggtggatcacctgaggtcaggagtttgagatcagcctggccaacatggcaaaaccccgtctctatgaaaaatacaaaaatatcgggtgtggtggcacgtgcctgtaatctcagctactcaggaggctgaggcaggagaacctcttgaacctgggaggcagaggttgcagtgagctgagatcgcaccactgcactccagcctgggggacaaaggaagactccgtctcaaaaaaaaaaaaaaggggggggatgctgcatttggacagtgaggaaggaggaggagaaatgagtcctggaggggctttggaggaagaagaaacacagactagagccgagtggtatcctcacctccagaaaggtgctgttccagagacggccccagacatgcagcacagccgcgcggtcaaagctgtagagtgggcagctgaacaccacacagttggccgtgccccgggcgcagtcctagggataaggacagacaggggtctaagccactcagctcaaccctgctgagactgccatctctcccattttccttacttgacctcaaactcccctcctccaggaagtcttctcaaactaatcttatatccaaaatagctgcctgccccaaatctgagctattcagctttgaaatgcgtggagggggcagcatggaagggaatctcttacttgacagcacaggcagagtagcttccccaagtgatgcttatgttacctaatgacagtcccatttattgagcacctactacttgtcaggcacttatctcacttaagcttcgcaatagtcctacaaggtgcacattatcatcctcatttttcaaaggaagaaactgaggaggcccaaggaggccaagcgacctgcctcaggtcacagcactagcaaagctaatgagtggtggagcaaatatttgaactcaggtccatattcggcaaagccacacccctgccctaaacccaaactcgctgaaggaggaggaggtagcctcaggagctcctgggtagacaggggactcaggctctgttctttccaggactgacctaaatccatttggcccaatcaccacctcacgacccatttgcctgaaagttatgttatattcatcacaccacgatccagacacagaagaatggctttaagagtgtctgaattatttgagttatcttttattttgccacttttgagccattcaagaatccttagccaagctgtctaaaagcaaggccttctgcctttttagtaaaagaatctactttagtactagtaccaaaacagagatatagatcaatggaacagaacagagccctcagaaataacgccacatatctacaactatctgatctttgacaaacctgagaaaaacaaccagtggggaaaggattccctatttaataaatggtgctgggaaaactggctagccatatgtagaaagctgaaactggatcccttcctaacaccttatacaaaaattaattcaagatagattaaagacttaaatgttagacataaaccataaaaaccctagaagaaaacctaggaattaccattcaggacataggcatgggcaaggacttcatgtctaaaacaccaaaagcaatggcaacaaaagccaaaattgacaaatgggatctaattaaactaaagagcttctgcacagcaaaagaaactatcatcggagtgaacaggcaacctacaaaatgggagaaaattttcgcaacctactcatctgacaaagggctaatatccagaatctacaatgaactcaaacaaatttacaagaacaaaacaaacaaccccatcaaaaagtgggcaaaggacatgaacagatacttctcaaaagaagacatttatgcagccaaaaaacacatgaaaaaatgctcaccatcactggccatcagagaaatgcaaatcaaaaccacaatgagatatcatctcacaccagttagaatggcaatcattaaaaagtcaggaaacaacaggtgctggagaggatgtggagaaataggaacacttttacactgttggtgggactgtaaactagttcaaaccttgtggaagtcagtgtggcgattcctcagggatctagaactagaaataccatttgacccagccatcccattactgggtatatacccaaaggactataaatcatgctgctataaagacacatgcacacgtatgtttattgcggcactattcacaatagcaaagacttggaaccaacccaaatgtccaacaatgatagactggattaagaaaatgtggcacatatacaccatggaatactatgcagccataaaaaatgatgagttcatgtcctttgtagggacatggatgaaattggaaatcattctcactaaactatcacaagaacaaaaaaccaaacaccgcatattctcactcataggtgggaattgaacaatgagaacacatggacacaggaaggggaacatcacactctggggactgttgtggggtgggggcagtggggagggatagctttaggagatatacctaatgctaaatgacgagttaatgggtgcagcacaccagcatggcacatgtatacatatgtaactaacctgcacattgtgcacatgtaccctaaaacttaaagtataataataataaaattaaaaaataaaaaataaaaaaataaaataaaataaaaaagaatctactttagacattatgttaagcaaagtaagccagattcagaaagataaatactgcattatctcacttatatgtggaatctgaaagttgaactcatagaagtagagagtagaatagttgttacctagggctggagtggaggcggggtgtggctggggagatggaggagatggtggtcaaaagatacaaagtttcagttagacagaaggaagagatatctatttaagagatctaatgcacaacatggggactgtagttaataacaacatattgtattcctgagaatcactaagagaatagattttaagtgttcttaccacaaaaataagtatgtgaggtgatgcatatgttaattagctcaatatagccattccacagtatatacatatttcaaaacattgtattatacatgataaatataatttttgtcatttaaataaataaatacattttaacatgaaaacaaaaagaatctatttcaaagttcccatttaaaagggaggcctctcagaggaaatcggtcacgtggagaagggaggattatccatgtaatagagcaacagccacgacatgggttcctacatcccctgacgttcttcagtttgcctcatgccatgctcccaggggagctgagggcccaaagcagggactgcagcagctgctgacattcccctgcaaagggtctccttggctctacctggggtttacctccacctccttacaatcaagccaaagacctcctaatctaagtccccaccacattctcactgcgagccccatcctagcagggaggggcacagagcatgtgcggatctgctcaataccttcacctaaacaacacaactctgcaaaacaagcagaaaaggggaaagcaaaactgctcaaaaggggtaaacttaataaatcacatataatatacggttgtcttaattattagaacttttagaatttagtgtttttgctgagcgcgtggctcaggcctataatcccagcactttgggaggccgaggcagacagatcgctcgaggttaggagttcgagaccagccagcctggccaacatggtgaaaccccgtctctactaaaaatacaaaaatcagccgggtgtggtggcatgcacctgtagtcccagctacttaggaggctgaggaaggagaatcgcttgaaccagaggcagaggttgcagtgagctgagatcgtgccactgcactctagccttggtgacagagcaagactccgtctcaacaacaacaaaaaagaacttaacatttttaatactgtaaaaatcaagcaagtgtccttacacaaattgacttttttatcttataagagttcaaaagaacgacaaacagacctcaaagtgtgaggatgggctaaccccatcccatcacgtataaaatgtaatgctttatataaacgtaatgtgaatcaattgcttggctaactaactggcttcaggtggagtgacctgttctagagtgagcaattgcaggggctgagcaggaagggggtctgcagtgtcagtagctgcctcccgggcaccccctcctatgaattgtgatgggaacatctggtcaacttgcacccagaccatcatgtgtctcaacaggtacccttcctggacacgcagcaccccggagctctggctgcaccgagtctggcctgccctcaccagggtgatgtttttcttcttctcagcagaggacactggccaccaggacatgctgggctcctgccgctcaccaggctcctgctgctcaggtggctccagctcccgccgcctcctatccctactgtccacatcctggacacggaaggggggtcttagtgagtgtccctccaatcacagcagtgctaagatcgaatctcctccccaccgccttcctcctgccccatcactgcactcactacccttactccccataacatctgtccccacatctaacccccacccccacctaagcctcaccaggtggaggatgttgggcctgggagagcaaagccctttctgcccaggcccctgcccgccctccagctcaacctgcattgggtacagcaaccacttcccattggcaatctcatgaggccacatgatgttgaggaaggcagagcccagggttctgagcgactggccttggttggaaacctgtgggaaaagagagtatgaggggagagacctcagtttttcttttttttttttttttaattttttgtagagacaggatctatgttgcccaggcttgtctctaactcctgggctcaagtgatcctgccaccttggcctcctgtagtgctgtgattacaggcatgagccaccgtgcccagccaaggaactcagctttcaagtggatcctaaatccacagagatggaaggaacaagggctgaagagaaggccctcaggaaacacaatttcaacaaatactcaggatcctagaccccaccaggcaccattctctccacccaccaaatccgggaaaccctggaagtgtccctggaaggtgtgaggagaggccccagccaagcaaaggcagagttctagggagagacattaaccccccgccccatgttcccatcccccagctgaggcccacagcagagaagcttccctggactctcatggcctaccacaccagcaggtgagacagccagacagaatgaccaggaaatggtcaaatgaggccccagcaggaacaccttcccacagccaaggtccatatgcaggacagaggcctcaaactgcatgctgccacatggtagaagagccccagccctggggacacagctcagcctctcctctgtgccaaggagggagggtgaccatggaggggcctcatccctgacacttaccgtgacctcatacttgaccttgctgcccacatcccgctcagactgcatggctctctcgcccctcaccacaccagagaagaagagttgctggggaatggccattctggcgtggagaggtcagaacaggggtgagaaggtctggggcctggctcaatgaaggcagggccctggccaaggtttggaaatgtcaatgccccctccctccaatggaggtgcccccttgggccaggctcaccctgcaatggacagtggcagctcaatgaagacacgggctcgtgcagagactggatgcagctcctgctcactgatcctggtgagtgggcaggggcaagtatgggcatcaggcacaggcacctcccaaggggtcagatgaggtcaatatgactacccccacctcacccttccggccccgcctggcttacgtggccaacagcagctctacctccagttccgtggtctcaatgctgatcccggaggtgctaaggatgaggtagaaggtgacctaggccaagggtggaaagagattagagtcaggggtggtctacgggcttatggagaggctactcacgtagggataagggcagatgtgccaacctgggcacctctcttcatggggttccccagctcacactcaacatgggaggcattctcattggacaggcagagtggcttctcctggaatgggagagaaggcaaggtcagtctgggttactggagcccctcaagaccccaccccatcctgcccccaggtcctcaccgcagggtccagggcccggacccctgagtagtgcagtgagtcaggaagcatgaccaggagctgggcttcatgggcatcatccccatcagcctggggctgggctgggtccgatggcaggttggtgaccatcagctccaggccaatgactggctgcccactcagtgcaaacagggctgttgttccatccacatccctggagagtcagaccccactcctgctaagttctgaacacctccccctaccattcccccgcccagtctgctcccccagtacctgccttcactccctgagcctctcttcccaccccaggtccccatcacacccgtccaagcctcaggcctctgtacacacgactgggagtcaggggacctccgttctcatctcagctccaccattacttaccttggccaagtaacttaacctctctaggcttcagttctccatctataaaatgagactaatataattcctacctcacagaggtttgaagactaaccaatgagatgtatgtagactgcatattattagtgtactgtgaaggattgctattccttgccatgggagcccccgtggccccatcactgaccctcatctcagtctccaagtccatcggcaggtcctcttccaccttctgccttttctgcaggctcagcccttccctctgactggtcctcctgagagggctttctctcaatccttgaactcttgccctcccacccccaccctgctctctgcccccctcacatgggcagaggttggaattccgtgtcgctgacccgggtacagaagcgggcgcggaccagctgcagattgctctggcagatcttgtcttcaccacagccttgcttcaggaagtggatctggggagagacatgagataaggggcattcctagggggcaaggcagggggcaaacctgtcaccatggcatatggtgggttagagtatcacaggattaaacaacctgtcctcaactctcagatctgctgcttattagccatgtgatcctgaactgggtcctctcctctgggtcctctcatcatggtagtgatgggagcactaccatgccatggtagagactagcagcaagtcaagagctgggccacactgccccagctcacatgcatgtaactgagttccggatttagaacgggaaaagatgtcaagggcaccacttctgggccagccataaaaaccatgcaagcaaggggcctcatgttctcccttccagctgaatgggatgaatgtgacttcaagagcttgaaggccgcatttgaagattacagaatcccatcaacctgagccccctgaatgactacatggagtagaggagctctgtccccttgactaggaacatggtcatttaggcacctagagatatgaggaattactggagtagcatacgtgaaagggctctgtgagctgtgaattggtgtcactggggagggaccatgatctttgccctcccagctcctccccctgggctaaaccagaacccatgctcacctctgcccgctgggtgctgggctggtgggcattgaggatgggggccactggaggcagcccctggccaggagcctgtcgccggagccgaggggtctggagactgtaggacaaggtcactacaatggcccgaagcttgtctttgacattttcctaggaagaggaaggtctattcctcactggaacaatccccaggcctcagccctgctcagtgccccagccagacctaggaccaattctaaaacttggaaagaatattagggagatgaatgagagaggtggagaactgagcaaggaggagggagaaagactggggtaggggacaggggaaacctttagggctttgaggaccagatgtgatgataaaagctgccacctcctccattcagctggaagaggggacatgaagccccttgcacctcctcctcctccagggagtgcagaaatgacaggagagggcagcagatgaggaggaagtgagctcagaagacaggtttcccacgtgtctaggtcttagaaggaggcacgagtgtgctcgggaaaaagcagctaagaggaatcagggaaaagagatggagccatgaaaatgaccctcagaagccaaggggtcagtgtccacctggagctggaacatggcgtctccacagactcggtcatgctggtgcttcagccacacggtgcccgaggcctggtgcttgggttcttccaggttacggctcaggaacgtcacacggggaacctggccccggagcctccggtctgtgtccgcatctaacacatagtccagggctgtggcatgttgggaaaggaggagctgctgagctgcagagctgctccagctcaccccattccaagggtgctcttctaccacctcgaagtgacccccctccctgggaaacccaaaagggcgagccacagaggggggaccgcactcacccacagtagggctatagctgctggggactgcaatgtagctgaaacagacccttaggtccacactgcgggggcaaaggtggctcctgagccaaacgaggctgatgggccaaggcccctacccccaccccatctgtcacatcctgtcacagccccagccccaaactggggagataaaggatcaaagggagggcaggggaagctgccagggtccaggtgccacccgatcccacctcaccagaccgagtggccgccagcacagttgggctgctccaggtcgatgcttcgtggagcaatagagacctcatgggagacatggaggatgggtctggccctgggattggggagtcaagagcacaagaaacatgagaacatgaggctgggaaacactcttcagcattagatttggcactgaggtcggggtcagagtcacagggaggggctgacggcctcagggagggaaaaggttgagaggggctcacctgaagagcactgcggtgtcagccagggagcccaccagcaggtcagggtattggttcccatccatatccaagctgcctgacagggagtagccgaagctcttgatgcccacagcctcgccctccagcacctagagaaccagctgtcagcctccctcaatcccacctcccgcaggcctctgcctcccctgatgcctctgctgattccacccacacccattccctcatcccagcgactcccctcacctgtgaaggtttggcgacaacccccaggctgctcccatggtagatgaagactttcccatcaccatcaaagggggcacccactgcaatatctgcagggcacagggaaaaggcagtcacgctggctgggggccttgcagacaagatccaggcctcaactccccccagtcactcaggtatgttttctattttattgagaggctacaaaatcccaggcactctacatacatcatctttaatcctcttggccactccctgcagatattactaacgcaaaaaggttaggaacttgccaaggtcagaaagctggtaaatggtacagctcagacataagctcagggaccctctctccctgagtcctcagaagaccacaccctgacctctgaggggcttccccatccctcctgtggcccctccctccctgagcctttccagttccccgtcacacctggaaagccatcttggttgaggtcccccaggacagccaggctgatcccgaacatggagtcaggggagccgcagagccggagaggggagatcccagcccagtgacccccctggttcaagtacacatacacagcaccccccagctcttcttggcgctcaaagaagtagggggcacccactatcaggtctggccagctatggagagagggaaacattcagtgtgggtcctccctggccagaggagccagcaggaggctaagtggcctcagccagactggggctactagacccagcctccctcaggtggcacggccctctacccactcacccatcactgttgaggtcagccacagccagtgagtagccaaagccggaggtcaggcgctccccagacagcataacctcgggcaccaggcgactggcgctgtccttgcgcaggatgaccacagcacccttgtggttggcgcggggggctccagccacaaagctcagctcttctgcacgcaccagacctttccccgagtcaatagagaagcctgggggaagggtgacttacccctaagtcttcaccccaagactcagaagctggggtgtgtcacagctcccccagcccctgccccctccctacaggttaagagccaagtcacagctcccctgcaccctgccccctcccctaggttaagagccaaaagataggtccccccaagtcatcagcaccacagctggatagctcttcctccccacagggcctggcagcctcccacacccaccaggcccagagacaagcttggcacaaaaagtgcagtgaggtcagcctcagggactgggcaagagagagaaaggtgatggctgagaaggccaggagcccaggtaggaggctgagcacagtggcctcaccctgcccacacccagggagctagaagagctagaggtccctctcaggcccgaatcccacccagtgcacctctttcccccaactccctcatcctggcagggaggggaagtcttcacatggatgagggggagacaagggggagtgagagagcgcctgcttcacccaaacatctcccaggcctggtttcctcctcctctgcagaggaatgcagatgagacaacgagagggacttaccaacaacattagccctttcttcaatatgtgcccaccatccatcccctcagggaaagtccccctagaagacaggactgtccttcccaaaatatcctcagccctggccctctcattccacctgaatcttcctccatggagacccctggctcacagccccagaggccaccaccctgggggcctcctcctcttaggcctgatcattggacccagctcttctctgcaatttgggcccaatgtatgtctccctgggtgtgtgttgggggaggaggagattataaggcaccaaaggtcgagttccctggggaaggaggggaggctgggccatgcccctagagtccaggaggtgggagcttacaaacctaagtagctattgagggccaagtctccggctggtcctgggagccggtcagcagggtccaaagttttatacaccagctggtcggggtctgagctatcaatgttggtcacaaaaagcaaccctgtggggggtggggtgagacaccagggaggggacatccagagtaggggccacagagtagggagacagagccacagaaaggccagaaaatggtggaagaagaagaggtggagagagaaaaagagaccagagagatcacagccagagacagaaagacagagagagacaaggtgagagacagaaacagagacagaaggatgggagcatggagagagaggacaagagagaggagcagagggttagagcagttctgggccggggagaggtccctaccaaagtagctgttggcagggaccgggatgaggcgggggtcctgctccttctctccccccgcctcgtagggaccgtcgtccaggtgtgccaggtccgctgagccctgtgcacagagctccaccctggccgtgcctgcaaggacagacctgttagtgcccagggcagggcgcaaggaacacccctcaggccggacactgagttagacaggcacacggggaagccctgcctcttctttctagccctctccccaccctgtccccaacccaggcttcctggggtcccccagatgtggcatcacactcaccgagtgtcagctcagccagcagcagcgtgcggagacgggaatggcagtgatgaggtgtgggctagtgtgttggagcatgcaggccccagctgcaggcccagcgtgcacttggggcccatgccagcatgttgaggaacacttggccgtgcgagggaaaggaggcaccccccattcatgtgtgcactagctcaatggggtggaaggcatggcagtgccctggggccatacagcagtgcacatgtggtcatgcttggccatgtgccatccccaaccctgtctctgaggtaagaggaggttttggtccccttctccccttcccgaggagtgactcacccttccaattataggttcctggggccccaaagaggaggtagtggctatcaggggagaaggcggcagctgtgccctgctggcagaacccaaattgttcatggccttgggggcgtccctcacagaacttccattccccaccatccaactcatcccggatggccaggtcctggctgagcacaaagcagcgaccaatcatatcccgcgtctccaggatctggtccactcgctgccttgcctcatatcggtgtgcacaggtctgggggaggaagggatggggatcatttcactctgtgggccagggacctgcttgaggcatgctgcccatatgcagagatttggcagatactgatacatgtgtgctcacatgcacatgcacatgcacacatacacacacacccctatgccggcaccactcaagcaccattaccctgccagtgttacacaggtccatgcataacccagcaacctgtctgcacccacttccttgccctcaaatggagatctccttgttccacattctgcctggagccaaaagacacaattaagccaccacataggatgtgtgtctccctgatcatgtcacagtcctccaaaatgccaagcttggccctgtccctggacctttgtaagtgtcaccatctcatctgcaaagaacttcctgtccgcttcactctccaagtattactttttttttttttttgaagcaaggtctcactctgtcacccaggctggagtgcagtggcacaatcatggctcactgcagcctcgacctccagggctcaagtgatcctcccacctcagcctcctgtgtagctgggactacaggcatgcaccaccatgactggctaatttgtttttattttttataaagatgaggtcccactatgttgcacaggctaggtattacctattattaaagcctggctcaaatcatcccctctgcagaagtcttctctctactcctcctttggacttttatagactggagactagaccactcacttaacatgaaccagattctgccccacagtgatctgtattggtaattgtgtatctatgcgtgttactgaaagatagagagagagagagaaacagagagctctggttttttcgtttgtttgtttggttggttttgagacggaactttgctcttgtctcccaggctagggtacaatggtgcgatctcagctcactgcaacctcctccacccaggttcaagtgattctcctacctcagcctcccgagtacctgggattacaggcgcctgccaccacacctagctaatttttttttttttttgagacggagtctcgctctgtcacccaggctggagcgcagtggcgcgatctcagctcactgcaagctccgcctctccggttcacgccattctcctgcctcagcctctctgagtagctgggactacaggcgcccgccaccacgcccggctaattttttgtgtttttagtagagacggggtttcaccatggtctcgatctccttacctcgtgatccacccacctcggcctcccaaagtgctgggattacaagcgtgagccaccgcacccggccacgcccggctaatttttttgtatttttaggagagacagggtttcgccatgttggtccggctggtctcgaactcctgacctcaggtgatccacctgcctcggcctccgaaagtgctgggattacaggcatgagccttcccctgtagtaactagcacaatgcctgatgcttaaaaggttctcagtaagagtttgacaaatggatggatgaatgaatggacagacatttttacatttataaggacaaggaccatgtctcacacctttttatatctccctgatgtacttggaatcataccatattcctaacttgtgttctctaagcacacctatgcgtatgcacacaccataaacacacacacacacacaccccatccgtgcattcagtcatgagaagcaatactcacaacaatcttgcccccaggcccctggctccgaacactgactcccaaccactggttctccttgctttccttttgcatatcagctagaggcaggacactgggaattaggggagggaagaggagcccaagtcctctcctccccgctcacacgcttcccccactctgttcatgcagggccacacctccctggtcgatgtccactctgtagcagtcagtctcctccaggctcaacgggcaagcgaagaggcctccagtgcgattcgcctgctgcccaggaagagccagggcctggggagcacccaccagcagcctgcaagatggggcaggggcagggacagggacaggagttagaggtcagaatgacccaatctcattagagctgcccaggcccaacccctcagtactaaagagagtgttcaaggactaaagagaaggggcaaatgtcagttttctcaaaccctggcaaggacaaattaatatgcttggtcatgcagtcatcacgttgcatgtacatactatctggataagggatcaacatacacagtagatacacacacacacacacacacacacatacacgccaacccaagcagccaggccaacagtgctggtttgaaagaactgcctgttcccagcacctgttcctgagtaggccttccctatcccctccttggccccatccccaagctctgccctgctccccaacccagtccagttgaaacccagccagaaatgccaagaatgctgggagcaaaagtaacagggccccagactggcatcagagtgtggctcagggaccagcttcagaggccaggcaagaggctagatacggacccactgccccctcatcagggacccagcaaagaccccacctcccagaagctgtgccagcccaggattccatcagtcactctggctggcatggaggtagggacaagtttctccttctgcctccaatgctaccccattctcttcccgacatcctgaatccccttccccatccttccttctccccatgtccatgatttctccttcccttccacccccacccagtcttctctcctgcctccccctcagcctctttcccagctacaactttcttggcaggacaattttccatgatcacagccaagccgtcttccccaggggagcacagtgctgggaatggaggctgcctgggtcccctggggctgaacccccaagccagagtgaaggcgggggtgaggtaagatgactgacacccagctggctccatgggtcctctctttgcagaaggagagactcagaagtggcagtgggacaaacctcaacgcctctctcccacactcttctcctccatctcccttcctggggggcaaggcccaaaaccatgttaggcagtattacagacaggcatctgtggggcactgtgccagctctgatggggtggagggggagggcagagagccattcttccttcccacaactcctcctcatctcttagcagctgccatcccttgtcagagccagtgtcaagacagagaaggggtatagggagtagtagagaagagaagacacatttggcattcaactacttattgagagtctattgtatgccaagccctgtgtcaggcgctggtgagacaaggaaatcatatttattcagcacctactatgacgtcagatccgaggctagacaccagggatataagaaactaacattcatcactgtccacatatgtgccaagcaccaggataggcaagtcacatgcattatgtcatttaatcatcagaacaatcctatgagataaggattcttttcttgtctttcagatgagaaaactcactcaaagacattaagcagtgatgctggaattcaaatccacatgggcctaactccaacactttgtcactccacccagtgactgacctgtctctagaacactgagaccaccccagaaagggaaggagagagtggggagatgagggtaccctgggcagaaaaggaaacggggtgatacagccctgcataaataaatggcaaccttcaggcaagtcagcagtacccccagcctccaaacatagaagtggccatctctctgagtgtcggggctgtcttttcatctttgtgcttgccccatagggagtgtcagaatgtgtttactgaacacacacattttgtggactcatagagatacccagtgtcacagctggtcagtgcatagctaagcacccagataagttatccttgttctatgttcacatctcctctggaggccaaaagtagggaggaggggaggggcccatgtggaagaaagaagctgagtgcatagatatgcccagtccgctcttggtggagaagagaccaatcgatccttagtggaacaagagcacccagcagcatcctctctagtccctccacctctggtccagccacacacactccttcctggcttcatgccatacgccctaaccaccccagtcttctggacagccacagtgtagccactgcagagagaaaagcaaaaaaaaaaaaaaaaaagtgttggcagctggggggcagagggaccccctgggagctcagctaagtgaagacaaaggagtagcccacgaccactgcacttctcgattctccacacactccagggccccagcccaagtccagcccctctttggcccctctcaatctgggtggccctctggggaggatgcttggcctggaaggctggctcagccagggaggccctctagccaagcctttggatccagaatctctgtaaggcgctctgtgaatcacaatacaagaatagcaatactactaacacttcacagcactcactgcgggctatgcactattctaagcattttatatatattaagaactcttaatctgcacaacaaccctatgtagtaatactatgtttatatcctttttacagttgagggaagtaaatgaggctggaaccacacagcaaaggttagaccttaaagtctcatcccagagctagactaaaagacatcaaaacaggcaagaagtttttttcatcagtgagtgctaaggcaggccacctgcaactcaaaagctagggactgagcaggtgcctggcctctcacataccccccgccccccagcagcagagcaccccctgctggagcaaaagcagggtgaggcagtcaggccctctgggaaaggccccagcttggctctgggagacggaaccaggggccaccttcagagaggagggggaaatgacaagagaccaagctattaaaaataacctagaatttgcctggaaatagcttagagagttcagcatgtcctaaaaaggcctccagtcctcgaactctgacagatggagaaggagggaggaagggagggagggagcaaaggtgaatgaggaagcagatggtaaacagaagaggagatgaagtccgttgctttctatctctcccaaagttttggggaccaccgaccctgctaccagatgatagggataatggaagaagaaagattagagctaggcccccactccccaagcaagtgaggagaaatgagctcttgtccctgccccctgcccccagaccgacagtagaggcagaagacagtcccagtggacagcattgatcccagtaatggatacttaatgtggcttaggcactggttgaagagagaaaagccccctagcaggagcaggtgagaagctttcttcacctctggcctccctttttacaatcagacatgtagcaagagccaaggatacaggcaacatgaccagtcacaggcccctcacaaaagtatatccatctcccatgggtcctgaactgattagaaaaaattagaattgtcctccaccccttactcctcctggcccttcccagctgctgagattcctggagttggaaatttgctaaggaggaggaaggggagcagcctggccagcatccttcctggatctctctcactgctacagctgctgcggctactactactgctactagtactttgagggttcagtttgctgccactctctatcaccaagccacctactgcaggttggcagacctgcagatcctctcccaatcttcccgtggtcttaagccacagaagtggaagctctctcctggccttccagtgccctgctgccctcattccatccatggcaatgctctagcaggaagttatttctggagtctgccctgcatgcatccctctcatggcaccctcaacttctatgtcctttccatctcctcccattctaagcagagacagacagtctccctcccttggggaattcagcccttggaagaagcaggggagccagaggccctggggctggatcaaggatgcaagttgggggaaaggcccagaagaaggagatggttcgctgccaagacaagaaccttgctttccaactcatccctaaagcaaaatactggtctcagggccgggaagtgcagcttcagacgcaagccagatgaggcaaggctccaggttgggatgtgggatgtctgtgggcagtctaggtcttggtggggctagaaaacagagaaatgaggaggcccacagagtggggagggggacgatctgtggctcgggcatggcgactctgggcgggtgcggtgactcaccagctctggggtcggggctgcaactgccggtgcagggccacagagaagccgaagaggctgcctggctcgccctccttgcgcaaggcacccatcacgtccagattgaaggcgacagcccgtgagaagagcagttcgacgagcagggagccaaaaaggtagcaaatcccggaggccccccaagggtcgcggctccgagccccggccatgggacgatccctgcgcgagctcccagcgaatgcaagggaaatctcgcacgccccaagccccaggtccccccaggcgcgtctctggtctccaaagtctcgttggtctttcagacgtctcccagacgttcgccccgccagccctcccgcccgcccgccgctccgccaccccgccgccccagcaccggctaggacaactacagcagccgcagc

SEQ ID NO: 1277 - DNA, 259 bp, Homo sapiens
catctgtccatcttcccttctctctctcactatctgattttgtctcatcccaaattctattttgtcatcattcttgtctctgccacacttggaatctttctcagagtatttctcaatgtttctagtgttgtctctgcccttcaaacactatcatattcttacgattctttcttctctttccctttcttaaaagttccaataagtgtcctacctccttcctcttcctgtgttctgtctttcctacttcattgttcaggat

SEQ ID NO: 1278 - DNA, 946 bp, Homo sapiens
cccagccatgccagtgtggtcctggagaaaagtgccacccagagactggggcctgtgtatgtcccccagggcacagtggtgcaccttgcaggattggtgagttctttgccctctccttcccacccattgtccccagggaactgggacctaggcccctcatacagtccctacttccctcctgagcacctctcccatgcagcagagccaagatgccattctgagtgagcaccccattccacacaggaatccaggagccctttactgtgatgccgaccactccagtagcgtataactcgctgggtgcagtgattggcattgcagtgctggggtcccttgtggtagccctggtggcactgttcattggctatcggcactggcaaaaaggcaaggagcaccaccacctggctgtggcttacagcagcgggcgcctggacggctccgagtatgtcatgccaggtgagctggcacagggcctggggcacagatgagtggctggctcataggcacaagagtggatgctgggcatgacccaaagggaagatgaggagtggggaggagggaggaagggaggtcagggaggccaaagtactgatctccggggacaaaacagctctcttggactcctgcccatcgctgagctcaccctgtgcttgtgtctgtcatgcagatgtccctccgagctacagtcactactactccaaccccagctaccacaccctgtcgcagtgctccccaaaccccccaccccctaacaaggtcagtgccgggggagggggtgcactgtggagggaagcgcacagaccagcttctctggaaagccctgtccttgcctcttgctctccctcctgcactgtcccctcttaggttccaggcccgctctttgccagcctgcagaaccctgagcggccaggtggggcccaagggcatgataaccacaccaccctgc

SEQ ID NO: 1279 - DNA, 8317 bp, Homo sapiens
ggtgccgggaggagtgcccggtgggccgctttgggcaggactgtgctgagacgtgcgactgcgccccggacgcccgttgcttcccggccaacggcgcatgtctgtgcgaacacggcttcactggggaccgctgcacggatcgcctctgccccgacggcttctacggtctcagctgccaggccccctgcacctgcgaccgggagcacagcctcaggtgggccgcgggacatgtggtcaaaggatcaggaggccaatggggaggtcttcctggccgaagtcaccacagagccagggccatatccaagggggacaggtgtcacagaaggggaaagggagggacctcaggggccgggaggggcctggggtaccgctacttgccccaacccagttttcagaatagcgcggagcctccctagtgacccccttaccccagcgatgtgcgaatcccactgaccacgcggaggggtcgggaagctgccctgcccctgcccagctcagaccgcgccacgcccccgcctctgcccccagctgccacccgatgaacggggagtgctcctgcctgccgggctgggcgggcctccactgcaacgagagctgcccgcaggacacgcatgggccagggtgccaggagcactgtctctgcctgcacggtggcgtctgccaggctaccagcggcctctgtcagtgcgcgccgggttacacggtgaggcgcgcccggctgcaaggaagcgaggcaggtggagaggccaaggaatgggccgcccctctcacccgctcaccctctttcagggccctcactgtgctagtctttgtcctcctgacacctacggtgtcaactgttctgcacgctgctcatgtgaaaatgccatcgcctgctcacccatcgacggcgagtgcgtctgcaaggaaggtaatagggtggagtttcccagagagaagacttgggggatggccaagggaagaagggagagtccaagagtatgggtgggccaagggcaggggagcggctgcagggtaagggtggaggggcagcagctggacacagggaaagtatccaggctactttcttcctggaatatccactttgcttttcttcaaccacaaagatcctacctgtccttaaaggctgaggccaaaagccacctcactggcgaacgtccctcaccctcagtcatacggaaacacaattaccatgctgggaagggcctcacatctgccagagtgacacattggcaacctttaggctggactcggatacagttgtgctttgtttggctaacaagtctcccatcttcagtccccactactccctgttgtctggcacatcctctgtataagtcatttagttacctgatggggcccctgtaaacatttgggtttagtgccatcccctttattttgcagaaggcaccccagacccagaatggggtggtacctcactggaaggcagttagccttctgctccgcatcaaataactcataagcttttctcctgtatggtgccgtgaacaccccccacccaccccagctcatagcatagaatctggcccagccagctcccactgtgtgcttgctcaggaagggaaatgggtccccatacctacctaccaggcccctcctccaggttggcagcgtggtaactgctctgtgccctgcccacccggaacctggggcttcagttgcaatgccagctgccagtgtgcccatgaggcagtctgcagcccccaaactggagcctgtacctgcacccctgggtggcatggggcccactgccagctgccctgtccggtgagtgctggacagcctgtctgcctgggggtggggagggcatggcgtcccccagctgactggcctacctgctccccactccttctccaagaaggggcagtttggagaaggttgtgccagtcgctgtgactgtgaccactctgatggctgtgaccctgttcatggacgctgtcagtgccaggctggctggatgggtgagcattctggggccccaggcctactgtggattgggggatgcatccataggaaatgtgtccagaagagccccctggaactgaagggggcccagccaggcacacccgactgctgtctcccacaggtgcccgctgccacctgtcctgccctgagggcttatggggagtcaactgtagcaacacctgcacctgcaagaatgggggcacctgtctccctgagaatggcaactgcgtgtgtgcacccggattccggggcccctcctgccagagatgtgaggctccctactgccccttccacctgccaccagcagggggcagtgtagtgtcagctgccagagcacccctccccccgcgcccgccgcccacctctcccaccttacccccggtctcttcctctgacccgtcttcagactagttactgcagtgggaaggtgggagggagacggtggggtaagggctgattgaggattggcctctgcccccaatcaccatgtacccctttcccccagcctgtcagcctggccgctatggcaaacgctgtgtgccctgcaagtgcgctaaccactccttctgccacccctcgaacgggacctgctactgcctggctggctggacaggccccgactgctcccagcgtatgtggtagcttgtgtgtctgagcatacgtgcatgctgagagggggtgctgaggacgggaggtctctgtcccccagctcctgggtataaaagcctctgggcccaccttgagtaaatatttactgggcaccacctacatgctgggtactgttctaggtgctaaggatgcagcagtgaacaggtcagggggaaaaattcctgcccttctgcatgggaagcctgggaagaacagtatttttatgggagcaggggaaatcataggcttagcttgggacattttctcttgatttctttttctttctttctttctttctttctttctttctttctttctttctttctttcctttctttctttctttccttcctttctttcttttctttcttctttctttctttcctttctttcttttctttctttctttttctttctttctttcctttcttttctttcttctttctttctttcttttctttctttctttctttcctttctttctttcttttctttcttctttctttcttcttttctctccctccctctctctttctttctttttttttttttttgacacggaatctcactctgttgcccaggctagagtgcagtggcatgatctcagctccctgcaacctctgcctctggtttagttaattcttttgcctcagcctccccagtagctgggattacaggcacacaccaccacagcaggctaatttttgtatgtttagtagagacccctggggtttcatcatattggccaggctggtctcgaactcctgacctcaggtgatccatccgcctcaggtgatcttggcttcccaaagtgctgggattacaggtgtgagccactgcgcccagccctttttttcttttgcatttttcagtttatttttatttatatattaataaatacatgtatttctttattttatgagcctttcccccacaaaaatatattaagatcattgaaaagattagtccaaaaaagccaagtaaaacgagtttggaaagaggaaacaggctgttatgaagaagactgaatttcagcttaccagcaggcggggtaaagaaggaagtcatcttggtgaagagtttttccatagactctggttacaactactattagattattgctagtgttagacacacaaaaataatgccttaaacaggacagatgtttacttctctcttatgttaaaaacaaaacaaaaatccatccggggtagcttggaagcctttggttgtgtggcactgaatacactattttgaagtggctattagatagtcaagtgcagatgttgagtaggtagttggacacgtgggtctggagtttgggggagagatggggctggaaataatcatttgtgagtcattggttgcagatactgttcaaagctttggtgtgcccagggagaccaaagctgagctaaaggcttcagtgatgctgggggctgagagttcatccaggaaaagctgtacctgccccaccagacaggccccatgtctcccgtagcatgccctccaggacactggggagaaaactgtgcccagacctgccaatgtcaccatggtgggacctgccatccccaggatgggagctgtatctgccccctaggctggactggacaccactgcttagaaggtaccaacagaaggggaactccaggcccctgcctccaacttaacccttacccaaaaaaaggagactagagtttcctggcggctctgatgccggcctgcctccttggctgtctccccaggctgccctctggggacatttggtgctaactgctcccagccatgccagtgtggtcctggagaaaagtgccacccagagactggggcctgtgtatgtcccccagggcacagtggtgcaccttgcaggattggtgagttctttgccctctccttcccacccattgtccccagggaactgggacctaggcccctcatacagtccctacttccctcctgagcacctctcccatgcagcagagccaagatgccattctgagtgagcaccccattccacacaggaatccaggagccctttactgtgatgccgaccactccagtagcgtataactcgctgggtgcagtgattggcattgcagtgctggggtcccttgtggtagccctggtggcactgttcattggctatcggcactggcaaaaaggcaaggagcaccaccacctggctgtggcttacagcagcgggcgcctggacggctccgagtatgtcatgccaggtgagctggcacagggcctggggcacagatgagtggctggctcataggcacaagagtggatgctgggcatgacccaaagggaagatgaggagtggggaggagggaggaagggaggtcagggaggccaaagtactgatctccggggacaaaacagctctcttggactcctgcccatcgctgagctcaccctgtgcttgtgtctgtcatgcagatgtccctcccagctacagtcactactactccaaccccagctaccacaccctgtcgcagtgctccccaaaccccccaccccctaacaaggtcagtgccgggggagggggtgcactgtggagggaagcgcacagaccagcttctctggaaagccctgtccttgcctcttgctctccctcctgcactgtcccctcttaggttccaggcccgctctttgccagcctgcagaaacctgagcggccaggtggggcccaagggcatgataaccacaccaccctgcctgctgactggaagcaccgccgggagccccctccagggcctctggacaggggtaggtgccgggaggccagggtctctggcgcgggtggatgtgtgcagcccagatgccgcgtctgagtgtgtgtgtctggagacgggggctctgggccccatttctagaggaagtgtgagccgggggaggggacagagggctgattaccagttgcctcctcctcctcagggagcagccgcctggaccgaagctacagctatagctacagcaatggcccaggcccattctacaataaaggtatgggcacaggggcaacaagggaggtggctgagctggggctgaggaaccagtgcctccatgcggcctgacttctttcctctatccttagggctcatctctgaagaggagctcggggccagtgtggcttccctgagcagtgagaacccatatgccaccatccgggacctgcccagcttgccagggggcccccgggagagcagctacatggagatgaaaggccctccctcaggatctccccccaggcagcctcctcagttctgggacagccagaggcggcggcaaccccagccacagagagacagtggcacctacgagcagcccagccccctgatccatggtgagccctccctctccactggcaggagcagcagagaactgggacaagggaggcagaaaaacagaaggaacagagggagaagagaaggcatgatgtggcatcaagagtgaggcctttggggtcagcttcgggctcaaatcaggcatgacggggaggcgacgtggcctctcagagcctgtgtcctcatctggagaacagtatggtgtacctacttcgcagagctcaggatagaagtggggtcgtacagcatcagagtggtggagttggtacccagaaaagtagggagccaggcaggtgataaagtctcctcatatcctgggaggtgggcgggctgaggtggctttctccattggcagctgagaagctaagagagttttgcttggagccgcacggccagctgatagtaaactggtgtatgtatccaggccccatctgcttctctttgccttgaagaggctgaagaggagaggagcgcagtgggagtggagggagtggggagagtggtgggaggagccactccctcttatcttgtcctcatgtttccagaccgagactctgtgggctcccagccccctctgcctccgggcctaccccccggccactatgactcacccaagaacagccacatccctggacattatgacttgcctccagtacggcatcccccatcacctccacttcgacgccaggaccgttgaggagccaggatggtatggcagaggccagcacacctggctgttgctgctcaaggctggggacagagcctagtgtacccctgccaggagcagggagtggaccggcaggctgtgaacatgaacaacgcttaacagagcaagtgatgggagccttgttcctgggttctaccatgggagacgctgatcagcaggatgcctggctccctttcccaacccactgctcccaaggcctccagggccctgtgtacataaactggtgggttggaagttgctgggtaactctgatttcagacatgcgtgtggggtaccttttctgtgcatgctcagcctgggctctgtgcgtgtgtgtgtttctgtgattttagaagggtaccaggcacaggttctgtcctagggcacttaccatttagtagggagatggaaccaacccaattaactctagcaatagcctcctaactggcctcctccattgattcagtgaaccttccaatgcatggctcataatttcaaaatacaggctggttagttactccctacctgaaagccttcataggtgcctctttgctcttctgccagtatcaaaacttttgaaggccttaaaggccctgctttgcctggcccatctgtctctccagcctcaccttgaactgtgttcctgtcactgcacgccagtcacaccggcctctaggtcctcctgtaggccactcttctttctggcacagggacctgcacacctggagtgcccttcctcccccactcgcctgttcacccctgcttttcctttacacctcctcctcagggaagtgcccaccctccgtacatctttcacagccctgattgcagctgtgttcactcaccaggtacctgcagaaggcctacagggtgccaggcacttctttaatgtgttctttctttatgtgattatttgattaatctctgcctcccccactagactgtaagctccctgaaggcaagaatcctgtgcttatgctcaatattagctctcccttggcacagagtaggcactcaacaaatgctccccaaaaggctgagtggctgactgaattaagtaccagtgacatgcagtaactgctaagatagatgagccatctgtatgctctgacagttacagactgaataagttggagacttccctaaagggtggcatttccccagggtaacaacgcagagctcaggtgtgggaaggtgccaggggcaggggtgcagaggggctgaggctgaggggggtgcagaggctggagaaaggataacaggagagagtatacaggcatgccttgatttattgcacttcacaggtagcagaatttttaaagaaattgaaggttttgggacatatatgtgacagcaataggttaagaaaagcaaagcagagaaattgaagatttgtgtcaacactgctttaagcaaatctgttggcaccatttttccaatagcatgtgcccattttgggtctctacattgcattttggtaattgcttgcaatatttcaagcattttcattgttattatatgtgttatagtgatctgtgatcagtgatctttgatatattattgtaattgtttcggggcgccatgaaccgcacccatataacacggtaaacttaatcagcaaa

SEQ ID NO: 1280 - DNA, 2739 bp, Homo sapiens
gggagcagccgcctggaccgaagctacagctatagctacagcaatggcccaggcccattctacaataaaggtatgggcacaggggcaacaagggaggtggctgagctggggctgaggaaccagtgcctccatgcggcctgacttctttcctctatccttagggctcatctctgaagaggagctcggggccagtgtggcttccctgagcagtgagaacccatatgccaccatccgggacctgcccagcttgccagggggcccccgggagagcagctacatggagatgaaaggccctccctcaggatctccccccaggcagcctcctcagttctgggacagccagaggcggcggcaaccccagccacagagagacagtggcacctacgagcagcccagccccctgatccatggtgagccctccctctccactggcaggagcagcagagaactgggacaagggaggcagaaaaacagaaggaacagagggagaagagaaggcatgatgtggcatcaagagtgaggcctttggggtcagcttcgggctcaaatcaggcatgacggggaggcgacgtggcctctcagagcctgtgtcctcatctggagaacagtatggtgtaccttcttcgcagagctcaggatagaagtggggtcgtacagcatcagagtggtggagttggtacccagaaaagtagggagccaggcaggtgataaagtctcctcatatcctgggaggtgggcgggctgaggtggctttctccattggcagctgagaagctaagagagttttgcttggagccgcacggccagctgatagtaaactggtgtatgtatccaggccccatctgcttctctttgccttgaagaggctgaagaggagaggagtgcagtgggagtggagggagtggggagagtggtgggaggagccactccctcttatcttgtcctcatgtttccagaccgagactctgtgggctcccagccccctctgcctccgggcctaccccccggccactatgactcacccaagaacagccacatccctggacattatgacttgcctccagtacggcatcccccatcacctccacttcgacgccaggaccgttgaggagccaggatggtatggcagaggccagcacacctggctgttgctgctcaaggctggggacagagcctagtgtacccctgccaggagcagggagtggaccggcaggctgtgaacatgaacaacgcttaacagagcaagtgatgggagccttgttcctgggttctaccatgggagacgctgatcagcaggatgcctggctccctttcccaacccactgctcccaaggcctccagggccctgtgtacataaactggtgggttggaagttgctgggtaactctgatttcagacatgcgtgtggggtaccttttctgtgcatgctcagcctgggctctgtgcgtgtgtgtgtttctgtgattttagaagggtaccaggcacaggttctgtcctagggcacttaccatttagtagggagatggaaccaacccaattaactctagcaatagcctcctaactggcctcctccattgattcagtgaaccttccaatgcatggctcataatttcaaaatacaggctggttagttactccctacctgaaagccttcataggtgcctctttgctcttctgccagtatcaaaacttttgaaggccttaaaggccctgctttgcctggcccatctgtctctccagcctcaccttgaactgtgttcctgtcactgcacgccagtcacaccggcctctaggtcctcctgtaggccactcttctttctggcacagggacctgcacacctggagtgcccttcctcccccactcgcctgttcacccctgcttttcctttacacctcctcctcagggaagtgcccaccctccgtacatctttcacagccctgattgcagctgtgttcactcaccaggtacctgcagaaggcctacagggtgccaggcacttctttaatgtgttctttctttatgtgattatttgattaatctctgcctcccccactagactgtaagctccctgaaggcaagaatcctgtgcttatgctcaatattagctctcccttggcacagagtaggcactcaacaaatgctccccaaaaggctgagtggctgactgaattaagtaccagtgacatgcagtaactgctaagatagatgagccatctgtatgctctgacagttacagactgaataagttggagacttccctaaagggtggcatttccccagggtaacaacgcagagctcaggtgtgggaaggtgccaggggcaggggtgcagaggggctgaggctgaggggggtgcagaggctggagaaaggataacaggagagagtatacaggcatgccttgatttattgcacttcacaggtagcagaatttttaaagaaattgaaggttttgggacatatatgtgacagcaataggttaagaaaagcaaagcagagaaattgaagatttgtgtcaacactgctttaagcaaatctgttggcaccatttttccaatagcatgtgcccattttgggtctctacattgcattttggtaattgcttgcaatatttcaagcattttcattgttattatatgtgttatagtgatctgtgatcagtgatctttgatatattattgtaattgtttcggggcgccatgaaccgcacccatataacacggtaaacttaatcagcaaa

SEQ ID NO: 1281 - DNA, 84 bp, Homo sapiens
ggtggcgggtgcctgtaatcccagctacttgggaggctgaggcagaagaatcacttgaacctgggaggtggagcttgcagtgag

SEQ ID NO: 1282 - DNA, 988 bp, Homo sapiens
gcccattttgagtattggtgtaacaaatgagaaacaccttattgaatagtatatattctttgctggttcctcttatccccaactaagattttatgttcctcaagatttgggcttggtttttgtaaacttttgcagtggttttaaatattcatcatgttttagaaattagcaattatattatagccttaaccttattatgaaacttactagtttctttttcctttttaaaataattgtttaaatcccttgatatagacaaggggaaaaaaatgagaaggcatgtcatactccagtttttcagagttttatttaagtgttctagataccagcacacaaacacctgctgtttttactgttctgggtgtcatagagacaccttcagtagcaacatgtttctagcagaaaataaaacagattcaaactacattcaaagggggaatgccatgagatattttctctccattcttcctttgttagttatttatattcacacatcttcacttaactacattccttagtaaacagcttgcggggggttgatatttgttaatgaactgtcaataaacacatgttctctcgacttcttaaaaaaagactatattggggttgagtgtgctggtttccaattcctgttcacgccatggagacagagagaggagtcttggctgcggatctggcctcagagctgggcacggcttgcgatcacgtggtggaagcacagcttttgtgcagggaggaaagtggcagattttgatagagagcgtgccagcagttattaggaagaaatcgggaagtgtttggaaacagggctgctagcattcccaacaaagctggagaagtctctccaaagaacaaaaggcaagcacacgttcagggtgaggactttcttctctgttgacatatgagacgtgaagtgagtcagacgctgacccaggtttggagagaggacaaataataatatctttgttgaaggaaatggggtctagtc

SEQ ID NO: 1283 - DNA, 988 bp, Homo sapiens; identical to SEQ ID NO: 1282

SEQ ID NO: 1284 - DNA, 308 bp, Homo sapiens
ctacaccgaatggagaatattacactgaccctgcttggaaactgagtgattctcctagtgcttgttctttcccaaaagagaactgtggactctctctctctgtgtgtgtgtgtgtgtgtgtgtgtgtgtgtgtgtgtgtatgtgtgtgtgtgtgtgtatcttcaattcttttaccttcaagaaacccccaaagaaaaatcaaacaatagtctttccttaatcaagcctattaagcagctttgccctcatatgtttttagacttaaaagtcttatatctaaattctttccagataatgtaaaaaaaaaa

SEQ ID NO: 1285 - DNA, 308 bp, Homo sapiens; identical to SEQ ID NO: 1284

SEQ ID NO: 1286 - DNA, 417 bp, Homo sapiens
gggaagacaggagggaaagaaaagtcctacaactgtcaggaatggggcacctttccctgtccctaagcaaagctccctcttcccactgccctccccagccccagctccctgtcctccccaacacctagtgagaaagacggtgcgtggaagggagtcccatgggcagatgcttacacgacctctttgtgaagcctcttctgggtttaacttcattcatcaatttattcttatgtcaaagcaatgaaacttttctttctggagccagataccaatacaacaggtgaacgggtttctgccacatctctacattgacgggggatgcttgaacaacccccctcactacacagacacacaccgttaaggcacaagggctggggttgagctctagatgagggactttcctgctcctgcaagggt

SEQ ID NO: 1287 - DNA, 545 bp, Homo sapiens
ctatttacatacattgagagaatactacaatcaacactttttcctgggatgactttaagaggtttgagccacagcacctgaagtggcaaagatccatggtctttgtagggtattagagaactcttccagtcacctctgaaagcactctagatcttgcagctgagtggatgaagtgtaacaaatctgttgcacgctgagaggagtcagaattagcatttttcatgaaagttccccacgtctctactaagaatgaggaagaaaagactaagactaggtaattacacagaggcttgaaatgttacatcaccagagccaagtcctctcccttcagatcagttactggctgctacacagggacacccccaccttttcagggcatcccatgcactccacttctcaggatctaaggaatttgactttgtagggatcccagaaagggcactgtgccacttcccctggtgtgaatcagacatacattgtacattcatttctaaaattcactcatgcacctcaaaccaaggtcattatccaaaaaaaaaaaaaaa

SEQ ID NO: 1288 - DNA, 557 bp, Homo sapiens
actttatggagtcctgaagatacacagccaccactcctaaaggcaaagaaagaaaacacgaatgtaggtcagggatagagtggaaccctggtcatcggggtttttagcctcatcgtgggaaaggtggtaaaggaggatgatggcatctccatccctagaggccaagaattgaaatatcattgtcaaggattagaaacaattcagcaaagaggccacaaaaagggcctgctgactcccagaagacctctttaaaccccaggggaggcaaatacttgctgatggagtctgggccgtttccatattttaaagaagacctgcctctggggcaaatgtcagcacagagaggactgggaggagaatggaggcaagaaaagggcatattttgactccctctgtgcctcttcccagttcatggaaggatgtgttcagcttacccacccacagtgaccagtgtggtggagccgctgacatctcaaggatctatttgggaaggtgagaagagtactcattccatctgggggtgttgttccagccacatcagcctacctggtgggatg

SEQ ID NO: 1289 - DNA, 265 bp, Homo sapiens
agagtgagtttttgtagaggaataggagctttgaaaagctattgtggatgagaaactagaaagccaagtgcacagctcagggcagtatgtgtgctcagaaaagacctgagaaggccattagctttcacctctggcttgtctttaggttcaacacaaacaggaagtgaatattaaggtagatttataaaggccctgggtaagttttgaaggagtgccccaacagctaatcagtagagacctggcgagcattttacttttctttttc

SEQ ID NO: 1290 - DNA, 265 bp, Homo sapiens
agagtgagtttttgtagaggaataggagctttgaaaagctattgtggatgagaaactagaaagccaagtgcacagctcagggcagtatgtgtgctcagaaaagacctgagaaagccattagctttcacctctggcttgtctttaggttcaacacaaacaggaagtgaatattaaggtagatttataaaggccctgggtaagttttgaaggagtgccccaacagctaatcagtagagacctggcgagcattttacttttctttttc

SEQ ID NO: 1291 - DNA, 489 bp, Homo sapiens
gagaagacatatgaatggctggtaaatattacatgacaagatgtttagccttattggtatattcgtatcagggaaagcaaactaaaaccacaatgacagggtgatgtcagcgaaaatggtagagtaggacttctgtgggtcatccctctgcagaaacaccaaacaccttgacagaaaagtcagaatttagcttatcaaaactctggaaaggtaatcaaaggtttacagcagccaagcaaatacttcgccagaagaaagggcactgaaacaaggtaagagatctttgtggcattttagcttaccctagcctcacctcccttcctggtatggctgcagtcttgaagatgacagcctgtgttccccatgctggtgcctgattccagagagtggacactcttcctcctgagggattctgtgttctgttttgtcctttctccaaaggactgccaccaggggcaaaaaacaaacaaaaaaaccaaaaaaagaaaa

SEQ ID NO: 1292 - DNA, 489 bp, Homo sapiens; identical to SEQ ID NO: 1291

SEQ ID NO: 1293 - DNA, 518 bp, Homo sapiens
gaattacaggcacacaccactgtacccatctatttttgtttttattttttacacattataaatgttcagtttttttaaaaaaaattacgaagcatgtgaagaatctagaaaatatgcttcattcacaagaaaaaagaaatgaacagaaactaccccgaggaagcactaatactagaattactagacaaaaactttaaatcagctgtcttaagtatactcaaagagctaaaggacaccatggacaaagaagtaaaggaattcaagataataatgtctcaacaaatagagaatatcaataaagagaaatttttaaaagtaggcaaagagaaattttggagctgaaggttacaataattgaaatgaaaattcactaggggagctcaacaaaagatatgagcagacagaagaatcagcaaacttggagataggtccactgaaattatatagtttgaagagcacacatttaaaagactgaagaaaaatgaacagagtccaggagatgtgtgggataccaacat

SEQ ID NO: 1294 - DNA, 518 bp, Homo sapiens; identical to SEQ ID NO: 1293

SEQ ID NO: 1295 - DNA, 1480 bp, Homo sapiens
cggcaccttcttcgagtgctcatccgaccctgccgggcgcctcctcacactcactcctccgcttggcaggttcctgcccttccttgttgtcccggttcatcttctgctccttgagcagggagccgggcaggttggaggcgtacttaaagccagggccacgcttttgcttgtaggccaaaaagagagaatgaacagaccaactgtatacctttggacttgcccttcctcctccccaggccgacggcaacccacctgcctgaaactcctgggacaggctggtcccggccaggcccaggcccgcccctctcccgactgaccctgggacttggagcccggcactcactttcccggtcttgccggcgtggttacacttcggacactcccagcagtttggaagctcgtcgttgaccacaccctctgactccttaatctgcggggaacaccaggactcagaagagggacgggcggagaagatggcccacgggcacaaggctctgtgacgccacgtcttccagaagcagcagcaccccctccccaacgtcacatctatcccgtttccaggcaaaagaaaacacagctgcagaggctggcagagacgggcagctgtggatccaggccagggttcagaggctgagcccctttgcttctctgggaccctgggcaagacactccgtctctgtgggctggtgccctcggccataaaagttagtgtgcccatctcactgggggggtatgacccaggtaaagccatgagctcagcgcctggcatgcagaaaggactctgcagaggactctactgggtgctgggggaaggagtgtggtgtggggccttgttctcccagaagcctggagccacctggaggcgcttcctctggcccagctacaaacaagcagcctgtgtttgccatctgctgaggctctggaaaccctctctggttctgacatcctgggaggtgggggtgtgtttattcctttgatgacactgggtctctgaggtactccaggccctccttgccccgggcttatcccttgacacacaggatcacccagactcaggggtcctccaggaattcactgcacgacctgcatcccaccatctcaccagcatctccagcaaccctacctgccccagagcgtcagcaccacctgtccccactgggccactcaccttaaggcatccagggtggatgatttcattgcagatggagcactccatgagcatgaggttaaacttgccttcctcctcttccaccgtgtcttccttccccgcctcgccacacacaaggcacacggcggtgtggggcagcactggctgaggagccagggagaacaagacaagtcatcaggggtggggagcacggacccccaggggggccagttcaagggcaatgagctgctccccttgggcctgccaggagacccccggaaagtggcccaggcacattcgctcactcattcattgaaatacgtatcaggctac

SEQ ID NO: 1296 - DNA, 2587 bp, Homo sapiens
tgaaaagcttatcttctttgccaggtttgagctgtcacgaaaaagaaaggacgcagagcttgctccccgggctcgtgggatttggtctcctcgacaccccaccccaccacgagtccacagtctccagaggaggggctggagggaggccttccccacaaatgccatctccacgtctgaccgacagacgggcgagccctgcctgcagctttcaaggaagaagctggaagtaggagtacagttgaactgttcccacccaactgacctcccaccccacagacctggagatgtgcagccgcccattcaaatcatcctcggctctgggagccagttctggagcacagccctgtgggaatccccggcccagcaggaatggctagagctgggagagactcctggcgccaccttgtggctggtgacagcacggcccgtgggtggagcagggccaccaggctcctcagaggttccctggactcacagcttccatcccaaccaacagaggctctaggcacagacagcttcccaggccccaagccagaaccacgagccagagatctggggccgagacctgggaagcctcaggagaggcagcagtggggtggaggaccagcggggtggggtgggggacagcccaggactcgccagtccccggggcctcaggagggcgtgcgtcgtgggagcacctgctgctggaagtaagtgagactggatctccaccaggggctgaggctgctgcctagagggggcctcggcgagaggtgagaggaggaaccgggggacgtttgaagcgatgaggcctaaaggggggtggagtgggaagaggagtgactcgctggttttcccctcctttctttggggcagggctctcaggacttaggtgacctgctcagggcagcaagaggccgggattatcccaagctctacctgctgcccaccccctgccccatccctccaacccagcacccgggaccagccagaccaacccctttgcctcccagcccctcctggtccgtacccgcttgcgtccactcagctcctggggcttctcgtatttccgcttcttcctcaggtgcacgtcgtcagactttctgcgcagaaggccgtccggcggcaccttcttcgagtgctcatccgacctgcgccggggcgcctcctcacactcactcctccgcttggcaggttcctgcccttccttgttgtcccggttcatcttctgctccttgagcagggagccgggcaggttggaggcgtacttaaagccagggccacgcttttgcttgtaggccaaaaagagagaatgaacagaccaactgtatacctttggacttgcccttcctcctccccaggccgacggcaacccacctgcctgaaactcctgggacaggctggtcccggccaggcccaggcccgcccctctcccgactgaccctgggacttggagcccggcactcactttcccggtcttgccggcgtggttacacttcggacactcccagcagtttggaagctcgtcgttgaccacaccctctgactccttaatctgcggggaacaccaggactcagaagagggacgggcggagaagatggcccacgggcacaaggctctgtgacgccacgtcttccagaagcagcagcaccccctccccaacgtcacatctatcccgtttccaggcaaaagaaaacacagctgcagaggctggcagagacgggcagctgtggatccaggccagggttcagaggctgagcccctttgcttctctgggaccctgggcaagacactccgtctctgtgggctggtgccctcggccataaaagttagtgtgcccatctcactgggggggtatgacccaggtaaagccatgagctcagcgcctggcatgcagaaaggactctgcagaggactctactgggtgctgggggaaggagtgtggtgtggggccttgttctcccagaagcctggagccacctggaggcgcttcctctggcccagctacaaacaagcagcctgtgtttgccatctgctgaggctctggaaaccctctctggttctgacatcctgggaggtgggggtgtgtttattcctttgatgacactgggtctctgaggtactccaggccctccttgccccgggcttatcccttgacacacaggatcacccagactcaggggtcctccaggaattcactgcacgacctgcatcccaccatctcaccagcatctccagcaaccctacctgccccagagcgtcagcaccacctgtccccactgggccactcaccttaaggcatccagggtggatgatttcattgcagatggagcactccatgagcatgaggttaaacttgccttcctcctcttccaccgtgtcttccttccccgcctcgccacacacaaggcacacggcggtgtggggcagcactggctgaggagccagggagaacaagacaagtcatcaggggtggggagcacggacccccaggggggccagttcaagggcaatgagctgctccccttgggcctgccaggagacccccggaaagtggcccaggcacattcgctcactcattcattgaaatacgtatcaggctac

SEQ ID NO: 1297 - DNA, 289 bp, Homo sapiens
gccgggcgcggtggctcacgcctgtaatcccagcactttgggaggccaaggcgggcggatcacaaggtcaggagatcgagaccatcccggctaccacggtgaaaccccgtctctactaaaaatacaaaaagaaattagccgggcgtggtggcgggcgcctgtagtcccagctactcgggagactgaggcaggagaatggcgtgaacccggaagacagaggttgcagtgagccgagaccatgccactgcactccagcctgggcgacagagcgagactccgtcaaaaaaaa

SEQ ID NO: 1298 - DNA, 289 bp, Homo sapiens; identical to SEQ ID NO: 1297

SEQ ID NO: 1299 - DNA, 290 bp, Homo sapiens
gaaagaaagaaagaaagaaagaaagaaaattagtgtatttaaggaagtattggtgttatgtgaaacttttgttttaagtgtccacatatggcattgtgatgtggaatatacttcttcctgtgggtcacagtccaaataatgtggaaaacacttacaagctgtggcccccagtatctgcattctatctccccatggctgaggccaactcaccaccctcacaagcacatgccaaacacccattgtgcccagtggggagatgaggactttgctttttacacctgccttattaa

SEQ ID NO: 1300 - DNA, 290 bp, Homo sapiens
gaaagaaagaaagaaagaaagaaagaaagaaaattagtgtaaggaagtattggtgttatgtgaaacttttgttttaagtgtccacatatggcattgtgatgtggaatatacttcttcctgtgggtcacagtccaaataatgtggaaaacacttacaagctgtggcccccagtatctgcattctatctccccatggctgaggccaactcaccaccctcacaagcacatgccaaacacccattgtgcccagtggggagatgaggactttgctttttacacctgccttattaa

SEQ ID NO: 1301 - DNA, 290 bp, Homo sapiens; identical to SEQ ID NO: 1299

SEQ ID NO: 1302 - DNA, 562 bp, Homo sapiens
ggggcctagtgggcggtgtagggtcatagatgtggcttctttatgaatggcttggcactatctcccggataatgagtgaattctcactctggtagttcacgcgagagctagttgtttaaaagaacctggtacctcctcctctctctcctgctgcctctcatcctgtgacatgccagctcctcctctgtcttccaccatgattggaagcttcctgaggcctccccagaaactcccctcaccccagccaggggcccagggcgaatggctggtgttcagagcagtcacaaccccctcactgcctcaccacggcccccctccttctcctccctcacaggagtccacatcacgcttccctgtaatgagtataatcccttcctgttcacctgaaataaaggacgggatgagcagtgactgttgttccgttgttgtctgatttacaagcctttgtctagttcaagcttgtccaaccctaggcacaaggacggctttgaatgtggctcaacacaaattcacaaactttgttaaaacgttgtgaggttttttttgcaattttttgtttttt

SEQ ID NO: 1303 - DNA, 168 bp, Homo sapiens
  SITE (53): n equals a,t,g, or c
  SITE (168): n equals a,t,g, or c
agaaggcccctgacttccaagcagctgtttctcctctcctcctccaatacctntgagtcctggcacagtcatcctgaccctgggctccccagagaccctccctgattgggacagttgcttccgaagtggaaacctcagtctgggccagcactgcgggtgtggacaggn

SEQ ID NO: 1304 - DNA, 172 bp, Homo sapiens
agaaggcccctgacttccaagcagctgtttctcctctcctcctccaatacctttgagtcctggcacagtcatcctgaccctgggctccccagagaccctccctgattgggacagttgctcccgaggtggaaacccaggtctgggccagcactgcgggtgtggacaggtaggg

SEQ ID NO: 1305 - DNA, 173 bp, Homo sapiens
agaaggcccctgacttccaagcagctgtttctcctctcctcctccaatacctttgagtcctggcacagtcatcctgaccctgggctccccagagaccctccctggttgggacagttgctcccgaggtggaaaccgaggtctgggccagcactgcgggtgtggacaggtagggt

SEQ ID NO: 1306 - DNA, 170 bp, Homo sapiens
agaaggcccctgacttccaagcagctgtttctcctctcctccaatacctttgagtcctggcacagtcatcctgaccctgggctccccagagaccctccctgattgggacagttgctcccgaggtggaaacccaggtctgggccagcactgcgggtgtggacaggtagggt

SEQ ID NO: 1307 - DNA, 173 bp, Homo sapiens
agaaggcccctgacttctaagcacctgtttctcatctcctcctccaatccctttgagtcctggcacagtcatcctgaccctgggctccccagagatgctccctggttgggacagttgctcctgaggtggaaacctaggtctgggccagcactgcgggtgtggacaggtagggt

SEQ ID NO: 1308 - DNA, 173 bp, Homo sapiens; identical to SEQ ID NO: 1307

SEQ ID NO: 1309 - DNA, 170 bp, Homo sapiens; identical to SEQ ID NO: 1306

SEQ ID NO: 1310 - DNA, 293 bp, Homo sapiens
gcttgtctatggggcaaccccatagggtgaggaagtaactcagtcctggccctgatgctggctctggagaattccctgagctctcagagcctggggcctccatgagaaccactacaggcctgtagacatttgtgaaagatgtggggtggaggcagctggtctcctgccatacccccaaactcaggcaagaacccttgagtccctccctcccctcatgccttccctcctccctcccttccccttctgcaggcctatccccctgcaccctctcagtgcctcaagaactgctgcag

SEQ ID NO: 1311 - DNA, 293 bp, Homo sapiens
gcttgtctatggggcaaccccatagggtgagagagtaactcagtcctggcactgatgctggctctggagaattccctgagctctcagagcctggggcctccatgagaaccactacaggcctgtagacatttgtgaaagatgtggggtggaggcagctggtctcctgccatacccccaaattcaggcaagaacccttgaatccctcccccccttcatgccttccctcctccctcccttccccttctgcaggcctatccccctgcaccctctcagtgcctcaagaactgctgcag

SEQ ID NO: 1312 - DNA, 292 bp, Homo sapiens
gcttgtctatggggcaaccccatagggtgagagagtaactcagtcctggccctgatgctggctctggagaattccctgagctctcatttctgtggcctccgtgagaaccactacaggcctgtagacatttgtgaaagatgtggggtggaggcagctggtctcctgccatacccccaaactcaggcaagaacccttgagtccctccctcccttcatgccttccctcctccctcccttccccttctgcaggcctatccccctgcaccctctcagtgcctcaagaactgctgcag

SEQ ID NO: 1313 - DNA, 293 bp, Homo sapiens
gcttgtctatggggcaaccccatagggtgagagagtaactcagtcctggccctgatgctggctctggagaattccctgagctctcagagcctggggcctccgtgagaaccactacaggcctgtagacatttgtgaaagatgtggggtggaggcagctggtctcctgccatacccccaaactcaggcaagaacccttgagtccctccctcccttcatgccttccctcctccctcccttccccttctgcaggcctatccccctgcaccctctcagtgcctcaagaactgctgcag

SEQ ID NO: 1314 - DNA, 455 bp, Homo sapiens
ccagtccctgaaggtccgctgacctcccattcttgacggacagtgagaagaggttcccaggccacctgcaataggttctggcttggcctgggttgggataagtctcccggctgctgttctcaaagccccatcaggaggctgtgtcaggccaggcgcaccgtggtgacagcagcatggactgagggttctggccgcgggagaggtcaggaccgggggaggtcaggtccaggaggagggcactggccggcacatggtggtgctggagagacctgggcggggtggtgggaatggcccaggaggagccctggctcctgtggctggagtgagggtgcgggctgtggtgggagaggaggtgaaggtggaaggaacaggggcccaggggcctgtgctgtaggaaggacatggacttcctagcgaggactttctggtgcggggttctcagggaagaggaggcc

SEQ ID NO: 1315 - DNA, 455 bp, Homo sapiens; identical to SEQ ID NO: 1314

SEQ ID NO: 1316 - DNA, 647 bp, Homo sapiens
tttgacacacattctctttaataaggcttggagcagcagagtgtagctgagagagttgcaggtgcttctgtctgggtggggtgcaggttgaaggtggggggaaggctgagactagctggaggtatggggtaggggctagctcacagaaggttctaggatgcctgccaccagctcatcatgggcacttagtgaatggaatcatataagaagcttccctaccctttgggatcacagacccatccgaggatctgatcaaagctagagatgttctccccagaaattaatgcttttcatacaactttaggggcttcaaaaatactccccaccccacatgcctgtcccaaaccacaggcttccaaattgctcttcctatagatacggaaaccccgacagaggcctccaaggctctgcatgctgggcccccacctccatctccagtctcacctttctcccctgtgctcttcccaccccgccacgtcagtctcttcgtgcttgctggaaataccacctcaggtcctttgtccaggttgtttcctctgcctggaatgctctcctcctgccatctctactttttgctcagttgaattgcattagttggtgaatgtctgtctcttctcacttggatataagctccatgagagcaggac

SEQ ID NO: 1317 - DNA, 647 bp, Homo sapiens
tttgacacacattctctttaataaggcttggagcagcagagtgtagctgagagagttgcaggtgcttctgtctgggtggggtgcaggttgaaggtggggggaaggctgagactagctggaggtatggggtaggggctagctcacagaaggttctaggatgcctgccaccagctcatcatgggcacttagtgaatggaatcatataagaagcttccctaccctttgggatcacagacccatccgaggatctgatcaaagctagagatgttctccccagaaattaatgcttttcatacaactttaggggcttcaaagatactccccaccccacatgcctgtcccaaaccacaggcttccaaattgctcttcctatagatacggaaaccccgacagaggcctccaaggctctgcatgctgggcccccacctccatctccagtctcacctttctcccctgtgctcttcccaccccgccacgtcagtctcttcgtgcttgctggaaataccacctcaggtcctttgtccaggttgtttcctctgcctggaatgctctcctcctgccatctctactttttgctcagttgaattgcattagttggtgaatgtctgtctcttctcacttggatataagctccatgagagcaggac

SEQ ID NO: 1318 - DNA, 352 bp, Homo sapiens
gatcctcccacctcagcctcccaagtagctgggactacaggtgtgcaccaccatgcctggctaatttttgtatttttagtaaagacagggttttgccatgttgcccaggctggtatcaaactcctgagctcaggtgatccaccgtcccccacccaccccactgctcccagcctcccaaagtgctgggattacaggcgtgagccactgcacccggcccagcactacacttaatgtctctcggctcctgccaggtcaagagggttcagctcttagggcaataactacaaatgggcacaaggtgaagctgctgcaggagctaggagagttcctcaaggagagttaaaaaaaaaaa

SEQ ID NO: 1319 - DNA, 5519 bp, Homo sapiens
agccaacaccgcctttctcagcatggagacctttgagcccatcagccaagagcccctcagccaagccagctatgacaaagccccagacccagttcctgagctccaagactcgttctatgcaggtactaccctcccatatctatgagagtctggggtctagaatggaggggaagatgtcaatagtttaggaagggtagtctttgggaaaggtcttactctcttgttcctttttgctgtcctcttcctccttttctcaggagagtttcactgcccctttctcagtgatgctgtggtcacatgtcaaaggggtttctgaccacaagagctgtagaaaactcatgggaacagagcgtgtgtgagtacattatgaatacatgaaggcatgtatgtgtgagtcatgggagaagatatgtgtgaacaagaaagtatccatatatatcaagaaagtatagtgtcaagaagacttcaatagtaatggttatagtgggccttcacactgtgttaagtgctaaatttactatattatctcagttaatccttatagcaatcctatgaggtagccattgtctaccctcatttacagatgaggaaaccgaactttaatgaggtgaggtaactatcccagaaaccaaaaacctgaactgaactctgactctagggcctgttgtctcatccataccactattctgtggtataaacactgggatgagaggaatgacaaaaatgaaaaagttccatctactttccactcaagataccacgctcattacaaaggagctcattacaaagctcattacaaaggagctcattacaaaggagcatggtaccttgagtggaaagtagatggaatctcaataatttttcaggaggaactggggaccatggaccagagagtatccatgtgcaaggcggggtcctcgcagcagggtagccctcccatttcctggccccacctacccaggccccacatggcatggaaagccctgccctggttccctttagcacatagtctttgtgtgcctggctggcagtggctgcctgagctctctacgtagagacagttctgacccctgaagaagcccaccccactaccatccccagcttggggtaaataatatatttagctggcgaccttgaggtatcctaaagatttggagtgttgccttggagaacaacactctaacttttcctgcatcttggatggagactacccctgactgtgagtagcaggggtgtgaagcccagaggactgccctggcagttggaaggccgagatcaactttaacttctgtctaaactgttagtaacagggtctctgcagggaggtctctgggaagaagggccacctagagcatgtaggtgtgtgaatgtatttgagtgatggtgttttgatgtgcacacatgtgtatttacataagtgtatgtgaatggagctgtatgtaagctggggtatatgtgaatgagagagaaaagtaaataggagaaagtacgcctacagttggctttcactagatggatattcttgttgaagtgctgtgtggtgggagttatttctgtgaatgtgtatgatgtggattgcatgaggagggtggaattgtgaatgaagatcctcattgctaagggttctttgtgctcatatcataggggtaaggggtagtggagaggatgagtcctaagcttcatgagaagcctcctaacatggtccctatgatgggtggaaagtgttccttctcatctttcctctccctgggacctgcttatctccctgtctgccacggagagtgacacatccttctcctccccctcccattgccagtcaggaatgggaggcaggtgaggaatgtgtgtggggtggataagagcacatctcttggaagataggagcagaatagcagtaaaatgggatggaagagctgtggtcagagcagtgtcagggcagccaactggactctgccttatctttaactgtccttggtttcacctttcaccctccactctgcccctaagtcagaggactttgtcacaggggacattgtgggtcgggtcagtgcaagagggagcttgctgggatggggggtgaaagccttggggaacaggactaaaagaggctgggaagcccccctgaccattttacctcttggcctccccagaactgcaacgtgcagagagcctccaagagaagagcataaaagaggccaagaccaaatgcaggacaattgcatccctgctcactgcagcccccaacccccactccaaaggggtacttatgtttaagaaacggcggcagagagccaagaagtacaccctggtgagcttcggggctgctgctgggacaggcgctgaggaggaggacggcgttccccccacgagtgagtccgagctggacgaagaagccttctctgacgcccgcagcctcaccaatcaatctgactgggacagtccctatctggacatggagcttgccagggcgggctcaagagcatcagagggccagggctctgggctgggagggcagctgagtgaggtctctgggcgaggggtgcagctctttgaacagcagcgccagcgcgcagactccagcacccaggaactggcacgggtcgaaccagcagccatgctcaacggggaaggcctgcagtcaccacctcgggcccagagtgctcccccagaggcagctgtgctcccacccagccccttgccggcgcctgtagccagccccagacccttccaaccaggtggtggagccccgaccccagctccaagcatctttaaccggtcagccaggccctttaccccgggcctacaagggcagcggccaactaccacctcggttattttccggcctttagcccccaaaagggcgaacgacagcctggggggcctcagccccgccccaccccccttcttgtcttcgcaggggcccacccctctgcccagcttcacttcaggggttcccagccacgcgccagtctctggttcccccagcaccccacgctcctcgggccctgtgacagccaccagctccctgtacatcccagcccctagtcggcctgtcaccccaggtggagctccagagccccccgctcctcctagcgcagctgccatgacctccaccgcttctatcttcctatctgcgcctttgcgaccctctgcgcgcccagaggcgcctgccccaggcccaggggctcctgagccccccagcgctcgcgagcagcgcatctctgtgccagctgcccgcacgggtatcctgcaggaggcccggcgccgggggacccggaagcagatgttccggccgggaaaggaggagacgaagaactcgcccaaccccgagctgctatcgctggtacagaacctggatgaaaagcctcgggccgggggtgcagaatctggtcctgaagaagatgctctgagcctcggggctgaagcctgcaacttcatgcagccagtaggggccaggagttacaagaccctgcctcacgtgacacctaagaccccccctccaatggctcccaagaccccgccccctatgactcctaagactccacccccagtggctcctaagcccccatctcgagggctccttgatgggctcgtgaatggggcagcctcttcggctggaatccctgagccaccaaggctgcagggcaggggtggggagctgtttgctaagcggcagagccgtgcggacaggtatgtggtggaaggtacacctggtcctggtcttggccctcggcctagaagtccttctcctaccccgtctctgcccccttcctggaaatattcacccaacatccgtgccccgcctcctattgcttacaacccactgctctctccctttttcccccaggcggcccgaactctccctaaggcccaatcccaggggcctcgggcaacacccaagcagggcatcaaggctctagattttatgcggcatcagccctatcaacttaaaactgccatgttctgttttgatgaggttcccccgactcctggccctatcgcctcagggtcccccaaaactgcccgagtccaggagattcgccggttttccactccggcaccccagcccactgcagaacccctggctcccactgtgcttgccccccgagcagccactacactggatgagcccatctggagaacagaactggcctcagcccctgttcctagcccagcccctcctccagaggctcccaggggccttggggcttctcccagctcctgcggtttccaggtagccaggccccgattttcagccaccagaacaggattgcaagctcatgtgtggaggcctggggcagggcaccagtgaacaggcacaggtcccaggaccaaggagaggtggaacatccagttcctaaagttgcttctcctaccctatcccatcccctgtcacgcatctggaagctaaattgcctcctgccagagatggtttccaagttgatgtccccttcccccaccttcctcctcactctctacctccctgccgctttccaaccaagtatgtctgctttggtatctttgcctctctttgtctctgcatttcctttcctggatctctgtctttatttccaggcttctccacccatattcctccacagatctctcttccttgacatttgtgcttttctccctgggcctcattttaatgttcagtgagaagtaaacagagcagaagtgaccactgggacttcaggcaagaagctcaccaccaggcacacagcaaagggactgaactgacccctgtttgcactaagccacccccaccccccactctgctttcccaagcttgactggcatatacctaggcctgtgtgtgtgtgtgtgtgtgtgtgtgtgtgtgtgtgtgtgctcttccgtctaaggcatgaataagaggggaggtcaaaataaagacccaatctgaggccgggcacggtggctcacgccggtaatcccagcactttgggaggccgaggcgggcggatcacgaggtcaggagatcgagaccatcctggctaacacggtgaaaccccatttccactaaaaatacaaaaaattagctgggcgtggtggcgagcgcctgtagtcccagctactcgggaggctgaggcaggagaatggcatgaacctggaaggcggagcttgcagtgagctgagattgcgccactgcactccagcctgggcgacggagcgagactctgtctcaaaacaaacaaacaaacaaaagacccaatctgagtcttatcgttgtactgatagaagggtcagatatccccacatggagttgagtgggagaaagagattcactagagaataactccttagagaccaatgtctgtagcaggtgtacagcatcttgtgaaagttatggagcatgaaaagactgaagggccaggacagtttgcatgggctgagttataccagctagaccaggaatagaacaaagaattctatacctcaggatttcaaaaagttagcaacttgagaggccagtgctgagcaacccagtacccaggaaatgaaaaaaagaaagaaaa

SEQ ID NO: 1320 - DNA, 457 bp, Homo sapiens
ggtaaagttgagtaacaagaaaccaaccgtgtgtgagagggggattggaaaaaaatttgagggagaagaatgttagaatggaagggaatgatggtggaagggaggtgtgagggtgtgtgctgagtgttgaaagaacggttggtgtctgtgtgattttccttgagtctgttcttcagtgtgtcttctgcagcttgccatgactgcctgggaaagagtagggaaatacccagagccaaaacctcctttcagtcccaccccatccctcaaaaccccagctattgcttcttttcagcttcaggtcctgatctccaatcttagtatggactcccttctcaccaagaccaccaccagctacgtttgctgtgtaatctggaaagtgataatttcctttgcttgttgggtgtgagtcacaatactttggtttgtgcacaagaataaatttatgccccataccttc

SEQ ID NO: 1321 - DNA, 327 bp, Homo sapiens
cccacagagaccgttcttgttacctccaaaatctcatgattccccctctagttatatttcttccctctcctccaccattttgattcctgatctatagaactttgtgtctctcagtttggagtggaggctaaggacatgagagttgagagtctgacatccctgagtgtccaatatcccaggaattccagatgcgtgcctaggatcctatgctttcctcaattctccacttatctccccctcccttcccataatgctggatgagactgtagctactggctcagagatatttttagtcaagcagacctcattgtctactggggtggggtt

SEQ ID NO: 1322 - DNA, 111 bp, Homo sapiens
atcttaggaattaaatagaaagtaattagcccattgtccatatgtagaactgagctaaaaaaaaaaaagattaaataatgtgagttagttgaaacttacattatgtaattg

SEQ ID NO: 1323 - DNA, 303 bp, Homo sapiens
gaaaaaaagaaaagttcctaaaatggcctgcaaagtcctgtgtgatctggtctttgttaccccagtcctgtgtgatctggtcttttttacccctctgactttatcctccactaaactcttgcccttgctcaatccactttggcgatggtggcctccttgcctttccttgccacagggtcttggccctgactcttcacctgcagcgaacttccactgacatttacatggctttctccctgctgtagtcaggttctccagagagacagagccaataggagattatatctgtattttcatatatct

SEQ ID NO: 1324 - DNA, 361 bp, Homo sapiens
ctttagtgagttgggtcttatttctggacaggattatcaattgtggtaaggaagttatgttgacaatcacaaaagttatcaaagttacgccttcgggggtgctcactgtcattcagcgtgtagtgctaagtgctgaggacttaccaaacatcaatttagtttaaggtatctcatgtattttttcagtaaccagatcgttgccatcatgacattgaatgatttttacacacaaactaatagcatctgtgctttatgattcaatcattctttcgcaccttcaaaacatatctagtaagaacctactaagttcaaggcacactgctacgtgctggggatgcaaagatgaataatatgagattcc

SEQ ID NO: 1325 - DNA, 362 bp, Homo sapiens
tttagggagtgggttcttatttctggacgggattatcaattgtggtaagggaagttatgctcacaatcccaaaagttatcaagtttacgcttcggggggtgctcactgtcattcagcgtgtagtgctaagtgctgagggctttaccaaacatcaatttagtttagggtatctcatgtattttctcagtaaccagatcgttgccatcatgacattgaatgatttttacacacaaactaatagcatctgtgctttatgattcaatcattctttcgcaccttcaaaacatatctagtaagaacctactaagttcaaggcacactgctacgtgctggggatgcaaagatgaataatatgagattcc

SEQ ID NO: 1326 - DNA, 361 bp, Homo sapiens; identical to SEQ ID NO: 1324

SEQ ID NO: 1327 - DNA, 558 bp, Homo sapiens
aatgcaagcatgatcacctcgctctgcaggtagaaatactcgtgtggcttctgtcaccctcaggatcaagctcgaactcctccgcttggcttagagggaccatctggactttcccggccctctcatccccttgcggcctatggctgttcttctgcccccgccttctcccacctcacctttctgggtgcactggctaactacagtttttgtgtctgataagagcttacaaaggactgccttctgggagctgtcccaccgtgcccgcctcagctctctgccctcttgtatgctgggccagcttccccaccctccatcccagccctcgcccaccctgtgctgggccagagctgctgtctccctagctgggctgtgcgcaaagagcaggcaccatccctcctccccacagcaagcttccagcagggttctggagcacagtagacactcagtatggactggtagagctcttaaagaattttcttgaagaatccttttgagaagtaaaatgaagccagcgaggaatgaaaccaaatttgtcctgtgctctgcagaggaaagggg

SEQ ID NO: 1328 - DNA, 558 bp, Homo sapiens; identical to SEQ ID NO: 1327

SEQ ID NO: 1329 - DNA, 558 bp, Homo sapiens; identical to SEQ ID NO: 1327

SEQ ID NO: 1330 - DNA, 320 bp, Homo sapiens
tccttctgtggtggctgcagattaagtctgaaccgtgccagaaatctcgttgcattttttgatgtagcagaaatgaacctggttcattccatcttaacagctttagccaaatggctcagaagggatctacccgatttcataaagaagagttaatgtgcagtctggtttaatacaggtgcccttaaaatacatttttgttttgttttgttttctcacttccaagtttaacatgtccatggacattggctttagtttccccaagatgagtccatgaatgaccttgttccagtatcccttgctgatttgagttcccaagtaat

SEQ ID NO: 1331 - DNA, 3110 bp, Homo sapiens
tttttttttttttttttttgccctgaaacgaataaaacaaataggcgtctggtatttgttttgtataacacaatccccataaaatgaagagtaataaaacataattatctgtaaaggcttgttttataagcctgagaatgggcttgtttctaccaggtttttatgttcattcataggagaaagaatctctttgtacattaatatgtaacaacaataagaacaaatgcttcccaattacatgcatgaatcaaacttatcttttattaaaaaattttttttctgttgtagtaaaagtttgtcattaaattctttctgtgtaaacacattagattgaaggaaaatgttttccttcaatattctgttcaactggcataactttatgatttttttctccccagcataattaaagaaacaactttatggttggttattgacttttttaggtcagagagcactctgtggattctaaaaccgccttccagaaaagtacacatcaaacttctacgtacgtttttatagggtttgtagagctctgatccttggttaaagatccctgacaatgtctaatagctgttttgaaaactgtacctccaatctgaagctaaggttttagttttagttttagtatgtgaatatctgatgaaacgattcaatggttttgtagcattggattcaatttcagggttgggctcctttctaggaatagaggaatattcttatctcaggaaaaaaaattcagagtgtgggaagtacgaaaattattaattcaaaggtgtatttgctgtcagattggatggcagtacccacatccctaggggctcctgttcccaagactgttttcattgtttctatccagcgctgggcacgagccttgaagtggcgaattcatcctctgaagttgtgtgtccattgctgcaagaataaaagaagcagtaacagaatcatgcagcgcagtatttcatggtgacagttttatgtggttgtgtgatgttgcagagtcttgtaggtgatatctacccttttcttttgaatcaaaacacggggttttactggaggagggaagtttcagaaacaacctagtctaacacaaaattaagctcctaaatagttatcccattctgtctactacaaaactaattgcttacaggaagtagaagtacacatatctaatatttatatcctgtttgagtagtggtttctaattttagatttctaacccctttttacattatctttttgcattgaaattatactgaaacattcatattattatgaatgcaagctgaattaaatagaccaagattctcggtttctcccttcatgttgtcatctactagagaatgaacagcttaaaataagtgcatcagttcctcatccaaagggaagctgaatattccaattcaagatcactttgcgtgcttactggaaataccatttttgaacgtacttggcaacttaaagtgcccaattaaaagctctgttgaaagaggaagtctgtggatgtgcaattagtccttaggattcagagcatttcctttatgtgtggaaggccataatatgaaatcactggtcacaatagctttatgccaggtgcttagactagaaggcattttcaggatggattatttctgtactcttgctcctaaaatggtttacctaaagaggctcccaagtccataaaaatactggtgatgtcaagaaattttggaggtggcctttcacaaattttaggcagtcaataaatataactagccatgtacgtgataggcaatacacaagacttgcttatattcctagactttctattttatctgattgacagtgttcctcttcccacctttttattcatttatttatttttaaaagatgaggattgggtaccagaaaattagccagtattgtgtgcttttccttactaaaaaaatgaggcctcgctgagtagggccagatgagctgtatattctgagattatttatagtgtttatgatagagagaccaaaaacagtaagcacttaatagctttccttatttacaagtcagattcatctaagggatatttttcttttatttttctggtgcttgaaatgttcctttaaaatagattatcagaggatacacagtgacacaaaatttgttgcttgtgaaaatgcagagtggattaagcttttctttttcaaggctctgcaacaaaacaggtacatttttatttcagtaaaaacactgctttttttttttgcctccgtcacacacacgagtaacataggatagatatgtgtatgtgaacatgtggctcttgttcccagttgtgtaatggatgcattcccttaaagtttgcagtaaagtgaatgtttattaagcaaattgtttttccccagtgacttctactgtaaaaatggcattgtctttcagtaggctctgaatatagtatgttcccatattctttggtaagatgaccaatcaaccaaaaaaaaaaaaaaaacaaaaacagccccaataacaaacaaacaaaacaaccctttaggtaccataaatctataggaaatactaaccttctgatgaagctggcccgatgccacttattgttgtcccccacgcctaagctatggtatatggctttaataacaaaatggcaacacacaatagtaccacaacctggagggtgttactctttcttctgctcacccttcctcccattgttcccatgggagagaggacagacaccaaggctgtagcaaataggttattttaataacctcagcatccttgtttctatatgatatacatttgatagccaagttgaatttacccacctctctctaaacactttttcctaaccctttgtcaatttgtcacaccatctttggatgaagagtggtacctgatggtgtatgatgcttaacaatcgaaacatctgtaccttgttagccataaaggctcatcccatttccttccataaacatctattgtaatacaatatggattgtgtaaggcactgggctttaggcccccagcccgaatatctgtcatctattaagtacttactgtggataaagaaggcagtatacttaacatgcactatttcatctaatttttgcaaaagctctttgagt

SEQ ID NO: 1332 - DNA, 23432 bp, Homo sapiens
tgaggccgggcgcggtggctcacgcctgtaatcccagcactttgggaggccgaggcgggcggatcacgaggtcaagagatcgagaccatcccggctaaaacggtgaaaccccgtctctactaaaaatacaaaaaaattagccgggcgtagtggcgggcgcctgtagtcccagctacttgggaggctgaggcaggagaatggcgtgaacccgggaggcggagcttgcagtgagccgagatcccgccactgcactccagcctgggcgacagagcgagactccgtctcaaaaaaaaaaaaaaaaaaaaaaaaaaaaaaaaaaaaaaagaatcatgtgagatctaaatgtttttccagctattcccctggtatctcccaaagtggccagttgttttcacttaatttaaggcattggagattcagtcttttctatttgtgacagttctcagctgtggacagaggcaatggaagtgtctctaactacttgggagactgaggcccagtgacattcaaaggtctaacaaagaagccaatagcattccctaggagcactgaggggatgcaggtactatattgctcctaactggtccaagagacttcgccattcctaaaggtgccaggccttcctacaaatctagctttgcattgttgtctccttgcgtggagtctccttcctccccaccttcccagttggcaaatgcctactcacccttaggttcctgtttagacatcttttcctccaggaagacttcccagtccaccctcagtaggttaggggcccatctctcagccttgttccctccactccccaccctccatacacatgcacactttatgctttcctctatcacagcatttatcaaattataaagcatttattaaaaaaatctgttcacctattagtctttcccatttgactgtgggatctttgagagcagggactgtgtctcacttgccttagcctccttagcacctcatattaggggctcaaggaactactgtggaatgatagagcggtgagaaaggataaaggaaagaaatgagaggcagacagggaagaacagggccccctggggtgtggtatctgaaaggactgtctgtgagcaaggctcctctcaggttggtaggttagacctgctgataatgaccaagggaaggcaaaaacttcaatgtatgtatctgtattccctccaggccattttgttctcattaaggggctgaaggcagagagatagcaaaagctccacattcatctccagggaaattccacattcttagtgccagactgctgagagaaaagggtcctatctaacaatcctgctccctcaggccctgcatctctgtctgggactgtgactgtgacaggggaatgagtatgattttgcacctgtttgaatcagagtaactagtttacaacagtatcaatctcttgtcacttcccctatgaagacggagagtggggatggtctccagtgctttaggtaatgatgcacacacatataccccaaataatataatgagcagtctgccaatcaaagactctgccatttataagtacatgggaggctttggcaacaggtagtctttgaatttgttctaagttttctggagagggaaggccaaaccatgtttctacctggttattaaatttctcccttcaccactgcaatttctaattgattgcataaagctgacctcatctttcccatctgtagaatgggaatggctaaccaagataagaatggaaaacaccttacacaagtcactatttcttactgtcacacccatgacagacattgctaagtaatcactgcattcttttccactgagcagagtcctggcccagaacctcaatgcagtattccaggcagttgattgcaatgggcacataaagaaaaactcaggcctgactatgtgattgctaatgcctcttcccactctgactttgtaaggtttgactttactttataatgcagccctgaagctaagattcagaagcagattatgctgggagatactggtggtaaagagaatattttcacccctgctcaagctgaaggtctaaattccaagtcttagctttcctaatttcttttacctgtggataagagaaacaacaggagagcaaatgtttacctttgggtttgataccaacatctaaagagttctctgaggctgctgtggtatgactgaaccaacaccaactccgtgattaatcagcctgggttcaaatccctgctttgccaaattccctggtgtgaatcctgacaagtcactttccccttctgagcctcagtttcctcaagcatgaaatgcagataacaatgcttgacttacagactttttgtgaggagtaaactggatgaaataatgtatgtgaaagtgctttgtgtgatgcactgcactgagcacatacagaggattattattcttggtatgcaccaataggaagaagactagggtgttccgttccagatggactcaatctaaaccggggaacaaatgcttttttttggtaatttcatcttgtggaaacggcagtctcatgggcctatttgtgtttaatgaaccacatcctgtatcgtctttttgcatggttctgaggagaaatacgttggctctgtcttctggcgtgctgtagactagtgagtgtcaagctcatatttaacctcctccagtctctctgccttctgcaagaaaacgcttccctagagctagattgatcctacaaataactgcacagaagctaaggcacaaagggagaggaaagggatagttagccaactctcaccaccatgctgggaccctaccatagacaaatgcagccaggctgggatttttcacctaggataaaattaaggagtttagattcagaggtgactgccctggggtcaagcagctaggaatcagaaaagccaggtttatctgagttcaaagtcagtgctttcaaattttcaacaaattgcttttaatacatcagtagtcttcatcctttctggagtcagagaaccctttgagactgcaagaaagctatggagactttcatcccaaataaaacacaaatgcagatgaacaacactttgcctataccactaaggcatttatgaccctcccaggctcactcaatctcactcactcatttatttcaataaacattattgaatgctatcaatatgccaggcactggctaggtattagccaagcaggcatggtccctgccctcacagagcttatagtgcagcaagagagaaagatgtaaactaataaatgtgaacttacaaacaggttatgtgtagcaaaggaacatcattctaagaaaataggaatgtagcaaaggatcctgacatagcctgaggcttcttgaaaggttttctgagaaagtgacatttgagttgggtgatatgaagtgatctcagcaaaaatgggaaaaaaaaatcagcagaaggccaagtgacaaaaggattgcagcttgttctaggacttgaaggaaggtcagtatgacaaaacggcagaaagcacggagacacacagggctgaagaggttggctgaggacagatcagaactgttagagccctgaggccatgggaaggaatttgcaaattatcctcacggcagtgacaaggcacctagaagttttaatccaaggaataacatgatgggatctctattttagaaacatcctataatggttaatttcatgcgttaacttggctgggttatcaaactatttggtcaaatagtattctggttatgtatgtgaggatgattttggagagattaacatttgaattggtagactgactaagcagattgtcctccttaatgtgagtggacttaaaccagtaagttgaaggccccaatagaaccaaaaggttgaccctcccacctgaatgtcttgagctaggacattggttttttcctgcctctggactccaatggaaacatcttcttttgttggatctcaagcctgccagccttcggactggaactatagcattggctctcccacttctcagggctttggattcacactggaattacaccatctgctctcctaggtctccagcttgctgactgcagatgttggaacttctcagcctcaataattatgttagacaatttattataataaatctatatcatctatatctatatttacatatctatacctgtatcatctgtacatatatatatatatatctgcctataagtctctcgctacatatccatcctgttggttctgtttctctggttttgttatcctggctaatacacatcctcagggctgccgtgtggttaggattcagggaggcagggtagatgcaggctgaccaggcaagagaacaaagctggaatccagacaagctatgatggtgacttggaatagggtggcaacagtgaggaagaaaaaagtgggcaaatttaagagttatttgagaattaaaattgacagaacttgaaatggtttggaaatgggtggctgaaatcagcagaagaccttctcagaaactaaggtacaaagggagagggaagggatagttagccaactcccaccaccacagacaaatgcagccaggctgagatttttcaccttggataaaattaaggagttaagattcagaggtgactgtcctgggatcaagcaatttgaagtcagtgctctcagatcttgagagagggtgttgagaaggattcctaggtttctggttctgcttctaaacagataatggtgcttctcactagaacactagaaaagtattaggttgtgtggagtggagtttgggcaggcaagagaactagaatgatagcaaatatcagaggaaagcttgatgttggaggtataaagtagaactcatcagtgtggggattacaacagagatcatgaccatagaaacaagtctagaaagaggggtccataagacaggctcctgtgaaacttcacttactaatgttgcagaagaggatgaacctgcagaggagacagagatgcaacagtccagaggggaagtagaaaatcatgaagatctagtatcaccgaaacaaacacagaaagtgcctcacacaggaagcagacaactttgtcaaagcctactgaaaggtcaagcaagatggaacccgaaaactgtccgcaggatattgaatcactgaggaagtaaaccaagaccttgcaggtctcagaccctaagaacaactccgttcatatcttgttgccatcttaaaagcaagttccctcgggaaactgaaggctctggagaattatccagctctcatcagccccttggccacatctgtcctcaaagaaaaggcgacagttgaataatcattcccttctcctcctccacccacaacccctgagatgccttttaaacagccaaaaactcctttaaaaagtagtctgggaatgtttcagctgacattcaaaagcacattgtaattcaaatggaagtgcagaaatgcaatcccttggacagtctaggaaaatgataatagagataagacaccttttaaaagtggcgacatgtatttatctgtggggacatttctataccatggactctcccaatctaaactcaggagcagtgcaaacttcacatagagaatgtccttccacaggggtcacctaggcagtacacttggaaaagacatgttaattgcatagcattctttcacttctagcctctctttatctcgccatttctctttgtggattttggtgtgcctttgtctatctctctttgtttttctgtctcctcctcccctcccctcttttctctctctctctctctctgcctttcttttcctctctttcttgctctagctctctgtccctccctctctctcacacacacacacagaatgaacaattctttcacatacacacatctgtcaccttccatagtcagtttctctataaaaaagaagcaattaaaaattcaaaaaacttattatatttctaattcctgcatctatcactatcctccctaagtagagaatgacaggggatgataaaagttacagattccttttgatatctccccagtccagttccacagctctttcccttcactggctccaagcctgtagctaaactcactgaggcccctcccaatcccaggacaatctacctctgcccttgatcctgggtcacaacgatgacaagggatgagagcaaattagcaagccccacccctgcccacacacatgtgtgccttcacgcacatacatacacacaaacatacacacctgggaacacagtaatcgaagtggatgtggcagccttgggtggagggcatgggttggatcaagataattaggccctcaactcagagctggatgggtccatccattgctctattttcttattccatctatacaatgactttgcattttgcatatggaaaaactgatcttaaagaatgaatcactttgctcaagatcacacatctgggaagaggtagagctgggatttgaattgagatccatctgattgtaaaacctgtgctttatctccaaatgagaaagtctttatccaaggtagccacaggaagggtgactttatacagtgaaccctcatcatgatataaagctcatgtatcatgatcacagctagggagaatgcgtgaatatcaagtcaaagggtgaaatggagccccagtgggaagaaggtagttttttcaaaatacagggatatcaagagcacagaagcatgtaatgaaagtattatgctagaggaagagactcagaagttcacacactgcttgggggaatggcacgggagcagaggtgatggctaaagaaacctgacaggctaaacagcttccatgctaatcatgtctggaacctagagcttccagggatgactttggctgctctagttgtttcctaaggcccagttcttcctgcattagattctaccttattgacctgttcggtgttccagtcccctacggactactggaaagctcagaattcccacctggtgatataaaactctgccttcctgcctggagatcttaccagtggttattggcatgcccagtgccccctctggaatcaacatcaaaaactaggtctgttattctagcttttatttttgccctattacagggaagaaaatacagaggatctagaccactatacttcctttctgtgtctagaatagacattaccaactgatcatctcaatgatcccaataacttacacacagtgttctagacaagccattccctagttgatcagaattggcacatgaaagctagagagcataatatgatagtgactgggtattccaaccagcctggaaatgttggcctcctccctcttcccagctgtctaccagtggatttttaaaagtctgtaacaaaaatgatgaaatattgggatactaaggcatgctggtaatgaacaacgtaggaacagagcctatatcttctttatttggtgccacaacatctgacgcacacacaaaaaaaaatacagagaaaaagcagttgggaaatgttcagacaatcaatgaataactatgactttattttcccacacaatgtacctttagaaacacttaggggaatgagagtaaagtaaactcctcatgggaaatattttaatcaggcacattcaccccatctcccttggctttccagtaatttccagtggtttccccagatcataaaagtggccagggtcccatcattatgaaacctgggaaggctagggcatttgtttctaatatccagggacaccagagctagggtgaaggaagaactgggctgaagtttggattcaaataccatcttcttggccttttgcctctgtaagttaaggtttccctcctgtaatgggggaagtgagtacccttgcctcctttgctttctggggtagatgggaagatcacaggaaggccatctggaaactgtagagggctgtacaaatgctcatggttgttatccatgccctatttggtctattttccccaacctactctaccgagtttgaccctccactcctcccttcactaagagttaaaatgacacttacaggattgtctttatctagtgacatctgtaattcacagataaaaatgagggtagaggctgggcgctgtggcttacgcctgtaatctcagcactttgggaggctgagatgggcggatcatgaggtcaggagattgagactatcctggctaacacagtgaaaccccatctctactaaaaatagaaaaaattagccgggcatggtggcgggcgcctgtagtcccagctactccggggactgaggcaggagaatggcgtgaacccggaaagcagagctttcagtgagcagagatcgtgccactgagctccagcctgggtgacagactgagactccgtctcaaaaaaaaaaaatgagggttgacctcacacattagcaaggtatggagctgggactagaatcctcagccaatgcccacaatttttactttatttcaagctactgttttctatgtacctactatgtaccagacattttacctacatcatctcattttattctcccaaaagccatgcaagagaattactatccctcatttaacacatgaggaaactgagacttagaagttcctttacctgaggttacctgccaggtgtgtagaaagaggagtaaagacatgaaacaccctccatcccacttcagcactgcactatctctcctcctctcacaagttctgcccaccgagttatcagcctccaagcccagattcatcctggcctggtttccaacgtttagcagatggcagtgacacataactcatggccggggagaaaaggggatactagctatctttaagtccaaaggcttctttcaactctacagatgcatatccccagcttctcatctcccattccctagcatcactcccaaatataaaaaataaaaccggagtatttgatctaccatctaggtggtcacagcaggtgaagatggaggggaagaaacacacacagaatggttaagctgacctcaatgcatcctctgtccttttcttgggagcaagtatggacgatggaagcaagaaaagtgcctttgcagactagaagcccaggaaggaaaacaccaagtttaccccacaagtttgcggcaaagccaggtcttgagggggacccctccagctgttgtttcagcactctttcttcccctctcccatcttacttgtaacagattccatgatccaccatacaaggaatgggattttctggaatgagaaagtcaagtctaaagtctgaagacagctaaggatggagaaggggtgggatttagaatcagagtagtgtcccaagccccaaacgtggtatgaagcaaattagttatgtagccacagtgagtgaaggtttttataaacataacctaatagtattacttcaaagtcctgaagcttattgccctgcttaatgatgtgtcacattatttgtagggtagcacaatgagacttctattgatttaatgcacttccttaaagactgtcattgacacagccataaaacggagctattcccagacaactcaattatatccactgtgcccataaaccaccccgtgccccacacagttgcacacaggaagcagaaagggctgagagcacgactggggatgcaaagcccccagggacaaaagggaagggatctagagattgggaagcaggtggactagggttttatccagttgggaatgtgcagctgcataaaaagcactagacaggaggtgtagagcaccccacttggtcttggccctgccaagcaaagctgcgtgaaagctcccttcttctcccctatagacttagtttcctcgactgcaaaactggagtgctatgctcaatgagatccttcagatccctcctggctcccacattttgtggttttttgttatgattgcttttgttcttggagatagggtggctgagctgtatgaaaagatgcaagcatgtttttaacattgctcttcaccctttccatcaattgagagactttcttttacaaatagttgataataatagtattaactatatcaagaagcatttcagtatagttgaaagagggaaagaacatgggcttttgcagccagccagccttgggttccaatcctgaccctgctacttattagctgtgtgtctatgagtacttgatgtggcatatctgagactcattttctcatgtgtaaaatgggagtatgaatacactgacctattaaaacacatatatacacatgtgcgatattctaacttcctcaaaatgctattacataaaccacttatctttaatgtgagaagcagacaagaatagctacttacgtacccatttcacaggaagagaaaattgaggtggaaaaggaataaccttcacaaggtgagtgggcagagactggtctccagcacctggtctgaggaattccaattctgataatagctgagagtcagaggaaaatgaaatctgctggcccttcctgaggataaaagcctcaccacaggacagaatggaaaccgtctgcttggttatgaggtgattgtttttccaaaggaattgagttcttcttgggagagaagaacccaagatcttcttgggttctcccaagaagcctggagagaagaaagtgtcaagaagacaccacttgctgacccccaacctgatctctggcagttgtttcaaagagaggatgtgggaagcaaagtacctgcaagagaaggcaagggttctggagtctagaacactaacttgaggcctcagaaaatgcctgacttgagagaatcctgcaaaatcattatacgatccctcactctgcccatggtgaaactgaagctcagagagaggcagggacttgcccatggtcacacagcttagacgtggcagagccaggatttagatccaaggcagctcagttgtctccccagaccccttgcctctatagcctgcctggccacctcctacagtaggcactccgggcttacctttctgatactggagccacagctgctgctggaccttcttgctgggaaagtggatgatgcaggtgagctctgagccatagagggcctctgcgatgtagtgggagccatagtgctggatgaaggacagcagctcctcccgactgctctccttggtcaggatcttgagaacattagtgaagcctggacaagagaggagcatgtggaggtggtcagatgtgagaggctggcggctagcaaattatacggtggcaggagttcttcccaacctgtattttgtgccttacccctcagcacagtggcagcttggtggctgcactagtccaaacatatacataattccctcacttaaatagcaatgaatgccctctctgaggggtacatcagacacggtgaccaagagggaatctgcaggagaagaaggcctaaactcagcaacgtagaccatgggaacttaaaaaagataaatcaagaagtcaaagctgatatccactcactgagcaaccaatgtgtactgggaaaactgttagatgtttcaccctctttatgtaacttaaccttagccacaatcatatataatttgacaacaacaacacccattgtataatgagcaagtcaaagctgagagactaaaattgagttatcttgaacttccaggtagagaaagaagctggactcaaacccacttatgttctcactgcacactgcatgcattttccaccacaccaaacaaaccagggcttgaactgcccatggctggaatcctaaggctgcatttgcccagagtcagcatgtattctgagtccatgaatctgattcctggtttagcttcctgtagcattgcttttctttatatctctgctgttccctctctttaacagtggtatgttctctctccctagatttccacagagccttcttgctgctctatttcttagtcctaggctaagtcctcagcacttaacatggggcctgcacagcagtcactcagtaaaaactgctccctctttctctccttcctcaaacaggcacatgagcaagctattcttccagggacattcctgagctcctccctgctactggacaaagcctagtgaccttctttagaaattcaaggttccaagctcatctctaatgagccacccacactaagttttagctccagccaaattagttttattatttatcctgaatgtgacctgaaatttctatcattctatctttccttgcattctcactacactcaacacacacacacacacacacacacacacacacacacacacacctgaaatggcctccctatgtcctccctaagtcacacctatgcttcaaggcccctggaagtcacctcttctccaagaagcctttcacatcattatggacaggagtgcctactgtctgcactttcaacatgcaccaccttaaagtcggaagctctaccttatttgtctctatatccgcacatgcatcctccctgcacacccaccccaactgggtacatggcccagttcctgggacacagcaaacacaccaaccacaattattacaagaacagccaacactgtgccacatcaaagtaaaatgtaaaagaacaagcttctctccagcattaaaagtgagctccaatttgccaacatttgattgacaaaagggttttccgggagcatcattattgattaattaaagcagatgcacctttgtacttctaacaggaacatcatagtcttattcacaaatgcagtgtggggtgtggggggcagaaaacaaaaatagggggctcaaagaatgggtgtttgatgagaacaacccctctccatcaacctgttaagtaatacaactgggtaattaatacagtagtgttaataacgagatggtttctgttaagtaataaaaaacaataccacagagatgccctgagggtcttatccaggcagacaaaactgcaatcaaatccttgattcattcattccctgctctgccacttactagctgtgtgaccttgggcaagttatttaacctccctaaccctcagtatacttatctgaagaaaaatgggataaataatgtcttcctcacagtactgttctgtcataagaaatgaactattataaaatgcttaacagatgtcagcaataattactatttctacttcccagagggtgaaatcctccaattcccaggctgtaagagcttcattttgctgatgaacaaagaaaagagaacaaaagacctcatagataattagaggacactcagacaataaaccagtgaaagtgttattagtaagagttagggtagaatatcctaggtcaggcctcatctttccagattccttcattcattccttatttttcagtcttcatttatttttaaaaattcctccatcatacatgagcaccaacaacgtgctaatctttgttagttttggagatactggaataaataagacccaagccccgcccacagttctcaggtcatagacaagattccaatataaatcaaggacttgttaatgtcttgatatagatatttaagcaccgagaattccgtgagttgttttgaggggaatggagaacgggggaggcatcacagagtaatatagtatatgttcccaagacaaagaggtccaggcagagggaacggtatgggcaaagtcactgtggcatgagagaacatgcaccattttgggcactataaattgttgccatctgttggagcttaaagttcatgtggatataatgtgggtggtgcatgtaaagggatgggggtgtgggggttatataagatttttgtatcggagatggacaggaaaataaattagccaggagagaaagagaaattggtgtctgaggagaatttataattcacaagcttgaaatacttcaaaaacataaatatgacttagatactgtttatccctactctcctattcatccctccacaccctactcagataccttttcctccaggaagcctctctagctcccccagaatgattagctccatcttctgtgccaccgcttccccattattgcatcgaccctactgtctgtcagactcctgtccacccaccctccctaggactccttgatggcagagaggatgcatcctcatttcctcagcatccccagtgctctcatatgccctggcacatgctaggtccttggcaacaagtgctaaattattccaagtcccctggctgcccaggcagtggtcctcacctgctgcgagggtgatggtgctgagcttcacacggtagaggttgctccggacccgccactgctgcaccatggggtaacccatggcctcatcatacctgatatctcctgggagagaaaataagatggtcacgtgagcccagaattaagacgcttcacaccacattgttcaccctgcagctcttggctctgggaaacagacacctctttgaagtacaactttcactgggattgacaattttatgaaccccaccctccaggcctctttctggtctctaatctcagccctacccctcatttttctctctgctctatagcttgcaagtcccctttaccctacaagcaagagcaacctcaggtcagatctatgtcttacctaaccccatttgcaatttgccaccaggcactagacatcccagtgcttcagtttccacatctgacactgtagctctctctaatactcttatttcgtaggcatgttgtgaggctcaagtaaggtaccagaagtgggagccctctggtaacctagaaatgttgtgcatgtagaccacatgtaagtaaactacagcctatttgttatgtattttctgtagctgctttcacactatgacagcagagttgagcagttgcaatacaaaccacctgcaaaggctaatgcatttattaactttcccttcatgtttgctgacccctatgtagactatcatttcttaacatggaaacatggatgttcataagtattatgtaaaatatacgtatacagaaataaactctttctatttcaagtaagactgagaagcacaggcaaaacaaagtttaactgtataatttctcagcatcttgattatattaatatgcatgaaagtagtgtgcaaacttctttgaccataaaaccccttttgtatgaaaggtcctttggaattcatgttttatagaataaatttcaggaaacactggtgtaaacaagaaataaaaacagaaaagacacaacgaagtgttagcaaatgattaactttgggcggtggtaaatgaaaaattcttgttttctgacttatattcacatctattttctaaattttctaccctaagctttgcaaactctcttttttataagctgaacaaaaatacattaaaaagatgctagtcacatcagcagttattattactgtttttatgtatccacactttcttgtgcctctgcaaatggcaggcacattttctatccttttctcttgtcccctggtgagtaggcacttaaagagatatttgataccaagattaaaatgagaatctcattggaacaaatgatttcttcctggacattactgcagtattaaagttgtccattactgtcaactttttttttttcctccttatgctccttagccttttcaggaataaaatagttttttagaggctttcattttaaagtaaaatattcatgatccccaaagatatgtccactggagtgaggttgtttgttataaatacatcctctttgtttatctgctctgcctctcctggccttcctttgcagaggctagggagaaaaggagattgtgtggagggaggaagggagggctatgtttttgactaagggcagagaaaatgtctgcacaagaagattcagacaccagggacaaggcagtctctgctccttccattactgctcattcatgttcaaagcagacttgctgggggcattggcagccaaggcctatctccaacagaagaggcagaatgatgcaggctgttgagaggcagctctttcacttggtggcatgatgtccaaacataaaaacaaaacaaatttaaaaactccttctgattatcaagtaatttgtaaaaccatcttctcactccatccctcacttccttccatctctgctcattcctggattcatgcctgaaataaaagcttctccaatggaatggatgtcagctttttgaggtcaaggtcacggtctatattcctccccttctacagagcctagaagagagcctggcttatagtagcctctcaataaatgcctatccactggcggcctaactctcactctgttcctaaccataaactcatccctgggttactctatcgctgactctcatcttgccctccccatctcagctccccacctggggattatggttggaatgaagctatgtgatggagggaggaatttttcctggtaataataataataataataataataataataataataataataataaatcttttgaaatgcaacagttccctttattaggaaatctccaaggatccttgagtcaaaacaaagaatcataacaatttgaaccactaatggatacccatagtgtgccaagcattttatatacatgatctttatttctcattagaatcctaaaaaaaaattatcataccctatttttttgttattgtgttttgttttgttttgttttgtttttgagacagagtttcactcctgttgcccatgctggagtgcagtggcaagatctcggctcactgcaacctccacctcctgggttcaagtgattctcctgcctcggcctcttgagtagttggaattacaggcacccaccaccacccctggctaattttttgtatctttagtagagacggggtttcatcatgttggctaggctggtctcaaactcctgacctcaggtgatcaacctgcctcggactcccaaagtgtggggattacaggcatgagccactgcgcccggcccataccctatattttagaggaagaaactgaggctcagagagcaaaactgtccaaggacataccaggatcaatgacaggttcaggggcctttccattaaagcacagcacctcctcacagaccgtggacatgtctgctttaggaggtagtaaactccccatcactgggggtatccaaagagggataaccactcaggaaggatattatagacttgattcctcattaggagggaagattagactagacaccttttgcagtccatgttagctccgaaattttatgatcttaaaaaaaatgaaaattaaggaaggcatagaaatttttgtaacattttacaaggtgtcttttacatccatcatttcatttgatctacatctgggtccctctttgaaatagcacaggtcaggggtgatgtaagatagtggatatgccatcagctttggagtcaagaccgactttgtttaaatcttgacatgactatagactagccacgtggccttggattagttcatgtccttgctaacaagtttaaaggggacaataatggccttgcagggttacatggtttaacacacaaaaagtgcctggcccccaggaccccttaagcacatgtgggttctctcctccatctatgctcttttacaggaaaggctcacgggagttagatgactcttttgaggtttcccagagcttgcaagtgatggggaagtcagacagagatttcaacctaggtctgtgagattgtggggtcttccctggggaacaattcccctctcagtgaaagagctctattatccttccccatgacgattcccccgtgactattctccctgggcagtggataaggcacacaaccacagtatcacaaaggcagagtcgagaacctcacatcttaggaaatttcttaagaaaagggtaggagaggaactgggagcaaaaaaagaggaaagagcatcctggggttggacagaaaatatggagtctcaggaaagcctgcaaaaggcaacttcccagtggagagagaaagtggttgcaggggtgggggagcggcaaagtggagtagaaagggcaaaagacttggtgctacagcacccaggttttagtcctggcagatatgctgtgtaactttggactggtcccttctacctctctaagtatagcttcctaatctatcaaatggtaaaaataatacccaccccacagatggcacagtgcccacgtacaaaaacgagctgtgtaactcgagtgctttcaagtaggaggggctcctgattggagagtccacttcttttactttggaatgacttaaaacgaaccaagaaaacaaaatactaacagtggaaaaataccagaaaattgtcaatgagaatgaaaagtgttttgagactcattcacagaggcaaaactctcactgagaaaaatcgttcctgttctcacagaggaacctcctctcaaagatgactgcagtcccaagtctgaggtctcagggaagtccctggttctgctcagccaatagcaggagcccaagaaagggtaagttccttcccatacccttcctcatgaaggaggaggcttgacagagcccatcttggatctgctgaagactgatatgcactaggtgtggagactcggtgtgtggtcagggaacctgggaagggtctggcacatgtgtcttaccagtgagcagttggaggtctggaaggggctcggagaggaccccccggcactgctcctccaccggcagcgggatcaccaacagcccatcggccagctggggaaagtccttgatgaagttgttctccctgtggagaggagcagagagactgccaaatcgaggaagtggagactgctgaggactacagggcaaggaggcaggatgctgtagtcagaataaagactcatggtggggtgactttgctgtaatgcctctggtttcctgaatcccagctctgagaacatggtgctaactacaggttcctgaatcaggcaggctggggttcaaatttagccccactgcttacttggctgtatgatctcaagcatgctactgttcctctcagaacctcagtttccttgtctataaagtgagactcagatctaagggctgttgtaagcacttaatgggaaaaacctaccaattatttaagatactttctgatgctctataaactgtatgtggccgctaaatgtcccctggcataagcagtggcaatgttgaaccaggatgtgagaactgagaatagtgcgtagtgtttgcagaacaaggggcaagactaggctgaaaaaaagaaaaacaaacaaacaaaccttggaaaaaatagatgtttgttaaatggaagggccctaagagacttttttttttggctcaaacttttccttttacagatggggaaactgaggcctggagaaagggaatgacttgctgaatcacaacctgataggttagactcaaacccatgtcttctgactccaggttagtgctctttcccttgctctaacttctttaggtgcctctaaccctttcctgcaggccagtcccagggaacagaagacagacctctgaatgaccccagaaaactgaactgtgaacaaagttctgagaggatggtagtaacagtgcagcagagggaggcaggtttcattcttctagacaatagacctgcctaaaaattaacagcctgccaagagaggtggtgagcttcctgttactgagggtgtgcaagcagaaaacttggcagccagttggcacggatggtatcgaggtcttttccaaattaaatatgacttatgaggtccctttatattcagaaattcccagcattaaagacatgaattatagtctggagaggaggaggagagaagagaagggggaggagaagaacaaaaggaggaagatgtttattacttcattttgacacatggaatggtcaaccttgaaatgaaaatcagaagcacgaaaacaaaaatatgtgatgccaaagcaatgcctttgaagcctgtatctcagacagttcaaaagcagctgtaaaagtgttgagtggcttgggtcaccttcctgtctgctcaacatctctgcaccccactccaggcacctttgaagctcatcatcaattcatccatttaatgaacactttcttcatttctgagtccagaggatgtgacattatcaccatcttctataccaccagcatcaccatcattatcatcattgtctttgtcatctatattattcattgaatctttataatttgctaggatctagctaaatactttacatacattttatcacttaatcttcacagcaatcccaaaagatagatattattatctttaagttgcagacaagtagcatgagatttggtgttaacaggtggtggagctgggatacgaacccaggtctggttgggcctaagactgtctgcccaggcatgcacgtgcatgatggtgagttttaaggcccacacttgccatttaaacatgctgctgtgtgtgggtgtgccatggctgtctgtggagtcatccttgtttatgtctgtgtgtgcctgtgataatgggttctacctagatggttggtctttgtctacaaatctgggagtgtggaacagcaatatgaatttaaaaagacaggcttctggtagatggaagtaccaccacatagcatataaccctagccaggactaaatgtcctcatgcttcccttgtgaggtggcctctggtgatagatttttccctgaaagatgtagcaggatggaggggtagtccatgccctagtcattcaaccagcatgcactgagcacatacttgggtggaatcctgtgctgggtggtgctaagaacacagagacagattgatgtttccccttgtcctctagatcttctcagcctagtggggaaaacacaaaaaatggccatgcagaataatcagtgggggctgctatcaggaattctgcatgtgctgggtgctgctgcacaaggtctcttccctacaagatccccagcacttgttttcactctgggcaggagaggctaagggtgaggaggtagctcagccttggaagctgagaagagcctatgaggactgggctccagttctgcccacactgcatcctagctgtgtaacctggagcaaaccaaccaaatctcaaggttctgttctgtaaaatggggatcataacagctattcagctggccttagtggaatggctacaataacaatagccttttattgagcacctactatgcaccagacacaattggcagtacttattcttcacccaactctgtgaagtaggtgtcatttacattccccattcagacattgaaaagctgaagcacaaagaagttatgtaactacctaaagccacaaggctgggaagtgggagatcccaggtggtttggccccagatcaaaattgagtaatatattgctttcaaccatgagttaagttttaaagttgattcaatctgatatttaaattttccagaattctatgaggtttaaaagcaaactaaatgcttaagtatattttatactttattatgtactaaaaaatgaccagattgtggtgttatttctcagcttgcctttccctaagcattcactcagaaagttgaatatagaagggttaatatttattgtatgcctggcatagagtctttgtttgtctaacaggtcatggtagatgtcttcaaaagacatcctagcactcctcatcactgcttgggtagagggtgctaaaggacctgcctgtgacacacacagactgtcagtgttggaagggccatagtgcctgggcgtgtgctgagcccagacaggatgcagccaagaggaggaccttgctgctcctacaagagaggagagagttagctattcaccacatgccccaggctctgttctctatgtgacctcttcaagcctcacgcaaatgccacaaaataggcatatattcccagtttaaccgacaaggaaatggattttccatggacttacataatggatgcatttgggaaatgaaatctgaaggcaaatctatcatttttcactttaccacccaagagtgtccatttcaaatctctagaaatgttcttacaattgtagagaagggaaggtaatgccaccttctctatccgcatgtccctctcttccaatccttctgccttcttatcaagtcactcttagctctgcaaggaaatctgaccccaacgggacaatgcaaggaagtagagtgtgcaaactcaggaggcaggggcctggctcaggacaccccttctcggaggaaggttttccttcctgagcttccagaaagtagaggggggacttggagaaatgcagaaagacagagaagatggaagggtgacagttagccagccaatatggaagactgggaagaagggtggcaggtaggcggagatgaagcccgaatgaacagcccagcgacggcatggtctctcgggtactgggtccctttgcgaccgcctgggcgatggccacaagtcctgcaaggcctctgccagcagagggcgcccggggcctttgcatcgatcagctgtttcgggaggcaaaacatggatgagagagtagctgctgggaaagttccgctgggctgagaacctcagatggaagcctagacaacagctgcagaacccacccacctgggagaggcgaccagggagctggcagggtgctggcttaaactcgggtgctcaggaataattcagattcttagcgctcgtgtgtgtgtgtgtgaatgtgtgtgtgtgtgtgtgtgtgtgtgtgtagtaaaaactaccacacaactaattcgtataataggaagacagaaataatggacaatatttatttattgattatatctgttgctcatcagttatgctgtagctcatgtgccaacgtgtgtgtgtgtgtgtgtgtgtgtgtgtgtgtgtgtgtagtaaaagctgctaggtaactaaccctagcaataatgataatatttacagagatttattgattgcatttgttgaccatctcctatactcaaggtagtgtgtcaagatatagtagcgtacaggaatggaaaaccaaaggttgtatgttctcacttataactgtgaactaagctataaggatacaaaggcataagagtgatataatgagttttgaggacttggcgggggaaggttggaagaggagtgataaaagactacatattggccgggcgcggtggctcacgcctgtaatcccagcactttgggaggccgaggcgggcggatcacgaggtcaggagatcgagaccatcctggctaacacggtgaaaccccgtctctactaaaaatacaaaaaattagccgggcgtggtagcgggcgcctgtagtcccagctactcgggaggctgaggcaggagaatggcgtgaacccgggaggcggagcttgcagtgagccgagatcgcgccactgcactccagcctgggcgacagagcgagactccgtctcaaaaaaaaaaaaaagactacatattggggccagg

SEQ ID NO: 1333 - DNA, 276 bp, Homo sapiens
agtgcaaacttcacatagagaatgtccttccacaggggtcacctaggcagtacacttggaaaagacatgttaattgcatagcattctttcacttctagcctctctttatctcgccatttctctttgtggattttggtgtgcctttgtctatctctctttgtttttctgtctcctcctcccctcccctcttttctctctctctctctctctgcctttcttttcctctctttcttgctctagctctctgtccctccctctctctcacacacacacaca

SEQ ID NO: 1334 - DNA, 276 bp, Homo sapiens; identical to SEQ ID NO: 1333

SEQ ID NO: 1335 - DNA, 350 bp, Homo sapiens
cccttggctttccagtaatttccagtggtttccccagatcataaaagtggccagggtcccatcattatgaaacctgggaaggctagggcatttgtttctaatatccagggacaccagagctagggtgaaggaagaactgggctgaagtttggattcaaataccatcttcttggccttttgcctctgtaagttaaggtttccctcctgtaatgggggaagtgagtacccttgcctcctttgctttctggggtagatgggaagatcacaggaaggccatctggaaactgtagagggctgtacaaatgctcatggttgttatccatgccctatttggtctattttccccaacc

SEQ ID NO: 1336 - DNA, 349 bp, Homo sapiens
gggaatgccagagacaactattgtggaaatcttcttttgggtaatatcaggctgttttgtacatacattatttcacatgggtgaaactttatacgtcatcacaaatcaagaactttgacaagttctccttttttctttttttttattattcccaccacctcatcatatataactttttttttcttttttagaggaacagggtctcactctgttgtccaggctggagcgcagtggcgtgatcctaactcactgcagcctcaaactcctaggctcaagtgatcctcctgcctcagtctcctgaatagctggactacattgtgcacacaaccatgcctggctaatgttttta

SEQ ID NO: 1337 - DNA, 264 bp, Homo sapiens
agcttaagttgtatactcagacatctaaatatacagagtacacattgtacaacatatgagaaatttggcttagtaatttcctcccatgtgtaaggctcataatcttatttttaaagggtttagtaataacacaaaatgaaatctaactggtattatacaagttaaagtaggttcagagaagaaagcaatataatgaaaattgttggggtcccagaaacatgagaaatttctggtgcttgcctttgcctgttttgtgttgaagtt

SEQ ID NO: 1338 - DNA, 486 bp, Homo sapiens
atctgcagtggacagcctggattttaaaagaagagtggcatctttggaatctctactagaatctgctgaggttaaaatagacccagtgttttctaagtgacagaaaatagaatgtgcctagggatggcaaaagtgaaatgtagaaaacccacttggattggtctaaggaagtagatccaggcctgaaattccaagttccaggacttctagttttctttaaaacttttaaagcaaatcctgctttggaaaaaaactcaagtaatatgtgaattatgagattgtgaaagaagggtaaggcttggatccagtcagatttttggcctagaatatgtgacaattgagttaagagtaaacattgtggtgttaatgtacttccaaagaatatcatcgttgatatctgtgtacagtgaatgctttaaaagttctgggtgattgagacagtttaaattttttttaattatagatttacttattttaaaatgttac

SEQ ID NO: 1339 - DNA, 848 bp, Homo sapiens
attcagccctgactgccacttgtccctctgacctagccataaaatactaatatttgcagctccctcttatatggtgaggaataataaaacattatagcactttgggctttgtttcatttcttcccattgatagcttttttcctgccactgtcagcatagctatttcccagcatgtttttccctccagttctgcagccacatagtattttctgactgctatcacctacccaggaagaaaattgtcacttactgagtacctgttttctgttaagtataccaacaggactttcctgcaaatcatcccatttatttttcatagcatccctttgtgggatggatatcattatccccacttaaaaagatgtggaaagtaaggctaaagggaggataaataatttgccaaatgttttagaacggatggaaaaactcgggattcagttctgagtctactaaccctgaaaggccgttctccaagaataaggctagaagctttaagatactggaaaagtatgagaccccatttctgacctaaaggcaaggatcaagactaacacatttgaaacaatgagagtgaatttaagatagagtcacttctgagtgctgcgtgatatcatctatttgcagtgctgttgaaattcagaaaacagttctgcctccagattctatttatctttgaacctgactgggaatatatattaatattaaatcaagactttatttttaaatgtaaccctagtgccagtttcataatataccaattcactatttggttactgtgctgtgctcagacttctgttgaaccccaaaacatcagcgagccctcaatttctgtgcatacgttcaaacct

SEQ ID NO: 1340 - DNA, 848 bp, Homo sapiens
attcagccctgactgccacttgtccctctgacctagccataaaatactaatatttgcagctccctcttatatggtgaggaataataaaacattatagcactttgggctttgtttcatttcttcccattgatagcttttttcctgccactgtcagcatagctatttcccagcatgtttttccctccagttctgcagccacatagtattttctgactgctatcacctacccaggaagaaaattgtcacttactgagtacctgttttctgttaagtataccaacaggactttcctgcaaatcatcccatttatttttcatagcatccctttgtgggatggatatcattatccccacttaaaaagatgtggaaagtaaggctaaagggaggataaataatttgccaaatgttttagaacggatggaaaaactcgggattcagttctgagtctactaaccctgaaaggccgttctccaagaataaggctagaagctttaagatactggaaaagtatgagaccccatttctgacctaaaggcaaggatcaagactaacacatttgaaacaatgagagtgaatttaagatagagtcacttctgagtgctgtgtgatatcatctatttgcagtgctgttgaaattcagaaaacagttctgcctccagattctatttatctttgaacctgactgggaatatatattaatattaaatcaagactttatttttaaatgtaaccctagtgccagtttcataatataccaattcactatttggttactgtgctgtgctcagacttctgttgaaccccaaaacatcagcgagccctcaatttctgtgcatacgttcaaacct

SEQ ID NO: 1341 - DNA, 543 bp, Homo sapiens
ctcattgactagagcaggccctagcgagcccagcccttagtctctgtcccctccaggctaccctccatggtagcaaccaggcggcccttttggaaacacacatatgaatatgttactcagggacttccaaaggctggctagcctttgcttcagaatgagatcagctcttcagcatggcagcggcagacagctcctaccgctggccccagcttcctctcaagctggccctggcgctctggactcctcacacttctgcctggcaaacacctacttggtcttcaagccttcattcttcatagaggctacttgggttctgccccacacctgtcacctgaattgtcattatgtgtgagctccttgagaaaaaatatatgacttggtcatctttataccctcagtacctagcataacacctggcatgtagtcagcacttagtaaaaacatttaaaaaatttttactgtctccattttgcagatgaaaataagaaactttaaatgaataaaatgtttgactcttggggtcaaggccataataattagaaa

SEQ ID NO: 1342 - DNA, 271 bp, Homo sapiens
acctgtaatcccagcaccttgagaggccctagggtagtggaccacttgaagtcaggagttcgagaccagcctgggcaacatggtgagactctggctctacaaaaaatacaaaaattagctgggcatggtggtgtgcgcctgtggtcccagctactctggaggctgaagtagaaggctcatctgagcacaggacttggaggttgcagtgagccaagatcataccactatactccaacctgggtgacagagtaagcccctatctccccatctc

SEQ ID NO: 1343 - DNA, 543 bp, Homo sapiens; identical to SEQ ID NO: 1341

SEQ ID NO: 1344 - DNA, 271 bp, Homo sapiens
acctgtaatcccagcaccttgagaggcccgaggtaggtggaccacttgaagtcaggagttcgagaccagcctgggcaacatggtgagactctggctctacaaaaaatacaaaaattagctgggcatggtggtgtgcgcctgtggtcccagctactctggaggctgaagtagaaggctcatctgagcacaggacttggaggttgcagtgagccaagatcataccactatactccaacctgggtgacagagtaagcccctatctccccatctc

SEQ ID NO: 1345 - DNA, 293 bp, Homo sapiens
atattttatttcatattctagagacagttatatggaggcatatacttgggaattctcaaaagtcttttatcctctagaatatcagatgttttcagtagaattgacaagcgttggtctataattttcaagtcaatacttttcttatgtttttgaagatggtaacaacaaatttgaagttatctaatgtaggttctataaagcaattacagaataaagagcttggcttgagatagttaatctagtatcctggtccagtctttcaaagtacctgccactgatcagagcatatctgg

SEQ ID NO: 1346 - DNA, 289 bp, Homo sapiens
tggctcatgtctgtaatcccagcactttgggaggccgaggcaggcggatcatgaggtcaggagatcaagaccatcctggctaacacggtgaaaccccatctctactaaaaatacaaaaaattagccgggtgtggtggcgggctcctgtagtcccagctactcgggaggctgatgcaggagaaaggcgtgaacccgggaggcggagcttgcagtgagccgagaccgcgccactgcactccagccggggcgagagagtgactccatctcaaaaaaaaaaaaaaaaaaaaaa

SEQ ID NO: 1347 - DNA, 541 bp, Homo sapiens
cttaatcacccctttaaagaccctgtctccaattgcatgccttttttttttctgagacagagtcttgctctgtcaccaagatgtgtgtcacctacatcacatttttaagtagtgagggttaggacctcaacatatgaattgggattgggggagcggggagggtgcacaattcagtccataactgtgagctccattgctcctaagatgctagaataaaaattggacttcagggccgggcgcggtggctcacgtctgtaatcccagcactttgggaggctgaggcgggtggatcacgaggtcaggagatcgagaccatcctggctaacatggtgaaaccctgtctctactaaaaatacaaaaaattagccggtcgaggtggcgggcgcctgaagtcccagctactcgggaggctgaggcaagagaatggcgtgaacccggaaggtggagcttgcagtgagcagagatcgcgccactgcactcgagcctgggcgacagagtgagactccttctcaaaaaaaaaaaaaaaaagaaaagaaaagaa

SEQ ID NO: 1348 - DNA, 541 bp, Homo sapiens; identical to SEQ ID NO: 1347

SEQ ID NO: 1349 - DNA, 674 bp, Homo sapiens
cgcagcggccggggcacccgccggcctccaccccagaaaggcgcccccgttcccgctccggtccccggcagggcctcccgcagccagagcgagactgacccgcgcctcccgccccggagcagagcgcagcggcgcgtcctggcgtctgccggccccggctccgcgcgcccctcggccaccgcgcggagggactttgctcacctacccggctcttccacacctcccggtggcaggatcgccgcttcccgccgacagcggctcggcggccccgacttctcagcagcgccgcggccacgccccgcctcgttcccaccgcgcggggagcgggtccccgctcgggatgattcacttcgctccttacctggaggctcgcgcgtccccaccccttgcgacccgcgcggcggccgggagctggcgccctctgctgggccaccaggcgggagcaccctcggactgggcaaggatcgggcggagagggtggggacacagaggggggccaagcacaagcacccctgcctctctcaacgcgggcaccccttcccaaaacaggggccagtgcgcggggaccacgctgggacgactctcgggggaagcaccagagctgtccccacgccccaggacacgaactcgcgcccggagccgaccccctccacggccagcgggtccagccgcgt

SEQ ID NO: 1350 - DNA, 317 bp, Homo sapiens
  SITE (207): n equals a,t,g, or c
  SITE (226): n equals a,t,g, or c
  SITE (238): n equals a,t,g, or c
  SITE (263): n equals a,t,g, or c
  SITE (281): n equals a,t,g, or c
  SITE (294): n equals a,t,g, or c
ccccatcagctgaggaggtcagagaaggctggagaggctgcagcctgtatcgagttttgaatagtaggtaggatttgtaataagtagaaggaagctaccatatttgaacatcttctatgggctgaacctttcatacctatcatctcttttattccttaccacaaccttgggtggtgggtattatatatatatgtttacaaattaaanccgaggcttgatcagagangtttatgtcccnttgctcagctagtaaatggcaggcnagagttgagatccaaccnttaagccaccagnatgggtgtgtgttctttctgcct

SEQ ID NO: 1351 - DNA, 333 bp, Homo sapiens
  SITE (1): n equals a,t,g, or c
  SITE (147): n equals a,t,g, or c
nctggtattcccattttacagacgaagtaactgagtcagagagcagatgacgatcttcccgaagctcacccagctagtaggtggcagaacaatctcagagtgtcagttaggttctaccagtggctcaaagacaggttcatgtgaagnagtcctggggtcttggtggtcactgcagaatatcacctataggcataatattttcttttttaaacttgaaatgactaaatgtataattttgtgctaagtcgcatgccatcttaacaggtttctgggatgggcaaaagccaaagacctaaatgaaagtataaggttgaaaaagtatgaaggcaaaac

SEQ ID NO: 1352 - DNA, 1857 bp, Homo sapiens
gagttgtccagccgttctctctcctttcttacctcttcctgccttcccacctctctgcatcctcacccttaatggtcacaatgccgcatttccagggtgaccccaggttccctccccgtggctcacagtgctggtcaaagcatttgagcccccaaatgccccactctccagatcggagtgtaaagtagtaggtgccagtcctgctccctcgtggggctgggcagtgagctctccctaacacacacaaagcacctccagctcagaggaagctcacacctcccatccatgccttcaggcttttcggcactggcatttagaaagctattctctggattcagaacccccagagagagcttttctctgtccttcctgattattggtgtgtaaatgaaggcctagagtagtggttcttaaacttgagcgtgatgagagtcacctggggaggtgttggaaaacagagtgccggcccagtcccactccagtttcactgagtgagtctaggagggaactgcgaatttgcatgtccaggttcctgggtcatcctgctgctggtctggggtcatttcgagagctgctggactggcatagagaagagtttcctgggttgcctttgaagataagaatttctgaaggtttgagcactgccttcagacagtggctcggtagaagtcccaagagcagaagttgtctggagaggagagatggcccccaggatgcgcctgaccaaccagtcatacctacaaaagggagttctggttctctagggctgtgatctctggggcttttcaacttggctgtagtaaaactaaagttagtaatatgccctgttgtcatctagaaattccgccatgagctattacagtagtttagttgggacgcttaaggagagcaagtcgtggcaatttcttctgctgattacagcggagttttggttttcttgttcccggtgtttactgtgtggtggagctggataagggagcaccccaaagcctctagtcctgcccaagtggctttgcccttccaaagacaacagccccagccttcatttggaggtgggagaggaggacacagagagggttggaggaggctgtgggcatcgggatcctgtttgttcttgctggcactgcctggcccggcttcctgaggagtgaatcagcccatccaaggcttggcatgcagtagtgagccaagggttgccatggagatgggcgaggcccagagcccacaggtctgggtggcctgacttgtttttaaatgttgaagtctgtgcgaagagggagggcctatctccacttctgtggctttcttaaagcgtgactggtattttggggcctggaaaactgctggtgtgggaaacttgcatccccagtatttggtgtgttgcttacttcctgggtgctatggacaactatgactaatgctctcccaagtttagtagatgacaaaaacaaaaaccagggctgacaagcatcttattgaaggagggtgataaagaggccaaggtttcctctcctgcccaacccaggaaaatcccctctctctctgttatctgctgctgtaataactcctttcagcagggttaatttgcccacggaagcagtttgtgatccaaggaaggacagaagcctaaaatctgagccaacagtctccctttagccttccttccccactttcctttggccattcccatccagtcttagtggagctctggatggcagtttgcaggtgtgaagcagataagtttatccattttcctccactacccagcgctcacacagactcccacacaaaccaggaaacagaaccccagtgtcctaaattcccccgctgccacccagccgccttctccgatcacag

SEQ ID NO: 1353 - DNA, 75 bp, Homo sapiens
cctcccaaagtgctaggtcaggtcagaggcctgaccatcagcctctgagtgtattcttttaaaaaattgtttttc

SEQ ID NO: 1354 - DNA, 337 bp, Homo sapiens
agcatctctcacctagactgtagtttcttccctggactctgttcccagtctaatctctccagtccattcttcccactgctgtcaaagtcaccttttctaaaatctaaaactgaatcctgattctcctgttgcttataagacaaaggagctagccccagcctacctccctcttctgtcccttgccattctatccttatgcaatgatacttccaagttctgcccacacagaactctttataatttctcttcttgtacttttactcaaattgatccattctcccatttaccgccaactcatctttcaagactcaggctactagtcaccctctctactgaa

SEQ ID NO: 1355 - DNA, 337 bp, Homo sapiens; identical to SEQ ID NO: 1354

SEQ ID NO: 1356 - DNA, 352 bp, Homo sapiens
agcatctctcacctagactgtagtttcttccctggactctgttcccagtctaatctctccagtccattcttcccactgctgtcaaagtcaccttttctaaaatctaaaactgaatcctgattctcctgttgcttataagacaaaggagctagccccagcctacctccctcttctgtcccttgccattctatccttatgcaatgatacttccaagttctgcccacacagaactctttataatttctcttcttgtacttttactcaaattgatccattctcccatttaccgccaactcatctttcaagactcaggctactagtcaccctctctactgaattttcccaacaaccc

SEQ ID NO: 1357 - DNA, 351 bp, Homo sapiens
agcatctctcacctagactgtagtttcttcctggactctgttcccagtctaatctctccagtccattcttcccactgctgtcaaagtcaccttttctaaaatctaaaactgaatcctgattctcctgttgcttataagacaaaggagctagccccagcctacctccctcttctgtcccttgccattctatccttatgcaatgatacttccaagttctgcccacacagaactctttataatttctcttcttgtacttttactcaaattgatccattctcccatttaccgccaactcatctttcaagactcaggctactagtcaccctctctactgaattttcccaacaaccc

SEQ ID NO: 1358 - DNA, 352 bp, Homo sapiens; identical to SEQ ID NO: 1356

SEQ ID NO: 1359 - DNA, 492 bp, Homo sapiens
caaagccaacaaccgccagtcaagtcttggtcacactgcatcaccctaatattgacacttctgtctttctctttcacttataaggactcttgtgattacactgaacccaagtgaatccaggctatactccccattccaaggcccataacttaatgacacctgtaaaatcccctttgccatgtaagataacatattcacaaattcctagaattaggatttggacatctttgcaggggggattattctgccttccataccctgctatataatattctgctgtatgaatataccacaatttatgtatcctactgttgatggacatttgggctgttttagttcttagctattaataatgctgctataaacattcttatataagtcttctgcattcatttctgttaggtagatactcaagaatggaatttctgggtcatggtaaatgtatgtttagcttgaatagataatgctaaagagttttataatgtggttgta

SEQ ID NO: 1360 - DNA, 492 bp, Homo sapiens; identical to SEQ ID NO: 1359

SEQ ID NO: 1361 - DNA, 492 bp, Homo sapiens; identical to SEQ ID NO: 1359

SEQ ID NO: 1362 - DNA, 156 bp, Homo sapiens
tctctactaaaaatacaaaaattacccaggcgtggtggtgcgtgcctgtagtcccagctactcggaaggctgaggcaggagaatcgcgtgaacccgggaggcagaggttgcagtgagccaagatggtgccactgtactccagcctgggcgatagag

SEQ ID NO: 1363 - DNA, 156 bp, Homo sapiens; identical to SEQ ID NO: 1362

SEQ ID NO: 1364 - DNA, 23419 bp, Homo sapiens
cggcaagaaattcactttttagacctgttcaagaatacatctattgcataaagtggaaaaagatttgtactgaaatccttggcctttttccatcagatttttaaaacaaaaagttgaatttgtattcaagtctattttagtagtattttgacttttgtataatctagagcattatttctgtatctcaggaagctgaatatggtgggcatgatcagatagatttgtatgacgatgtcatatctccatctgcaaataatggagatgccccagaagaccgagattacatggatactctcccaccaactgttggtgatgatgtgggtaaaggagcagcaccaaatgttgtctatacatatactggaaagagaattgcattatatattggaaatctaacatgggtaagtgaagttaatataagaattaaattattggtaattgattttgaactgctctagtaattaatgtttttctccagatttttataagtttgaagttactgtgtttttctatatgtgtttgcttgtccaatgaggagggaaatacaaatatctttgcaacatcgttaattcgaattcttctagttttgagttttgtggtcattcaacttttcttggtggagatactagttaaatatagttaaattagttttgtcttcagttaccttttttatgctaccactttaccttgcttccgatagcccagtttcactaaaaataatgctcacatggggtctcaaaccaggattcaagtgtaaaaggaaagagacatagtatcactcctggtttaaaaatagtgtccattatttaatttgtgttacaaatttgagttttatttctgcccttaaatttgaaatctgatttatagaagcacttctgtgcgtattatattttaatttgggttgtcatgagactaagattattgatttagagcttcattaaatgcacatatgtatatttattttttattaatattacatcttaagtatcattaaaatagtcctatagaatgtttgtatttctacttagttatatgtatacttgaaagttaaaaacttgtatatgcaaaaatcaataaaacttggcacccttgcatttccttaataacactgtatttttaaacgttttatttacatttctttttttcagggggagacagaatttgcaaaactctgtcacccaggctggagtgcagtggtgtaatcatagctcactgaagcctcaaactcctgggctgaagtgattctcctgtgtcagcctccaagtagctaggaccacaggcatgtgtcactctgcctggctaattaaaaacaaaacaaacacttttgtagagctgacttcttgctatattgcttcaggctggcctcaaattcctggcctcaagtgatcctcctaaccaagctctcaaagtgctaggattatggtgcccagcctatttacatttcttttaaaactaaatgtaacagatctcccaccacccagtctgagtattctataaaattggagacagtagcagtgtagttatgaaagtatggttgctaagtaagtatttggatcttagctccaccatctattattagttttgtgaccttgttaaagagttaaagctctttaacttctattgtatcatgtgtaaaatgggtataataatagtgcttatatggttgttataagagttagttgatacataaagtatatggtagatattaaatacatgttagttttttcttatctgcattttaattcaaaaacaagatgaaattcaaaatactttcctttaatgggaggaagtgaaattggttttattcacaatttaaaatcatagcagtttaaagctgtaagggaccagaaactcttgagagtcaaatcttattgtaaccccaagggtatataccttctagtttctgaaatacttatcagggaatgaagttaggttcccagatggtttttgtgctgtttaaaaattggagtctgactggccataactagacttagatttgcactcagcatttattttctcttttatgtctcaaatttccccttaaaaactagactgggataataaaaatcttggttttattttaatggttaatgagggggaaaatatcttgcagtggacaacagatgaagacttaactgaagcagttcattctttgggagtaaatgatattttggagataaaattttttgaaaatcgggcaaatggccagtcaaaggggtaagttttttttttctttctttttgatttagtagctagtgatacagtttttacaagttaactttcctttaagttaatgttaattacacatgtatacacatgtatacaaacaacacatgattgtttacattggaaggaggttcttgggcaaagattgatacttttcattttacgtaccctattacctaacacactaaaaccagtagagtggaaatgtggacagatttattttctatttttcccaagttttctctatctgtggttgaaatggttgttgaaatgacagtttaagaaccattactctccctgtgattaagagatgggagaagatgggcaactgaataatgtgttacatggatattttgctttatttcactactaaactatacaagtgggatagcctcagcatgagaacattataaatacagatatctaaaagtaagaaaataaaataccactgtcctaccattcattgatgtttacttttaacattctagtgaagattcttttgagctttttcctaaaaataaataaataaataaataatggaattataattcatgtgttttatatgtttgatataaggaataaaaataaatacacatcctctctaatgtctaattcttttgcatcatacctggtatgctactgtaatttacctttcttatttttggttatcgtggtggtttccacttttgcctattgtaaataatgttgcagcagacatcattttatataagtcttttggtacagattttggattttcttttaaggataaattgttagatgcacaatgataaagaattttcttatttcttatattgcttacttatcttagaagattataccaatttatactaaactgagaatattttcaaaatatatgcagagtctgaatacttctcactaactttacttataccacttggtcaaagccactatcatctctcacttaaactttggcagtagcttcctaactggaagtatagactgccccctacagtctgtactccacataacagaagttctaaaaaaaaaatgacattctgctcaatcttctcatggtttcctgtctgtctcattctttaccattgtctacaaggtactttctggtctgttttcccaccacctttctaaccctatcctaccactctttttcagccacattagtctctttgctgttggccagaccaattcctacctaggacctttagctgttttctcttcttggtttacttttccccctcaaatatccacatggcttactctttgacttcattcaggactcaaactgtttaagagttttcttccatgaccatcttgtgcaaagtagcaccttcctatcctgtttcctttatttctgctctgatatattttactcgtttgttgtctcctcttccaagcctttaagcttaatgagaacagagattttgttttgttctctattacttctccagctctagaatggtaccttgcgtataagaagtggtgcttaataaatatttgttaaattaatttagttttttctaaatgttgtgacccaagataatcctggtgcaaacagcagaacttgttgactaaaataagaaggataatttaaaagatcatattgaacattagggggaaaagagcttaagcttcttaagctactaagaccctccctccctcaaataatttagaatatcctgtaactatacgaattggtaatcattctgattattttaaatttgtttttctttttgaggtataattcatatgccataaaatgcaggcttttaaatgtacaattcaatgataatttattatatttatgaagtttagcaaccattaccactgtctcattccagaacatttcatcactccaagaaggaaccttgtacctggttagcagtcactcccatttcctctcttcctatctgctggcaactgctaacgtgctctggatatgcctgttctggacatttcatctaaatggaatcataaaatacgtagtcctatgtgactggcttttttccttagcataatgattttaaggttcatccatgttgaagcatgcatcagcatttctttttatggctgagtaatattccactacatggatatagcacttttttcttttaatctatcagtcgatggacgtctaggttatttccacttttggctattaaggaaaatgcccctgtgaatatttgtgtacccattttgtgtgaacatgtattttcagttctgttggatgtgtacctaggaatggaattactgggttaatatagtaactctatgtttaaatgtttgaggaattaccagattatttgccagaggcattgtgccattttattaatacgtgctcatcagcaatgtgcaatggttccagtttctccacatatttatttatttatttatttattgagacagagtctcactctgtcacccaggctggagtgcagtggcgcaatcttggctcattgcaacttctgcctcccaggttcaagcgattctcctgtctcagcctcccagcgtgggactacaggcacacgccaccatgcctggctaatttttgaatttttagtagagacggggtttcaccatgttggtcaggctggtcttgaactcctgacctcatgatcctcctgccttggcctcccaaagtgctgagattataggcgtgagccactgcacccggcctctccacatctttaatacttgtctttttgattatagccaccctagtgggtatggggtggtatcttgtggttttgatttgcacttccccaatagttaatgatattgtacatctttttattgtagcaaaaagtggaagcaacccaaatgtccatgaactgatggatacatttcttttaatgttgtatatttataatggaaaattattcacccataaaagtaagtggtgatgcatgctgtaacagtggatgaagcttgaaaacatgctagttaaagaaggctggtcacaagggacctcctattgtatgattccatttagatgaaatgtctaggataggccagtccagagacagaaattaggtttagtggttccatagggtacagggatgggaaggaatgggagcgatggctaatggatatggagtttctttttggggtgatgaaaatgttttaaaattgattatggtggtggttataacactgtgaaatactaaaaaccactgaattatatattttgaatgactgaattctatggtatgttatacaagatgaacaaaaatgtgtactcgtatagttaagaaatatttttagtttttaaaattatttatttttagagacaggatctcactgtgttgcccaggctggagtgcagtagtgtgattataggttactgtagcctcaaactcctgggctcaagcaatcctcgtgcctcaaccttctaagcagctgggattacaggcatgagccactgtgcccagctgttgttttagataaaagcagattaagacctttttacagaagaataacagtaataatattgatctctttttactttgtatcctcaccccttaaacactttttaggtttgcccttgttggtgttggatctgaagcatcttcaaaaaagttaatggatctgttacctaaaagagaacttcatggtcagaatcctgttgtaactccatgcaataaacagttcctgagtcaatttgaaatgcagtccaggaaaagtaagcagtcctcagaggcttttattaaaatatgtacattttaaccagtgcatttgttaggtgttatactagagaagtcatcttaatactagctcactaggaactccatttcacaaagtccatgctttgaattagatttaatcactggttatgactgtgggcctgtgtacgagaaacctactcctgttccatttttctccagatgtaacagacccaatactatacaacaatgtgcaagttctatagccctgccattcttgtcctattatttccatcttagatacagaaagaaactacattctaattcttagattaaaggagagctatgtggatgtgtattatggtgggggagagatcactgataaccagaaaatgttcattgatttttctgcttggcaacaagacctttcaccacttggtaaactgaatatagaaaagatttgtcattatacatttaagtacattatctttaaagagatgagatggatgattatgtaattaacagaaattcaagtggttccttttcttttaatgttttagcacttaagacttaactgaagaagtgtgttacaaaatttaaatgatgtaatactgaaattaagatatctgttgaagaatttcggtcttggctgctgcagagtgctggtattttgaaagtaactcacgattacctatggaaaatatatttaaacctggatattttgagtctttaaaagtacccaaatagatgtgaatgttttcctaaaccatactttcttatgtagtttgcataggcacaaggcatttgcaagttaatatattagaaatagagttgtttttaataatagtggttacatttcagaaaactatttttaataagtgctatttatgagtatttggatatttgcagctacacaatcaggacaaatgtctggggaaggtaaagctggtcctccaggaggcagttcccgtgcagcatttccacaaggtggtagaggacggggccgttttccaggggctgttcctggtggggacagatttcctgggccagcaggaccaggagggccacccccaccttttccaggtaaaacttttcttaaattaccatggataaaacatgtctacctaatacctcttttccttttctctctttttcaagtaatgcattattaatgtgacttactctccttgttatgctatttttggaatccaggaaatttgatcaagcatcttgttaaaggaactcggcctttgttcctggaaactaggattccatggcatatggggcacagcatagaggaaatacccatttttggcctaaaaggtctttatttttctccaaacttgcttgacttatatatagaatatttacatccgtcttactttcttacctcttaaaaaaatcctttcaagatcatttttccttgtttcactttctagcttggcatcagagtagaatataaggtgggtgatttcactgtaagaagtgtgtgtacacggaaagatggaaaatatctctaggcattgtaatatttttttattaaagttttcgtttcaataatttttcttaagcataaattgagctagttaaatttgtaaggatatacttcattgtagttggtagtgtaacatttaccatacgggtttaatttaaagacaaagacttggtgtatgctctatgcgtttaaagtataatcttggcatataaaagttaaaatatcttattagtgaagtgtttttttttctctctttctcctttgttttttagctggacagactccaccacgtccacccttaggtcctccaggcccacctggtccaccaggtcctccacctcctggtcaggttctgcctcctcctctagctgggcctcctaatcgaggagatcgccctccaccaccagttctttttcctggacaaccttttgggcagcctccattgggtccacttcctcctggccctccacctccagttccaggctacggcccccctcctggcccaccacctccacaacagggaccacctccacctccaggcccctttccacctcgtccacccggtccacttgggccaccccttacactagctcctcctccgcatcttcctggaccacctccaggtgccccaccgccagctccgcatgtgaacccagctttctttcctccaccaactaacagtggcatgcctacatcagatagccgaggtccaccaccaacagatccatatgggcgacctccaccatatgataggggtgactatggcccccctggaaggtaagttagtgtgtatctgtgaaagtacttgatgataaaagataggaacaatgactgtaaatattagattgtaggtatataaatatgttatttctgccttccaagaagatgaggtgtttaagctgctaccctgttttagctgaaagatactggtataggagaatttttagatttgttctctttgttggaaaagtagcatgcttcaatatggaaaagtaactactatctctaaagcacatgtcagaagcagctagtatgaattgctatacactgttgtgactaactgaggaaatctgttgagtatgagttaaggtttatgtttttgttttacagggaaatggatactgcaagaacgccattgagtgaagctgaatttgaagaaatcatgaatagaaatagggcaatctcaagcagtgctatttcgagagctgtgtctgatgccagtgctggtttgtgtatttcttgtattaatatttcttatttatgttattaggaatgacctaaaaatgtaagtacaatctagaagataggtcatttacatgtagtagttctttttatattcccaaatcattacctacgatttatttaaaaagcattgaaaaaagttgtgtgtcacagtgtagtggggaaaatccaaattttaagttatttggtatagatttaagtcttacccttgacatttaatggttcaggggcctcatgacaccttatttattcttatatttgcaaaatgataatgtgcttcacacacgtataataagttgagtcaatatcatgagcatgaaaggcttttgcaaatggtgaaacactgaaagaagacattgtcttgcatagttattttatagcacagtacttttgtaaaatgccttatcactcttatcccaagtggtttgatggtgttttgaaaacaaaatttgtttgacttcaaaccctttcctttccctcacaggtgattatgggagtgctattgagacactggtaactgcaatttctttaattaaacaatccaaagtatctgctgatgatcgttgcaaagttcttattagttctttgcaagattgccttcatggaattgagtccaagtcttatggttctggatcaaggtaaaactttcctgtctcatttccatttaaaaaaactgttagtttacaaatggaaaaaatactgtgagactttaaaaggaggactttgcttttacttactgattatttagcagctggagtggtttttttttttaactctaaatgttagttgcttgcttaaaaccctttaaaggctcctactcagtcttaaagcaagactgtaaagattgagggactgtgtgataaagcccctgcctatctttttagcctcattttgtacctctccccttactcactgttctccagtgagtatttctccatatttctccttttctttaggtacaccaaatgtttgaccacctcactttatattccttctgctgggagcagttttccctgtctcttcacatagctggctccttattcttcacgtctcattctaacttcttagggtggggcttctcccaagttagtctgtcgtattgttctttttatttcttccatagtacttaccataatcaattcttacttgttataaggcatatttttcctcattagaacacatgttgaatgatggcaggggatttatctatcctgcttactatatttcttttcttttaagagatgggtcttgttaagttacccaggctggtcctgaactcctgggctcaagtaatcctctcagcttggcctcccaaagtgttgggatgataggcatgagccagtgtgctcagccatgctcgttataatatttctaatgcctacagagtgtgtggtacagaatgagtgctaaataaaaatttctcgaatgagggagtgactgaatgaatgaatgatctatcttttaggtagttcctttttttttctttttagcattgctgctaactttgaaattttatatatttttgaaaggcagacctaatcttcacttggtattcttagatatgtctttagtgtactctatctggtagtaatctgtaagagaaaagagcttgcctttgacatggtccccagttttgtaattattacctttttgacccggtgtaagaatctttgtgtctaaacaaatttgtcatagatatagttatcttgtatcatctttttaagttttgaagtccaaagtaataattttttaatcccaacactttgggagaccaaggcaggaggatcacgtgagccccaggagtttgagaccagccttggccacataaggagtttttctacaaaaaaattttaaaaatatctgggcctggtggtgcatgcctatagtcccagctacttgggaggctgtggtgggagggttgcttgagcctcagaggtcgaggatgaaatgaactgtgatcatgtccctgcactccagcctgggtgacagagagagagagagagaccctatcttgaaaaaacaaagtaataacttaggccttgatcaaggattttagcacctaatgtttgctaagcttagctgtctggtgcagaaatacaagacataaatattatttcgtagacagttattatttccttactgtgaatttagcagaatttatagaagtcttttgggtagtaagctttggttaaattatttgtttttaaaaaatcgcagttcatgaaacatttctacttattaaatacaatgtgaatactatatctattcttgctactggtcataattgttagccctctcccatgcctcttctcctcccctgaatataacatgcgtattagaaggtttctttgtgttggatgctgctcatgaaccatatgttaagaggttgtcatattcatgtatttaagccccattgtgtgttgtgatttcatgacttttatatctaaaaaaaccatattgtagatgttctttagcttgaaacacgagtgctttgaaattttccctttacctttctatttgtgcattcagtaaatactacacatctgttttaggctactagtttaatagatgatgtgatgcatttctgtgatgtgtctggttgctgatttttttgttaatgtttttaatagtgaaatttctggttcatgcttacctggtgagttggtaagtcgttattggcagctcaggatagtaagtttaaaccagatttacaaagaatttttgctgcctaagtttttttagacatcaaaaaattgaatatttttaggctatctaattatggagagcattaatccagtaatttcttttagaagacgtgaacgatcaagagagagggaccatagtagatcacgagaaaagagtcgacgtcataaatcccgtagtagagaccgtcatgacgattattacagagagagaagcagagaacgagagaggcaccgggatcgtgaccgagaccgtgaccgagagcgtgaccgagagcgcgaatatcgtcatcgttagaaggtgggtattccttgttccctgttaaatgtgtgtgtattcttaacagtaactataactccaaggctactgtttatacagtatatacctacattttaaatggtccaactacttgtgaatttaatcttctggaaacatctgaaacaaattataggtaagtaatgacaggtaaaaattttgaccctttatcttatgaatattttattgctgagttatcactttcaggtttcaaatagttaatggtcttaacaaagcaaggaaataatcaagaggactcattgtgtacttctaaaatctaaaaattggggttcttgtatcacatacataggttgcatgcaatttaaaatacaaaacacagggagttatttcacatatatgttatgtgtttggatttttaaaaataaatggaaagttactatttttgaactagttttatttgtccctaaaaatttatgagaaaatctaacacaataatagtttataatacaggagggtgttttctcaacattcaaagagaattttcctttaaaaaaaaaatttttttttttagaagagacactatcctgacatctgctttttgtttttaaaagaaacagtatcctttaatttgcaaagaagatgtaaaagttaatcaattaaaatgggtttagggtgcactgatttatatctaaaaattttaaattgtgtcaagccatatacccaagtttagaataccttgaaataattttctttgatgtttcattcataaatcataatcattgtctttttttctgtattttaaaactttcttgtgtacatttttcatgaagtgggaagagttgtctgtttatgcttcattttcacatgtaattttattttttatatttgttaatagcatttattcatgtgaagagctgggggagggcactataaggcttatgcatgtgacacaaaggttattctgtaaattaaaatattttttctttatatgttggttggcatattcaaattaaattaaggctaaacaaacccctcataggtaaatactctttatgtgattattttcagtaatcatgggaaacttactgaaaattcagtcatggtaattgttagtatttaaattgttatgggcaaaattaaaggttttatcaagtgtatgtaattctgtgacagaataccaatttctttaaccataacagatacgcaaatgaagtccttaaatgcctagaaaataagcatgctatttttatggaacacagatataagctcctacactatttacaattttaagggctttttgagttaaaaggctggttttgatactttgcattttgaatatgcagattgaatatcaaaactttaatttgtagttttccatgtattacaaaatttaatataaatctcaaaacattcttttaatatgaggcaaaaaaaccttttacttttaaaactaagcttattgaaattgatattgtttttgaatgtaaaaattgaatgttgtattatgtaaatctaaacactaaattttaaagatgtagcacttttttcccctgagttaaatacatctgatcccatcttaatgaaaaaattctcaatatccatcagttgcttaaactggattgtgactgggttattagttgaaatgcttacctatgtcagtcatttccattatagaagggtacaggttctgtaagttacctatttttttggactttataagttatcagcaagcttcttgttagtaaaggcatgataatgaaacttgaattcatctacaaaattggatgtgcccatcaaggggcctctaaaccaatttaagcccaaagttaactaattacaatttctactggttttagtaaaactagcatagtcaaccaagtaaacaaagtccattgttaatcttatttgagttagctaacattacattctagtaatgggtacacctaaatatatcatgacttgagtttcattacattcagacataaactacaaattcctaatgtgcaaactattgttgacatttttcttaatcactgatgtaccataccagaatttccatgttttgtttgtacattaatcagaattgagttgtaatactgtatgtgccttcatccaagaaaaattttacataagcatttctagtgcaaaaaattctgttatcctggattattgtacgtttgctatatcaaacagtattgtggatgtagacttgaataaaggggtggggactgggattaaatatattcaagtaaatctttaaaacaaaagctatctgcaaatttgatcaccatcataataaggtctgttgacctttttagaagttttaaaatatgagtccttttgagctttcatgtaaatcttaaatggaccaaatggactgagtgatttgaaagctaaagtgaatgtcactagtaaggctgtatacaaataaaatactaatgtaatctattaaagtgatgatgaatggctaaaagggcaagttcttaactttttaactggaaacgtaatgatcttggcaagctgttaatgtctgtcccatcttaatttttttttgtgtttgaactgttggtaatgttaattgcattctctcattttaaaatgtattggtttttctaaaagtattcaatatctaagttcaaatagataatattttaatgagaaaataccaatattgtaaatttcagtatgtaaatacgttgtgcttcatattctgtaatttctacctctattctcagaccactctgagcaaaataaaagtagttcagtgctttacgattgtacattttttactgaaataattttagtttcatagttgagttacttaaaaggttacgttcctcttgtcacttctttggaacatccctactcagcaaatttgtgttaacaattcagcttttctttgtttactgaaaccaaattatgtttttttaaaatactctttattcaggcttttcctctctctattttatgaggttttacaattctcaaatcatccatgacaatttttaagcattgggtatggggtctggattaaataacttgcctttgctatctgattactttttttttttttttttttttgagatggagtcttgctcttgttgcccagtctagagtgcagtggcacaatctcagctcaccacaaccttcacctcctgggttcaagcaattctcctgccttagcctccggagtagctaggattacaggcatgtggcaccacgcccggctaattttgtagttttagtagagatggggtttctccatgttggtcaggctggtctcaaactcccgacgtcaggtgatccacccatctctgcctcccaaagtgctgggattgattacaggcgtgagccaccgcgcccagtctagtctgattacttttttcctaccttaaatatcatgatcttaggatcttagattttgttattgcccaagatttaggatgctttgcattgtgtattcagcttattagctttgtgttaattttgaaaaaaaaaaaaaaagccaaaagaataaaaaaaattcttacatgttaaagatgtttcattttcttcttagtgttgctttgaggcttatgtgaaaattaaattctcttaattacctggtgaatgatactggttataataagattttaaaattgtttctgcagctcttaggttatctgaggtctgcgttatagctcccagccctgtttccttgttttcccatgtatcctaactgctctgcttcatctggatatgtatgctagctttcattgctttagctctgatttttctttgagtattcacaaaacctgtctcactacacagctgacttaattgaagttacaagagggagtaggaagtgatcccttgaatggatgtatagtgtgttttgctcactgtggtttaagaatatagttttgtttacaaatgattaatgttccctgttgaaaaaaaattcaatgccagtgtgagtcatcttgctctctcaccgtcatctcagtgttaaatttactaccattgttttagtttgtaaaatagattgttttgagtaaattctgtcttgaatgaatatttagttaacgttgtttaaagaaacctaataaccaaaaaggggtaagggtgccatttatgctatccaaattttatgaatttgtggtagcatgttttgactctccatgaattataaataacaggttattttgagatgttcattttgtaaatcttttgggaacaaacctcatttttctttgaatgtgattaagtttatttctattttactgggttgtaagagcaattatgtatgtgttttatagagtaataaaatgctttacttaaaatgaggtaagtactatgtacagaggtagaagaaaatatgaaatgttttggtagcaagaacttcttgtaaatatctacaataactagaattgtttttatgtaatatgttctagtcaacacaagaaggaattttgattttagagttaactcatatgtagataattatttctcttgcccacctcatttccattcctcttattaaggagaaattttcagatagagaaaagtgaattttatttcgttgagttagtagtgcatctctaaaattatgagaatccttttaattcagtatattaatgtgaaaatctataaaagtgccctgtcaagtatttatttaaatcttaaaagatgaatttaccatgaatttaaaatactaattctaacaaatgtgcatagataaatttctaacagaaacagttataatttgagttgttaataatggcttgatatagtatcttaaaatacaagtacttctctgtgtgttgaaattttacttagtgctcactttagtttacagactttattaaaaaggtgtagattccatttatcatcttagttgttttaacatctgtttacataggcctttcttttataattaatagctaaagcaagtaattgtgtggctttgacattacagattttaccaaatgatacattgaaaacatggacgttgaatgtatttgtcacttttaagcttctttttgatatctttgttgatgtagttgcctacttagacatttgagagtataatatggaattggattattggaaatgggttgtattgccttcaaattcactttcgtttaagactgtaaaatttgtatttccaagtgcataaaatgtaaagtgtttagaaatagaaataaaaactgctagactatcccccatattttatgtctgtatggtgaaaattagatttattaatagaaaagatctatctataaagtataatcaaacaaaagagtgcattagtcctgggaaaagatgtgtgttgcaattttacaaatgggattctctatataaaaatagtataattctccactggagtgataatgacacaaagatgcagtgtatgtgatatgttttatggaagagttgaatatttttgttttgctatgactttaaatagtttttccctcttaatgactttttatcccttccagcgcaacagaaaatttagggagatagcattcttttgcagttagatttattaatttcccagtaattattatttcaggttagaacatatgccttgtctctctctaatacataaacctgttttttaatagtgtagtgcagataataaaaataaaacatttgaaagctgccattttgtattttttccccattaaatagtttcactaaatagcttcatcaacataagatgaagatgcaataaaagataacaatagtaatggctgaagttatctgaaagatacaggcatatagaaactatatatataaaagagaagtctggattgtatttttttttcttttgcagttttaaaattttaagttattactgctaggcagtgtgaatgcatatatgtactgatgctcttaagatacaacctaggaaaggacataatagaaaaatttatagcagtggcagaagtaactcttaattgtagagcaaaaagtatttttcagttatttttatttcaaaatatcactaaactgtgccctatgaacatgttcaaactgaaaaaaaattttaaaaaaccttctgccctcttgactcttaaatcactttattattgaagtggtttcttgtcatttatactttcattaccgactgtttcagtggttacttatatccaagttaattgaatgtttcttgtgaacctctacctgaagtttgcatatatatgtattctttaaattttagtttatcaactttattctattttttttcttttatgtgagttttaaatgaactttatcattgtagattcccacttagcttgttttggttagtttataatactacgttaggtatttctatataggtggaatagactaaaagtaaagtaaatgttttaaatttgtattacgtctaaagatttgtacgtggatgtcattaatttaaatgtccatactctatttataaatcttacttacaaattttgtaacatggaacaccatttgatttataatacttgcagaagttcctgtatgctgttaaataaattaatttgtaaaataattttgcattttatatttagttcagcatttaattgttaaatgagtttatagacttgatatgtgggtgaatgaaaaatatttacataaaaatcatccaagcattttccatttatttttgtagtatgcatattttagaaaatgacttatgaatgtttccatcatcacagaaacagtagctgctatgttttcattactgcttcagtcattaaatttataaggcaataatatttaagaagaatgaaatcagaatgtctcagtttaatcatcaggtaaattggaacatttcaccaccacaaaggcagctactgtttcagttaattcttattttgtgttagaatacataacagtgaagtagatgcacgacttgtgtatgtatagttaagccagcgtttttctgtgtattttggggaatagcaaaatctacatcacaaattttgacacattacagctgaaggaagaggatcaccttccaagacaaaacagtcttcatgggggaaaaatgacgcttgtccagcagtttgcttcttgtgattgaactgaacctgtaaggattcatggataaaatgaacaggaatagatctgaataaagcaaatctgcataaatggtaaccagtagctctacttttattttttatgttgcttaactgttttatttgaaggaaacctgtgtgatttaaaaagttatagcttttgcaactttattactggttatatacatttggccattatgatgtgcaagcaattggaaaaaaagtcaagtaaatgcttgtttttgtagtagtttgttcttgttaaaaatgtttatatgataatgtctgtaaacagcatcactttgattacaatagatgtagtgttgtaataaactgtttaatggggctgatgtgtaaagctgttcaagttatttgatgtttacacctcagggaaagtcttgtgttcagcaatatctaaagataatgttactatgacaacatttttactgtcctttaaagcattgcaatagcgtttttggatatgcctcaatctaatcttgcgttcagtgaattaaacatagtaattaagtgtcttttgcccttgattttgatattagaataggtgattacatggatatttaatatttctatattctgcttttctagctgtttttacctagttagcttgtgactttgctgaatggtatgtaaacttgtaaaaatagagatttgacagacatagcaatctagtcaatgtgtaaggggtcaaaaaaacagaggttttaacacataagtaaaaacccgtacatatttgatgtgtaatgcaggttaattacaacacagatgtaccgaaacacttaattgtgaaccgctaacattgaagaaattttgacaattccgatttgatgctgcaattacttgctgtttttattgatcttatggtttatttcttaagccatagtcagtgtaaatacagccctgcagcaggtaaatgtgagtaaagagagccttatattttccaattggtataaatttttgaaggatgtgatgttcattaacattcggttgtattccccagtatttgtaatgggaaattacagataaaccgtgtctgcacagtttaaggaatactatgtatattcatgcaccgtattgattcatgctatagttacttaatcaaagatttttttcaaacctgccttacatataggcccactttaaaagcacctgactagcatgtgttcttgattgcaaaattggcagaggcagggtgtcaacttgattaggtgtttttatgggaatgtaatttgaaatcactacttcagaaatttgacttaaaattcttgagcacgttaatatgtttttaagatctgattatctttgagagatcttctgttaatacacattggttgttaaagagtacccaaattctaggacaatgcttaaagtgttaaaataccctagatactgtgttatgtgcaactgtagaaaccctccagaaatttccactgctgttcttcactttcatcttgtctgctatcaaaccacttctgacaaaattagctgttttgaattacccatatcactgccagttttattttaaaatattttgtgtttgaagtatctgtgcatgggatcgttgatgtttatcagaactgttcactttcagaaatgattttttaaagcattttgttgaaaatgcggttgcttttttaacattattttagagttgtatcaaaattttcctgttttctgtatattgttgtgtcatttcttggctttttaatattttgactacaatgccctaatgcgaagaagtatggacatataaatattacaagagaaattagttaatagtaaagggttaaaaggtaagtaaaatgtccatgaaaataaaattttctttgaacagtttaaaaatggaatcacaaaaatctaactgcacttgaaatgaaactggaaattttatactaattaaatcctttatttaccttttcatattttatcaatggaaccttttaattgctccttctatatcactcttctccttgcttggctgatctcattacatgactttcgttacagacagtgtgagtgtactagatttgtttgctgctaatccgttattttaagtgttgtcagaaggaaataacttcttggtttgaccaaggtaattttgcaaagtccttctctacctgataacacgtgaatgtatagcagtaaaggtgaaaattgcaggccttgttttgttcttcatacccccttcagttgtttatgggttaatgttatttgaaaactcttcctttttttaatgtgtaaaaacaatccaaagagataaatccttgcatagacaccaaaaacagtgtctcagagaccttttcattttttccttagttaataactgtagtggatgtgaaaacaaacgagttgaattttaaaacatagcatttattagtgctatacagtcacattcctttcagccagtagtaaagttaaacagatgagtgatacagtacctgaatggtactgcttctgaggcaacactttggattgaaagtgctgcttttggttaaaggaactatgttgtggaaagcatattccagtgtaaatttgcagatgtgtgttttttttttttgtcacttttcataaggtttggagtaagttgcagtggcttttgatcatagtttagcccatttaatggtccttttacctagaatgttcttaagcagttaatgacaatttggaatacacagataacttgtagcttaagatactattttcatttaattctcctgtggagaatattgctttattttttactagtttcaggtcagttattaaaataaacatggaggttttaatgaatgttgtataatattttatagtgaaggaaaattgtggaaagggcaaagactttctctttcccttatgtatttaactgtgccaatctaaatacatactgttttatacaatgagatgcattacaagacttttctgttggagtgctctcgacattttggttttcatacctgaatgatcattgcattttctgtattttctaaaatggctccaattttgtgttttaagcttcagcttaagaggaagtttatgttctaattcttgactgagaatacagtattgagattctctgttttacagataacaactggtttttattactcattaagttcatttgcatcccgtagccctctgtaaatgtttcccctagttgtatgtacgtaaatgcacgcttatccagtgtatattagacatttttgtgctaaaatatattaagtgggatttttgtagcaaagcattctatttttctgttcttacagtgtgtgtgtgtgtgtgtgtgtgtgtgtatgcgtttttttaaccttaacttcagtttaaacactggtgtatttatttttttaagcaacttgactcttagaagccttagactgattttttcaataaatattcaaccaaaaattataaatttattaagatgtggccttacatatggcattccttgtgttcgtaatgtgagatttttgatttagataaatcaagattcaggattaaagtttcattgtaagttgaaatagaaaatgtattaaaatgtctaggcttctgggaggaagttcttatactcttctttcttggcattagaaagaagcaatatgaatttttgtgaatattctaaatattcaggcaacactgttcagattgatttaggtttgtcttaaccaatgttctttttttagaatttcaggttgtggcattcactgagtatgcagctactatggtttttgtatgggacgtataaatacttgattatatacgacagattttaatgtctttaaagacttcctgctgtattaacatattgtaatggagtcttttaaatactaggttgaatttaattgaagtcacacacatcttgaagtggtaactgcatagtaaatactaccaagagtttttttcacgtgggagtatcctaaaactctgccatgggtgtaaatgttttacattaatttcataattggacagaccctgcatttagcgaaaacattttgttttgaaagtgtgttctttttgtcgcactgttactgcgtaacacttctcaacattctgtaagttaaattattttaaaataactatggtgaattcatgtttatttttttactttgaaaattgtagtactcaggtggtatttaatgggaaaggatcctttgggtataaatcataatgtattttaaggaatgcatctataacattgataactttagccttaaaaaaaaggtctattattccttcctctgcatcccatggtatattagcaaagtagtttacagccctgtacagccttacaaagttgttttacaatttttaatggaaagcccttaacaacaacaacaaaaaattgtatcattttaccaatatccacgaattactgatcacagtttgtaaataatttgtttaatatcagaaggccaaagaaagtcttaaaattttagctattgactctatggtgacttcacaataagatttctgtgcaaaaaggtaaggtgataattgatctaatagacttttttttttttttttttgctgtccatgagaattagacttcatattagcttcaattaaaaagctcattccattttattaaaatgtttgtaattgcaattttgtgtttaatgtttactttgtctttcctttctttagcatttaggtgactgttcggcagtttgatatatggccattgtcggccttaaactgcactagtaacaagcatggtatttatcttgtattgaaaataaaacaaacttttgataaga

SEQ ID NO: 1365 - DNA, 3943 bp, Homo sapiens
ggtcctccaggcccacctggtccaccaggtcctccacctcctggtcaggttctgcctcctcctctagctgggcctcctaatcgaggagatcgccctccaccaccagttctttttcctggacaaccttttgggcagcctccattgggtccacttcctcctggccctccacctccagttccaggctacggcccccctcctggcccaccacctccacaacagggaccacctccacctccaggcccctttccacctcgtccacccggtccacttgggccaccccttacactagctcctcctccgcatcttcctggaccacctccaggtgccccaccgccagctccgcatgtgaacccagctttctttcctccaccaactaacagtggcatgcctacatcagatagccgaggtccaccaccaacagatccatatgggcgacctccaccatatgataggggtgactatggcccccctggaaggtaagttagtgtgtatctgtgaaagtacttgatgataaaagataggaacaatgactgtaaatattagattgtaggtatataaatatgttatttctgccttccaagaagatgaggtgtttaagctgctaccctgttttagctgaaagatactggtataggagaatttttagatttgttctctttgttggaaaagtagcatgcttcaatatggaaaagtaactactatctctaaagcacatgtcagaagcagctagtatgaattgctatacactgttgtgactaactgaggaaatctgttgagtatgagttaaggtttatgtttttgttttacagggaaatggatactgcaagaacgccattgagtgaagctgaatttgaagaaatcatgaatagaaatagggcaatctcaagcagtgctatttcgagagctgtgtctgatgccagtgctggtttgtgtatttcttgtattaatatttcttatttatgttattaggaatgacctaaagatgtaagtacaatctagaagataggtcatttacatgtagtagttctttttatattcccaaatcattacctacgatttatttaaaaagcattgaaaaaagttgtgtgtcacagtgtagtggggaaaatccaaattttaagttatttggtatagatttaagtcttacccttgacatttaatggttcaggggcctcatgacaccttatttattcttatatttgcaaaatgataatgtgcttcacacacgtataataagttgagtcaatatcatgagcatgaaaggcttttgcaaatggtgaaacactggaagaagacattgtcttgcatagttattttatagcacagtacttttgtaaaatgccttatcactcttatcccaagtggtttgatggtgttttgaaaacaaaatttgtttgacttcaaaccctttcctttccctcacaggtgattatgggagtgctattgagacactggtaactgcaatttctttaattaaacaatccaaagtatctgctgatgatcgttgcaaagttcttattagttctttgcaagattgccttcatggaattgagtccaagtcttatggttctggatcaaggtaaaactttcctgtctcatttccatttaaaaaaactgttagtttacaaatggaaaaaatactgtgagactttaaaaggaggactttgcttttacttactgattatttagcagctggagtggtttttttttttaactctaaatgttagttgcttgcttaaaaccctttaaaggctcctactcagtcttaaagcaagactgtaaagattgagggactgtgtgataaagcccctgcctatctttttagcctcattttgtacctctccccttactcactgttctccagtgagtatttctccatatttctccttttctttaggtacaccaaatgtttgaccacctcactttatattccttctgctgggagcagttttccctgtctcttcacatagctggctccttattcttcacgtctcattctaacttcttagggtggggcttctcccaagttagtctgtcgtattgttctttttatttcttccatagtacttaccataatcaattcttacttgttataaggcatatttttcctcattagaacacatgttgaatgatggcaggggatttatctatcctgcttactatatttcttttcttttaagagatgggtcttgttaagttacccaggctggtcctgaactcctgggctcaagtaatcctctcagcttggcctcccaaagtgttgggatgataggcatgagccagtgtgctcagccatgctcgttataatatttctaatgcctacagagtgtgtggtacagaatgagtgctaaataaaaatttctcgaatgagggagtgactgaatgaatgaatgatctatcttttaggtagttcctttttttttctttttagcattgctgctaactttgaaattttatatatttttgaaaggcagacctaatcttcacttggtattcttagatatgtctttagtgtactctatctggtagtaatctgtaagagaaaagagcttgcctttgatatggtccccagttttgtaattattacctttttgacccggtgtaagaatctttgtgtctaaacaaatttgtcatagatatagttatcttgtatcatctttttaagttttgaagtccaaagtaataattttttaatcccaacactttgggagaccaaggcaggaggatcacgtgagccccaggagtttgagaccagccttggccacataaggagtttttctacaaaaaaattttaaaaatatctgggcctggtggtgcatgcctatagtcccagctacttgggaggctgtggtgggagggttgcttgagcctcagaggtcgaggatgaaatgaactgtgatcatgtccctgcactccagcctgggtgacagagagagagagagagaccctatcttgaaaaaacaaagtaataacttaggccttgatcaaggattttagcacctaatgtttgctaagcttagctgtctggtgcagaaatacaagacataaatattatttcgtagacagttattatttccttactgtgaatttagcagaatttatagaagtcttttgggtagtaagctttggttaaattatttgtttttaaaaaatcgcagttcatgaaacatttctacttattaaatacaatgtgaatactatatctattcttgctactggtcataattgttagccctctcccatgcctcttctcctcccctgaatataacatgcgtattagaaggtttctttgtgttggatgctgctcatgaaccatatgttaagaggttgtcatattcatgtatttaagccccattgtgtgttgtgatttcatgacttttatatctaaaaaaaccatattgtagatgttctttagcttgaaacacgagtgctttgaaattttccctttacctttctatttgtgcattcagtaaatactacacatctgttttaggctactagtttaatagatgatgtgatgcatttctgtgatgtgtctggttgctgatttttttgttaatgtttttaatagtgaaatttctggttcatgcttacctggtgagttggtaagtcgttattggcagctcaggatagtaagtttaaaccagatttacaaagaatttttgctgcctaagtttttttagacatcaaaaaattgaatatttttaggctatctaattatggagagcattaatccagtaatttcttttagaagacgtgaacgatcaagagagagggaccatagtagatcacgagaaaagagtcgacgtcataaatcccgtagtagagaccgtcatgacgattattacagagagagaagcagagaacgagagaggcaccgggatcgtgaccgagaccgtgaccgagagcgtgaccgagagcgcgaatatcgtcatcgttagaa

SEQ ID NO: 1366 - DNA, 115 bp, Homo sapiens
tttttttttgagatgaagtcttgctctgtcgcccaggctggagtgcaatggcacgatcttggctcactacaacctccgcctcccaggttcaagcgattctcctgcctcagcctcc

SEQ ID NO: 1367 - DNA, 283 bp, Homo sapiens
gtgtacttctaaaatctaaaaattggggttcttgtatcacatacataggttgcatgcaatttaaaatacaaaacacagggagttatttcacatatatgttatgtgtttggatttttaaaaataaatggaaagttactatttttgaactagttttatttgtccctaaaaatttatgagaaaatctaacacaataatagtttataatacaggagggtgttttctcaacattcaaagagaattttcctttaaaaaaaaaattttttttttagaagagacactatcc

SEQ ID NO: 1368 - DNA, 355 bp, Homo sapiens
tcttaaaaaaatcctttcaagatcatttttccttgtttcactttctagcttggcatcagagtagaatataaggtgggtgatttcactgtaagaagtgtgtgtacacggaaagatggaaaatatctctaggcattgtaatatttttttattaaagttttcgtttcaataatttttcttaagcataaattgagctagttaaatttgtaaggatatacttcattgtagttggtagtgtaacatttaccatacgggtttaatttaaagacaaagacttggtgtatgctctatgcgtttaaagtataatcttggcatataaaagttaaaatatcttattagtgaagtgttttttttttct

SEQ ID NO: 1369 - DNA, 12718 bp, Homo sapiens
aaagtcagagtactgggagaacagaagacttcacaatttaatgcctcagtttttaaaaaaggatccttacacttcatgtctcctagccatcagaagaggaatgagacagcaaaagttcaaatggcctgtttcaagtttctgatataaaacgatgacattttcaggaaaatcctggtaagtaaactgaatcattaaacctttatttgttatgcttttgaggcgacagctattttttaaaacttcagctgtactttttatataaatatatgtttgtacataaacgattacttataaaaatactagagtaattagaaaaatcaatggattaaatacatgtcagtatatttaactgataataactttgtaagtgctcttctaaaaagaaacataccattaagtgtaattaggatagtgggagggtttctgattgtggcaggcaggctttggaaaagaggatagagaaacgatgcaaacagggtcaggaatttaagcactgaagattctaaaggaacgtgtgatcttgtgtaattacacaaaattctgtcttcataacgtaagatgttattaaaacttttacattttatcaaagttaatactctgcagaggctaaatattattctattaaagtatttcattcacatacatcttatccagcaatctggttgaaaactaagaaaaaaaatgcaaagtgttcttcaggaaaacgaaactaacttgcttgtgtggcttctgtctgccagactatgcaaggagggtgtgggtagctctcctgggctacagccagattctgaagtgtgtttcccctacatcagttctaagaatcctgcagagcagaacacctccctagggcatggatatcagcggtgttgctgagggtctctcaaagatggggtgggcttgtccctgagagtttgctgacttggaaattcttgctgagcatcaaagagagaaaactgaagtgttgaggatgccaacctgcaactcctttgtcaataaccaacgttgctaaagataatatttgtcttcacaattgtttcaaaacaggacactgagggcccctagaaagccaagacttaagtcaaggcaatcacaaaatttgtccacactaatcatggtcattttgattgttacttagttccaacagcatacatccagatgctcttaaaattgtactggctaaaacgaaagaaaaaatctggagtctgttttttccatctttagcatttccagagagagactggctggttaaatttctgaaagaggacaccagctaaaagaaggtattgcatctcacccgagcagactgtgtctgtggaaagtgtaagccccttgccagaagagcagcttcccagcaaaggcagagggtgaaaacagcaaaggtcttaagacactggggacctagagtcaaaagggacctcctccagggaaaacgctgtgtgagaaatggcctcattcggtgactgtgagtgacacagcagaaagttggtaaggtgtagtctgtaactagggtatctacaaaaactgcaggagaaaatatattcatttgttttgctttccttttgaaaaaaaaacttccttttcattatttgtgaccagatgatagaagctggagttcattctggcctaacgggtagcacagtaaagagatttccccagatttctacctggagttccagccaagcgaaataatttccctaggaaaatgaggaagtcctttgacccacagacactggtagctcaaggcctttcaaatattcattacttttaactactctaagaaaatgtgttactcatttaacagatttttgttaagaagctattatgtgctaggcaatgccagataatgaacaaaatgtaaagaaatttgtccttatggagtgcatagaataatgggttggacagaaaataaataggttaaaatatataaaatatttgctgcttgtaagtcctaagtagataaaaaatgaagccagaagagggataggaaatgttgggaggtgggataaagttttcagtaggctggccaaacagtgccttgctgagaaggtgacatttgacaaaagatctcaacaaagtgaaagagtgagccctgctggtatccagggacattccaggaagggaaaacaagtgtagtggctggaaacaggggcaggtgcttccttcaggaagcaacgaggaggtcaggggactgggccagatttagagggaaaaataaaagacctaatatcagaggattagcagggtaccagattgtgtgaggccttgtcagatggaaagccacagacagggttggacacaacattgatatgatgtttacattttaacagggtcattccggctgcttttttgagaagtccctgaagagatcaataacagcaagagggaacctggcaaggaagctattcctataatccaggaaagagatgaggaaggcttggaccaggtggtagtggtgtcaggtagtcaaatgctgggtatattttgaagatacaccccataggatttgctccacattgaatgtggaatgctggaagagagataaagtgtacctgtcacatactttttgagttttatttattttcttagaagtaagtacacaaagagatgctacctaggagaagggtattcttttcactattctttcaaattttctgtatgttcaaacattttcatagtagaaagttggggggaaaatctgtttcataaacatttcctcagcagcagtccagtctattgcattttaattggttgtgatatcattgttttatgcaatacgttctcaacaagtatatcctccggcaaactgaacaaggaccaagtctgttctgcctacagctctgcttcctcatagctgctttccagaacgtgactcttgcaaattatcaagaaaggggaactaatctaagggatccagatcaaacagcctcatgaagacttattttatgtttctaatataaagatagaagttttcagaaaagccctggtaagtttctaatcattaaagtcttgtttaatcaactctctttaaaagctatctttaaaaactaattataaaaagtaaaacagaactttgaaaatgaacatacttgcaagtgtgcataagctatttcttatgaaaccattttaaaaggaatgagaaatatcactatttttatatgagaatcaatagatgtaacttgtgctgattgcagaatttttaaacaagaaactttccagcaagcatggtgacggtgcagcatatttctagaggtggaaagctctggggtgaggctaaaaaacctgggtaaaacatagaccaggagatcaggaatccaagcatacaaaaccatgtagaaaattgtagccatgtgcagctatgccatactctgtcctataagttacatttaattaaagaataaaatcctccaaggtttagccatcattttatgtaagacttttatgcacatctagcttgtatagagactatgggaggaaatacataatttgaacttgcacttcaagaaaataaaactaacttttgctttgcgatttcagctacacagaggatcagagcaggggtgggcctgctgggctgcagctgggattctgagcatcctttcccggaggcacggaaagtgagtgagtgagcccagtgaggtgagtgagcccagtgaggcccagcctcctagacatgatggtgagcaccagagcttgccaagggcaggccagtttgatccttcctgcttagtccctaaagagagaaaaataatagtccttaggcagtagatcctaaaatttattatctgtaggggatccattccaggacctgcgcagataccaaaacctgtacatgctcaaatccctaatgtgaaatggcaaggtatttgcatataacctatacacatcctcccgtgtactttgagtcatctctagattagttataatgcctaatacaatgtaatattatatagttgttataccgtatttattgtttagggaatagtgacaataaaaacaagtctttacattttcagtacagatgcaatttttttttcaaatattttcaatctgtggttgattgaacccacagatgtggtacccactgatagggagggcccagtgtacaaataaagagaactctgtgtttcaaaattatcccagaacagaatagagttaaggtgaaggtcttctgcccagctccaaccagagcagctacacctttatccatgttagatacagtggtttcaggtgcatttatttgaagaagcagaacaaaaacaagcaatagctaagacaacactagttctggtccaattttcctatattataagtgggaaaacaggctcactgagaggagacataatttaatcgtgacatcatttttctgatcacaactcctccacctttatacacactgtgtagcttcttgctaaacatgaaagccctcatgtttaaaactatgcctgcagtctagggtgtaaggtttaagtcacagaaagagccaaagggttatgtcaaagcattattaaagacttttgcccaaatcactgtcacctgaattaaataacagttccaactacctatggattatagatcatataagatgcttataattgacagagggcaaaattcacatgaaagtaatattgaatacataatagcttcaagttgttaaatatattctcagctaccaatgggaaatggtggaattctggctgagaaatatttttatgttatatgttatcatactaacacatgatgtagtaacagaagaaaagtgaagaagcaggtcggtaggtagatgtggtttcaggagtttggagaagctctctttggattccttcaattctgctggtttaaacaggaagcaaggtgaccgtggtgaggaggtgttgtaggtttgatgagagaggagaaacaatgaaatgatcatttaggagaataaaagagtgattaaagcagagaaatagagcatggtagctgagagcattaaggtgggaccagttatggtatggagggccactgtccagccatgttccagtcagggtgtgaagggccattgtccagtatactccagtcagggtgtggagggccattgtccagccatgttccagtcagggtgtggagtctttatctttgaaccattgggaaacctctaagacaaggtaaagataaaaagactcgaggcttgaggagcacagatgccagtcaccctatttgagaagggtgtttctatctccatggtagttcctgacagaagtcaatcaataaagaagaaagtgagggaaagctgtcatgctgtcaggtaacacaaagacacaaagacaatccctctgctatcccccacgcaaccacccggcaaacacagtgtctctgggcatgtaatggttgctaagcaggaaattcctaaaacgctgcttcttgtagagcgctggtgtctataagaattgctgtagccacagaagggaaaaatctagagttcttccttatagtatttggggtgacccaaagaaaggatgggtagcttgaattactgagagaggacactggctaggagaagatactgcctcacacctaaacagagccactctatggtgacagtaagagcatctccagaggagggtttgttgcctaaagcagcaacagcagttaaaacagtggaaggtgaccctgaagccctggggttctggcttactgaggacctagggtagaaagagatctcctccagggaaaaccctatctgagaaaaatgctcactcagggactgtgagacaccaaaacctgaggagaagtgttagaaaactggagcttacaataggacatcaagtctctgtaatttgcctgttagatgaagaataaaatgtttactgacttttctttctgaaaagtaaactcttttcttactaattatgactggctaatccagatgctggagttggttttggtctcatcgatgacaacatgaagatatttcccaaatacaattcaattgtttcactaatctaaaaatgttaatttcctcattcaacaaatatttattgagtgcttattttatgtcaggccctggtgattcatgcatgaatgacaggcaaaaatgtctgttctcatggaggttatattccagttgctgacacagaatgagaaatataattaagtgaaatgtatagtacataaatctaaagtgaaaacttgaagcagggaagagcaatggaaagtgctggaggaaggactgaaattttaagaaagatgagcaagaaaggccttattgaatttgagtaaagagctaaaaaggtgagggtgtgagctgtgttggcatctggaggaagagcattccaagcagagggaacaggtagtgcaaaggcctcgtgtagctgcatggctgccatgtttgaggaacagtaagacaactgggcagctggagggaagtgagcagaagtaatgaggtcaaaaagacagtggggtggacatatcatgtcagaccttatttaaggactttggcttttactccatgcgagatgagaagtcagataaaagttttgagcagaggacactgactaagagtcagtgacatgatcacacttacacttttgaacaggaccaggttggctgttgtgttgaaaatagagtgaatggcatggtggtggggcaaagccagagtcaaagagaccaggtaacaaaaataatccaggaaagagatgatggcctagaacagggtggtagcagtagggatagtgggaaagggtggaattatggatatactgtgaaggtgtgattgaaagtatttgctaatacaatgagtgaaaaaaaaagcagtaaaaaatgctgccaaggtttttgccttgaacaattgacaagttccattaactgataagactgtaggaggagcaagtttggagtgggaggggcatatatcaggagatcaattttggccatgttcgttttaggactgtcatatacctaggtgaacatagagaaggcagatatatggacatcatggcagaagccagggccgatcatgttaatttggaagtcacaggcatacagattgcgtttaaatgcaagatagatgagattcatagggagaaactctagataaaactctagatagaaaagaggctaggtctgagaggcacgtcaacatttagaggtggagagttaaggaagaaccagcagaggaaactgagaaggactagccagaaaaggaggaggaaaaatcaggaaaggtagtgtcccaaaagcctgcaaggagagtgatccaaggaaaagagagcaatcacttgtttcaagtgctgctgttctgtcaagaactgtctgtagcaataccaagtgcaattttagtggaggagtgaggccaaagcctgattggagtgccttctaaagtgagtggaagaagagaaacaggaaacagaaagtgtagacagatctactgtgaagaaaagcacaaatgtggggaagagttgtttccaaagagtcttgcttaacatgaaaaaaataaacatgcttgattgctgaaggagatctagtagatgaggaaagactgaagaagccaaatagagtggggacactttctggagcaacttcctgaataggtgagagggatgcaagggctactgcaagtggagaggttgacctcactaggcatgtgggcagaacatgcagagaacagaaactaacatatgatgtagtaacagaagaaaagtgaagacgcaggttgatgggtagatgtggtttcaggagtttggagaagctctctttggattccttcaattctgccggtttaaatgggaaacaaggtgaccgtggtgaggaggtgttgtaagtttgatgagagaggagagacagtgaaatgattgtttaggagaataagagagtgactactgcaagtgaagaggttgactaacgcagagaaataaagcatggtagctgacagcattaaggtgagaccagtcatggtatggagggccattgtccagccatgttccagtcagggtgtggagggccattgtccagcaattctccagtcagggtatggagggccactgtccagcatgctccagttagggtgtggagggtcattgtccagccatgttccagtcagggtgtggagggccattgtccagcatgctccagtcagagtatgaagggccattgttcagcatgctccagtcagtgtggaggcccattgtccaaccatgttccagtcagggtatggagggccattgtccagcatgctccagtcagggtgcagagggccattgtccagccatgttccagtcagggtatggagggccattctccagccatgctctgacaagctgttggggactgagtggggactgagtggggactgagtggtggatgtaactagcattgtagtttaactataagagtgtaccagagaggagaaaaataagtcatgataatgaataatcaaagaaatattaagtcagtaaaagaggaaaagtgaaacatgaatggagtgaggaaaagtgagacagtagtagaatcaatagatcaaaggtgttggtggtaaagaaatacttactagtgtttgagcactaaaggcagtgggtctgaggggcaggagatggtggggacagggaagtgtttgaaacagagaggacggagggcttgtagttctcagtaaccgtatttattggctagagctgccataacaaagtagcacagagtcacttcaacaacagaaatgtattatctcagaacccttgcaactagaagtccaagatcaagctattggcagggagggttccttctgagggctgcaagggagaatttcttccatgcctctcacagtagcatgctggcaatctttggtgattcttggcttgtagaaacatcacactaacctctgccttcgtcttcacatactgttctcccggtgtgtaagcaagcctctgtgcccaagtttccccttttcacaaaaacctcagtcatattggattagggtccactataacttcatgtcaactaattacatctacaacaatcctgtctccaaataaagtcacattctaaggtgctggaggttaggacttcagtgcctgaactttggcgcgatataattcaatccataatagtaatgataaggtcaaggatatgaccgtgggaatagaggtgggttgatgtcaagataaaagtcgatcgggtgagaggccattgtattggaaggatcaatgacatgtctattgagccaccaataattatgacagaaatggtatctgaggacacaagtgtcctcttcccttcagcttcctacattttaatacaaaatgtatttaatacaaaatatattaaaatgtctaaaaactgtataaaatatataaaaagtaagtattcagcaaattttcaaagtatgaaatatcttaagactaagatttaaaatactatggtagttatctcatatgtaatgacttcaaaaaagttttcattaaggatatgtttattaataactgcttatactattggttttatataatgcttgtaaaaaggtgaggcagggcccctctgtcggtcttacctgagatgacacttagggcctcggcagagagatgggaatatcagggatgagcctaccgggctcccaagctccatctgccctggagtactctatggcaggcccagtgccctggctctgggtgcaagagtaggagctgcccactgctggaacagcgctatgtcataccccttagacccactaaaggggcctttggcaggtccaccaagtagactatttcttattccctaactctgtcccccaggctttctccctcaattgcctcccacatgactccagcagttcccttaacttcacctgcccaatgttcccactctcttcttcctcatatatcctaggcctagactccttcttgtgtctgacaaaaagcactaccacactttgtcagtacaaacttttctgagtgtgtgtgtgtgtgtgtgacttatttcctttttttatcttctccaatggacaataaatgtcatgaacgagcttcacatctgttttgattatcactgtttttcctgagcatgatgcctggtacataattggtgctcattaaatatgtgtagaatgaatgaacagatgacactacttaagataaataacacttatcgctagttacaatatatgggctaatttttgtgggactccttaagacccacaagtgacttctgtctacactacagatgaactgaattgatcatctaaaatacgtttatagcgttcattgtgccagttgctcatggttctgctaattggcccaggactagttgtgatctgcagactgaagccagagtaagtaagagaattcaaggcactaagacaaccaggaacagttttaccaaggcaagtggaagctgctaggctcagtggttgcatgcctatagatggggtaaatcatcctggtgcaaatatggtattcacaccataaatgtgtagtgcaagtttcctctgtggccaatcacagggctgcaagctgaagccccagtttagcttattctccatacataacttcaaggggactttctggtgaacttttccaagaagctccaagcacagatggttcaaatttgcagtttggctagactttgtgactggatgtacattaaattaaaaaaaaaaaaaaaaaaaaaacttaggttccttaaacctaaggaacctaaaaattacaaatcatttaaaacagcagtccccaatctttttggaaccagggaccagcttcatgggagacaatttttccacagggtagtgggggatggttttgagtttattcaagggcattacattttgtgtgcactttatttctattattattacattgtaaaatataatgaaattattatacaactcaccataatgtagactcagtgggagccctgagcttgttttcctgcaactagatggtcccatttggggtgatgggacagagtgactgatcatcaggcattagattctcataaggagtgtgcagcctggatcccttatatgcacagttcacaacaaggttttcactcctatgagaaactaatgccaccactgatctgatgggatgtggagctcaggcagtaatgcaagatatggtgagaggctgtaaatacagatgaagctttgccagctcacccatcagccagtcacctcttgctgtgcagcccagtttctaacaggctagagactggtactggtccaggtccccagatttggagacccctagtttaaaatgcttgtattttatctttttatagtttagtgtttttgtttcatttgatccttaatgttttttttgtctgtccgtaaaatattctttctgattttctgtttacttaaaccaattaattgatttatcttttaaattctgattcagtaggtctaagtgggggcctgagaatttacatttctagccagcttctaagtgatgctgatgctgctagtttggagaccacaccttaagaaccactgctgttggtcttgtctgcacagtagatgcaccaaggcaaatgtttagaagtactaatgcctgaaaacaccaccctcactccctcaaccaactaatgcagtctcaggtgtggaatgccaagtaattctaatgtttaaccaaggttaagaacccctgttctaggagtccaaaataggcagctcttgccattcatcaaagtacatagttgtaggatcttcattagcctcatatcaataatttaggtgaaaatggctctaacaaaattaaaaactcatactattttccctatctagtttcagggagcccagcttgaattatagctagtctcttttggtaccttctgagaacacaagaattagccaatcaaatcaattatcctgacattttgctaccacattcccccaaaccctagccttgtggcctaacagcttgagttccaaaagaaaacagattatttaaccaactgctctgttactatgtaacaaagatagccagctgtggattcctgttcctcaacccacttctacctatccagtttcattattttaaagtttatttgcaatattcctatatgctacggaaaccaatttctatgttacttaagattctgcttttaagtcacaaaaccccaactttcaccaagttaagctaaaagggagaattattataaggctaaaaggtgtgtcaccagttagcagctatagcttatttcataattacaattagagtcacctaagaaacaagggtatgaattaggatggtaaaatagctaaagtaagtatcaagcagttttaagagtcagcctttagcaatattatacatatatatatgtatcttctgtatgataatgtatacataattgtctatgtgattttaaaaataaagtataattctaaaatacttattatattgctttgtctcaggaagaagttgaagctttgatatgagtaaacaagtatctctacctgaaatgattaaagactggaccaaagagcatgtgaaaaaatgggtaaatgaagaccttaagattaatgagcaatacgggcaaattctgctcagtgaagaagtaacaggattagtcctgcaggaattaactgagaaggaccttgtagaaatggggctaccatggggtccagcacttttgataaaacgttcatacaacaaattgaatagtaagtcccctgaaagtgacaatcatgatccgggacaattagataattcaaaaccgtccaaaacagaacaccagaaaaatccaaaacacacca

SEQ ID NO: 1370 - DNA, 644 bp, Homo sapiens
gtgagatcaatgaagccaagaagtgtattcgggagccaaggtttgtggaagtccttctgcagaacaatacaccatctgacagatttgtcattgaagttgatactattccaaaacactctatatgtaatgataagtatttctacattcagatgcaaatttgtaaagataaaatatggaaacaaaaccaaaatctttcactgtttgtaagagaaggggctagctctagggatatcctggccaattccaagcaacgggatgtagatttcaaggcatttttacaaaatttaaagtcactggtagcatctagaaaagaggctgaagaagagtatggaatgaaggcaatgaagaaggagagtgaaggactaaagctggttaaacttctcataggaaaccgagactcactggataattcatactatgactggtacattcttgtaacaaataaatgccatccaaaccaaataaagcacttagattttttaaaagaaattaaatggtttgctgtgttggagtttgatcctgaatctatgatcaatggagtggtcaaagcttacaaagaaagtcgggtggcaaaccttcactttccaaatcaatatgaagacaagacaactaacatgtgggagaagatttctactcttaatctt

SEQ ID NO: 1371 - DNA, 267 bp, Homo sapiens
cggttcacgcacgatcatcgccagctcatggctactggtggtcgccacttcgccatacactttgtcgatcgcttcggcgtaccagcgaatggcgcgcgccgcgccgggaatatcatcacgcagactgtgacgaatcggtttgccggtgtcgagagtttccagcagtgccagctcttcggcgtgggcttccattaaatcggcgagtttattcagtaccgctttacgtttagccggagaagagagtgaccagtcgccgcgttcaaatac

SEQ ID NO: 1372 - DNA, 253 bp, Homo sapiens
cggttcacgcacgatcatcgccagctcatggctactggtggtcgccacttcgccatacactttgtcgatcgcttcggcgtaccagcgaatggcgcgcgccgcgccgggaatatcatcacgcagactgtgacgaatcggtttgccggtgtcgagagtttccagcagtgccagctcttcggcgtgggcttccattaaatcggcgagtttattcagtaccgctttacgtttagccggagaagagagtgaccagtcg

SEQ ID NO: 1373 - DNA, 246 bp, Homo sapiens
cggttcacgcacgatcatcgccagctcatggctactggtggtcgccacttcgccatacactttgtcgatcgcttcggcgtaccagcgaatggcgcgcgccgcgccgggaatatgcatcacgcagactgtgacgaatcggtttgccggtgtcgagagtttccagcagtgccagctcttcggcgtgggcttccattaaatcggcgagtttattcagtaccgctttacgtttagccggagaagagagtg

SEQ ID NO: 1374 - DNA, 824 bp, Homo sapiens
atttcttggatccctgtttttaacaaaatcttgaccataagggaaatcacacaactactttggaggattgaaaagcagttctaaactgatttcatagttaaaaatcactttgatgtaataaagtggcaaatataagcaattaaatgcaacccggttgatgtttatcttattgttacatcagtagactaaggtaaaacttagatctttgctcttggaatgcaaaaaaagcaggtccctatcctgaaaacctatgaatacagtgacatcctctggcattcgggatacaatataactagctgcttctcctgccctgttcagtagggtttacttatatctcataggaatctccacaaatttatcttgtcattctaggtccttaggctgaaagctaagacaaagtggagataaaatacaaaaaggcagagaaataagatttgaagacgtcctacccctttcgaaggcctcactgccaactgcctcctcctggcagattccgggaagcctttaggatgatctacaacataccatttgaacagggccatgaggtgcccaacctgaaacttctttacagccacccccattttacgtcctcacccctgttcccacagctgttctctggatccatccccttcaacctttccaggagttctgatccattactgtgtctctttacatcatttcagctattctcctgggttaacttttcaaagtaaggttgtcttcccccacctacctacaacagaattgtctgctagaaatgaaggatgggggccgggtgcggtggctcatgcctggaatcccagcactttgggaggccaaggcag

SEQ ID NO: 1375 - DNA, 285 bp, Homo sapiens
gtggctcacacctgtaatcccagcacttggggaggcctaggtgggcagatcacgagaggtcaagagatcaagaccatcctggctaacatggtgaaaccccgtctctactaaaaatacaaaaaattagccgggcgtggtcgcgggcgcctgtagtcccagctactcgggaggctgaggcaggagaatggtgtgaacctgggatggggagcttgtagtgagccgagatcgcgccactgcactccaacctgggtgacagagcgagactccatctcaaaaaaagaaaaa

SEQ ID NO: 1376 - DNA, 133 bp, Homo sapiens
ccaggtccactctgcccaaggccacttctcccagacccaagctccctggaaagcagtgtttgcagggagcccacccctctgaacccaggaccatttttcttacctgagtctcggtgaactgttctagctctct

SEQ ID NO: 1377 - DNA, 349 bp, Homo sapiens
  SITE (308): n equals a,t,g, or c
cccttgcctgctttgggatgaggctgtcggaaaagttttgccgacaccgaatcttcacacgctgatacaggcacgggatcaactggcgaaatctggtattgcacttgagcaactgaacgcgccttcagcgaccagctgcacttcgctgccattactggcgcaatacggtgtgactcatgccgaacccggtcatgcgctgacgggcactattccggcaaaccagcaaggcgatcagcctgaacgtatcgcgatgctctggttaagtgaaatctccatcatttccgtggcgacagctactgctacggcgncggttactatccggctggtcatgcccacatgcgttcgggtt

SEQ ID NO: 1378 - DNA, 548 bp, Homo sapiens
cccttgcctgctttgggatgaggctgtcggaaaagttttgccgacaccgaatcttcacacgctgatacaggcacgggatcaactggcgaaatctggtattgcacttgagcaactgaacgcgccttcagcgaccagctgcacttcgctgccattactggcgcaatacggtgtgactcatgccgaacccggtcatgcgctgacgggcactattccggcaaaccagcagggcgatcagcctgaacgtatcgcgatgctctggttaagtgaaatctcccatcatttccgtggcgacagctactgctacggcggcggttactatcgtcgtggtcatgcgcaacatgcgttggtgtttacgccagaaaatcaaaagattactgaaaccaatctcaaaactgtggatgacagcagtatcgactacaccctgccgctggcaggcgagtttccggtaagcagtgcagtggtgctctgttttcgcacgcagatttttgtcacccgtagcgatgtggtgctggtgtccggtattcatcgtggcgaaccggaaatcgtcg

SEQ ID NO: 1379 - DNA, 359 bp, Homo sapiens
atttcccttgcctgctttgggatgaggctgtcggaaaagttttgccgacaccgaatcttcacacgctgatacaggcacgggatcaactggcgaaatctggtattgcacttgagcaactgaacgcgccttcagcgaccagctgcacttcgctgccattactggcgcaatacggtgtgactcatgccgaacccggtcatgcgctgacgggcactattccggcaaaccagcagggcgatcatgcctgaacgtatcgcagatgctctggttaagtgaaatgtcccatcatttccgcggcgacagctactgctacagcggaggttactatccgacctggccatgcgcaacatgcgtaggcgttt

SEQ ID NO: 1380 - DNA, 356 bp, Homo sapiens
atttcccttgcctgctttgggatgaggctgtcggaaaagttttgccgacaccgaatcttcacacgctgatacaggcacgggatcaactggcgaaatctggtattgcacttgagcaactgaacgcgccttcagcgaccagctgcacttcgctgccattactggcgcaatacggtgtgactcatgccgaacccggtcatgcgctgacgggcactattccggcaaaccagcagggcgatcagcctgaacgtatcgcgatgctctggttaagtgaaatctcccatcatttccgtggcgacagctactgctacggcggcggttactatcgtcgtggtcatgcgcaacatgcgttggtgttt

SEQ ID NO: 1381 - DNA, 670 bp, Homo sapiens
cccttgcctgctttgggatgaggctgtcggaaaagttttgccgacaccgaatcttcacacgctgatacaggcacgggatcaactggcgaaatctggtattgcacttgagcaactgaacgcgccttcagcgaccagctgcacttcgctgccattactggcgcaatacggtgtgcactcatgccgaacccggtccatgcgctgacgggcactattccggcaaaccagcagggcgatcagcctgaacgtatcgcgatgctctggttaagtgaaatctcccatcatttccgtggcgacagctactgctacggcggcggttactatcgtcgtggtcatgcgcaacatgcgttggtgtttacgccagaaaatcaaaagattactgaaaccaatctcaaaactgtggatgacagcagtatcgactacaccctgccgctggcaggcgagtttccggtaagcagtgcagtggtgctctgttttcgcacgcagatttttgtcacccgtagcgatgtggtgctggtgtccggtattcatcgtggcgaaccggaaatcgtcggtcgttatgacagtcttggaaactctctgggggcgtaatggcgcgatttgtggtgttagtgattgatagctttggcgtaggggcaatgaaagatgtcacgctggtgcgtccgcaagatgc

SEQ ID NO: 1382 - DNA, 399 bp, Homo sapiens
agcccatgttggcggctaaaggagagatggtttcgtccttttcctggccataaagattcatgcccgtttccagttcgcagcgtgtcacgcgcgcccaagccacatggtttaacacccgcttccaccagcgcacgccagaaatcggccgctttttcattgggcagcgcaatttcatagcccgcttcaccggtataaccagtggtggcaataaacagatcgcccgcctgcacgccaaagaacggtttcatcccttccaccgcctgacgctgggcgtcattaaacagtgtggcagcttttgcttgcgcattcggcccttgcacggcattcatggaaaggtcatcacgaacggtaattttgatgccgaaaggttcagcgtgttgggtaattcaggagaggttt

SEQ ID NO: 1383 - DNA, 180 bp, Homo sapiens
tcgcccgcctgcacgccaagacgtttcatcccttccaccgcctgacgctgggcgtcattaaacagtgtgccagcttttgcctgcgcattcggcccttgcacggcaatcatggaaaggtcatcacgaacggtaatttcgatgccgaaaggttcagcgtgttgggtaatccaggagaggtct

SEQ ID NO: 1384 - DNA, 16018 bp, Homo sapiens
gccacaagaggagcctgtggtgcagggctcagcgctctatctggtagcccaccacgatgactactgcgtatggtacagcctgcagaggaccaggtacgtcgagcctcgtgggggtggaggatgagcctctgagacttgtatgtaaattccccatttacagatcctctggaggtgccagtgggttgatttgtgtctggacagaataacataagaacaaagatttgtgaccagtgtgtcagtgcccattcgtgtgtacccaggagaggctgtcatgggttgctggaatctgtttagagcagatgcgtaggaaaagtctggaattagcgggtgctctaagccctcatgcctactggagaccagtgtccagattcatgccctctggagacctgtggaggcgctcacagcccacgtctgtttgttcatctcctggcctagccctgaaaagaatgagagagtccgccagatgcgccccgtgtgtgactgccaggctcacctgctctggaaccggcctcggtttggagagatcaatgaccaggacagaactgatcgatacgtccaggctctgaggaccgtaagtgtccagccccttggcttgttgtggggaaaagggagaaagaagtttgtcccatgaaccccagcactttgcttatgatttgctgtttctttcctgtgtcctcttgtctatgagtggcttcagcgagcgcctcctgggtgggcactggagcagaaagcgggagagcctggggctggacttcctgagggcttgctctctgctctactgggagagcctctggctgggctcctgctggacacctttgccttgtcagacacagtcattgctgtgggtggtcacggtggattaggccaccccctcttttcatgtgttgtcacctttctaaaattttctaagatgtaaatctgatcatgtcgctctcctgcctgaaaacctttgctccctgctacctgtagcaggggactcggcttggggattacagatggggcttagagggagggtctcttgaggcccttgggggtgtgtacagaaataggtgtgaatgtgtgcattttgggggatggggggaggatccaagccatcctgagtttctctcagaggggtctgtcacccagaaaggcatccttgcctttgggccagtccaattgtgaacactcaagccttggaggctctcagctgtctgtgctctaaccagacagggaagaagcctgttgtcatggactggaaggtggcctgcaggtggtgcaggccttcagcggggcctctaggctgggttgaggggtgtctttcctgacactggggacaggtggggagatgtgagcaaggcgggcatgtttgtggctgggggtggttactgcatgaggacgcagggggatggtctgaggtctgggcaagtggagtgagaagggaagtatttctgacagcttgccagcaggaatcttctggcaaactggaggaagccctgtgctgagcttgcctgttccccgcaggtgctgaagccagacagcgtgtgcctgtgtgtcagcgatggcagcctgctctccgtgctggcccatcacctgggggtggagcaggtactgacatgcacccttgtcagcctcctgatgtgggcttgtgagttagagcattgcgtggtccgggtgcacaattctgtgatcaaggctctttgcaaaggccactgttgtgggcacagcatgctcgggtcaggggctggggggtttattgcctgtgcgtgcaggcaggcgtcaggcctcagagctggtgttcaggctgccccagggagggaatgagggcagggagggttgttcaggtgtgtcctctgtcttaggatggtcttgtcgcattttaatctttaatttcttctctgttaagtgaatatcttacaactaatagcgtggtgttccctctaggtgtttacagtcgagagttcagcagcttctcacaaactgttgagaaaagtaagtgagaattgttgttgctgaaatagtgagaggacctgtggggtctgggttgatggctttgaagtggcattggccccaggggaacaaaggagtggtggctcgcttgcacccctgtgttgtcttggttgctgcctggagagcagccagaggccttgggagctgtcactgaaatagaggcaggcatttgcactctgctttgtttttttgtgtctgaagaagtttaggcttttttcctcacttcacataagctactgttgcggtagaattaaatgtaggatgtgtttctgggacatcagtgctgagggagccagtgctcacagcctgatgggagatggcatttctctccctggccagtaactggtttgatttcctctccaaaggggaactcccttcaccagaactgcaggctcgcactgagtcctggtgtgcacatgcgggagaaatttcttttgcttttatcacattgtgctcctgatctcatccgtggtctataggatgccccccaaggagaggatttttccacaaagcagataaaagtggtgttccagaaccatttgccggaaaattcaaagcggagaatgcaactttgagagatttttttttcctgacaaacacaatactttagtatgaatacagtaattttacggttttctttctaagatcttcaaggctaaccacttggaagataaaattaacatcatagagaaacggccggaattattaacaaatgaggacctacagggcagaaaggtgagtagcgggagccttttggccacgctgggctgtgttagggtggtcagcacggcactgaagtagcccaggccccaccctgtccctggagtctcacagtgggtcctccacatgcaaccttacctcctacgagctcccaccatcaagggtgtggtgaagctttcatggagctgcccggtgagcagatggttgcactgctctttttttttttttttttttttttgaaaatggggtctcgcgctgtcgtccaggctggagtgcagtggcacgatcttggcttactgcagccacagaccttccagcctcaagcgatcctcccacctctcccgagtagctgggactgtaggcatgtgccattatgcctggctaatttttgtattttttgtagagtcagcgtttcatcatgtggcccaggctggtcttgaactcctgggctcatgcgatctgccagtctcagcctcccaaagtgtcggggttacaggcatgagccaccacacctggctgtactgctcttagctcagcctcatctctgctccttcaggtcaggacagagcagctctcttggggttcctaggagcagagcatgtcctttcctctccaccgcactcctgtcttcattccccgtccacggcttcctgctgcagtcaggcttccgggccctgaaactgcttctgccagcaacctcgtcgttactcccacggtctccctgcaggcttcatctgctctacccgcttgtccttgtgacccgggacttctgcctgtgctggggaggtcgctttcccctcaccttcctggctgctccttaccttgcactgctccgtggcactctccccgtgtcccccgcttcccctactgcatcctctctggtaatcacgttccttctcatgtgtgaatcagtgaccatcagagccggccttcactctttactattttggattcaaatctcatgtccagctgccatcctgtcacctttccttgaatatgccacaaactggactcacccaacgcggagctatcatctttcatctttcctgccagtctttttttaaataacagctttattgagatgtagttgacataccacaaaattaatgcatttcaattgtacagttgagtgatttttttaagtaaatatatggagttagccgtcacccagtctcatttagaacatttccaggcccgacatggtggcacatgtctgtaatcccagaacttcggaaggccaaggtgggaggatcgcttggacccaggagttcaagaccaatctgagtaacatagggagaccctgtctctataaaaacaaaaaaaattaaccgagtgtggtggcacgtgcctgtagtcccaggaggctgaggtgggtgaggtgggaggatcgcctgagcccaggagttggaggctgcagggagccgtgcttgtggcagagcactacagcatggctgacagagtgataccttgtctctaaaaaaaatgggaatgaaaagagaacatttctgttacctcccaaattcctgggagcctgttgatagtctgcatccccatgccccaggcctggcagccactggtctggtttgtgtctccagtatgtgcctcttctggcatatctcaaaagtgaggtacgcagtgtgtggtcttgtgagtctggctcctttcgctgagcataatgtctttgagattcacccatttcgttcttttgaaggctgtgtagcattccacggtgtggctatccattcatgtgcttatggacgtttggattgtgtccagtttttggccactttgaataaggcttctgtgaacatggattcactggtcttagagaggatgtatgtcctcagtctcttatgcagatgccttggtgtggattgctgggtcatgtggtagttacgatcgactttttaagaagctgctgaactgttggttgaagtggctgtccttttgacatccccatcggtaacatctgagggtccaggttctcggatcctcaccagcacctggcattggctttttttttttagcataaccatattaatgggagtgtggtgatgtctccacatagttttaatttgtatttgcccaatgactgatgatggtgaacatcatttcgtgtgcttgtcttgcttggtgaaatgtctattcaagccttttgcccatttaaaaaaataacagttttattgagatataattcacataccttacgattcactcagtgatttttgtatattcataaggttgtgtaaccatcaccacatcagtttaagaaccctttcattacccattggcagtcatgcaccatttgtccgcagtcccccagccctgggcacccactcttctcctttctgtctttagcttgcccattctgggcatcttgtgtgaatggaatcagacaagtgtgtggtctttcgtggctggcctctcatgtggcttcatgttttcgggctcatccatgtcgtagcctgaatcaatacctcatttctctttcttgctgaataagattccattgtgtggatagaccatgttatttatctgtttctcagctgatggacatttgggtggctcctacttttgggctgttgtgagtaatgctgctataaatattcatccacaagtcgccttttttctccctcatagatgagggcataggagatgattctgaaagccactgtgtggtgtaccggtagaccggggtcacattgaattggagtggtgggagcgggcgttcttgccatgttcctgatgctgtgtggggaggcgaggaagcactcagggcagccccttctgtctgccagcatttcctgctgcatctccatcatctctgactggccccactttggtgcctgactgcttgggcctgcccagggtcggctacctccttaccctctgccactccttccactcctcccacccctcccaccctgtagtctccgtttcttacccggactctttctgcactctcccaggtcgcctccgtccccagcacctgcaggttcccttccacacttcgtggtcctcagcagcatcttctaaatcacattccttctgattttgaaccctgatgaaaacttctagtgacatccaccacccccactgccgcctccgggatgagtccagcccctcaccctgtcctggctgccttgggctgggctggcttctgtccagctccacaccctcaccttggggggccttgctgtctcccggcctcactcttgcccctgctgcccctccctcggccgttcaggctcctcgctgtgcacgtgttcatttactcacaaatgttcacagaacatctggtcacggcactggcccactgctgggggatgctgggccaccagtccctgctcttgtggtgctcagagcctggggagggagacggagacaagccccggtaagtcctgagataaagcgtccagtgggggttgacaggatgccactctggaagccccgtctggcacgtttatttctgggctccctccatgacccccttccttgcttttttctatcacatggggtcagccccactttgtctgcttccctcttctgctctgctctcctgagcacgggactcatgtctggttgtaatctttacagcctccagggcaggtacagagcaccttgctgccttgcttgtttgttgactgagggagggagggactgatgagggagggagggaatgagtgagtgactgagtgagggagggagagggagggagtgagggagtgacttgagtgactgagtggcctgttgcttccgtgttcctgttaacactcctggaccgagccctactgacacctgggccctgcttctcgcccattcaccaggtctctctcctcctgggcgagccgttcttcactaccagcctgctgccgtggcacaacctctacttctggtacgtgcggaccgctgtggaccagcacctggggccaggtgccatggtgatgccccaggcagcctcgctgcacgctgtggttgtggagttcagggtaggccacccaggggatgttggagaaaaaagcagaggaggcgggtggggaaccttgttttcttgcaggaaccttgggtgcctgtagagcggctcaggccttgatgatttgagcttgtgttttctttctgtgtcagcacactgtggggttgaatagaagatgcttgccttttaaaaaatgcgataatttgacatacgaaatggaaatggctgagtgttgtcattttacaattgtggcttatcagaataatttaaaaatataaattaagcgtttcagaagccatgccgtgtggcctgctctgctctcattaatagccgaggcttcgattgttaaaggcattttgagatgggagagtcagctgctttgtgcaagaaaaaatggaaaagcttccttttaattttctcatcaaagcagaaccatagtcacaaagtcattttgggaagggcatttttattaaaaggatttgaaaagctttaccctggatggagagtgtatctcatttgatgagagtggttttctctcctagcttagtggctccatcactgaaagtctgggcatttctcctgtgttacttgtttacctaatcagatttccacatgaattctggttttcatggccaaagaggggatgtcacgatccatgcgtgcgtgtgaccaggaggaagggagggaaggctgtgtggcctgagtgtcctctgggttcctcttggcagggcctttttctctccccagcatcctcatgaactggagatgatgctggggagagaattggcttacagatttcttcccaaagaaatgatgttcaggatggcccggataggagtgtgcagcccccagcctaggagctctggccgactgtcccttataggagaggactcaggtgtcacgtcagagcttgcaggttcccgcccagcccagtctgttacagaaaccgttgtggatctttgttctctctgagccccttcatacttgggggtctctttcaggtgtgcagggaacagcaagatgtgcctcttgttcttgctgccacgcttccctgtgtcctggcgggcgggtgtggacggggctgctccttcctcacaggacctgtggcggatccggagcccctgtggtgactgcgaaggcttcgacgtgcacatcatggacgacatgattaaggtaggcagggccacactctgcatagtacccccgacctgctcctgtatcgcaggcctctcacagggtcccagcttgggcagcacaggctcttctgttgggggcagtgaggtcaggtgctgccattttgtgtggttcaacatgagcattgcttggtaccagccctgttcttggctccgtgctgtcaccctgtgtcagaatctccactgggcctgcacgtcctgtcattgcaactgcccctgccagtgcccacagcttcttttctagtggggctgactttccagaggccatctgggaaccttcttaggcagccatttccatggtgggggctccattcccgggaggggtacctgaggagattcccacaggttatttacatggtaggggttagcaactgggcctacgttctccagaaccatgggctgtcctgacagcgccagtggtccttggattcatgaggactgaagctgagagtcgtgttccatccacatgagaggggcagggtgaggagcatgggccgtgctgtgtattaaggaaatgcacgtggctcctgcttgtcatcccagcactctgggaacctgaggctggtggattgcttgagcccagacgtttgagaccagcttgggcaatatagcaagaccctgtctcgacaaaaaataacaaaaaattagccaggcatggtagtgcacacctgtattcccagctactcaggaggctgaggtgggaggatggctttagcctgggaggtcgaggctgcagtgagctgcgtttgtgccactgcctccaggctgggtgacagagcaagaccttgtctcaaaaaaagaaatctcatggacaccagaggagcgggaagcagcggtggccccgcagcagcagctatgcatcgggaggtggggcttttctgcttctgctcacctttctgctctcattttcccatagtgaacatggattgcctgtgtgtgaacacttttttaagtaaattaaaccttgtggatattttcagtttgtatcttatctgcccctcacagcagaccattgactgttcgatgcttttagaaatctccttcgtgctgagccctgcgtgctctggacccatgcgctctacgcctcctctgggcccctgctcatggcctgcccaccctggctgtccctgtcccctcttgctgatacggttctgctactctggtcctgggccagtgtctgtctctcgtgtgctaaggcagatggccgagagtggtgggtatcccacagtggggtgccaggcatttttacttctatgctttccaaatccacctgcccttccccacccttagcctggcccttccagtgccctgtcttagacctggcgccacttcacacgaccagccaggcccagggccccgggcatcctccctggcaagtcctcccatcccctgccattggtcttcgtgctcctggtgagcctccgacccaggctgtcccctgactgctgccgtcctggtttgagcccctcctgctctggccgtcctccacacggagcccacatgaacttgtagatctgagtctggccacatccccactgcaggaatgccctagctggctccccacaccacacctgcagagtggcccggctggcctgggtgccctggcctgctctcctgacttagctctatcctcaaggccccctctggcccttctcctgccggctcccatttgaccgtcacctcccctcctccaggtagctttctgcatccctcctggatgcaggtgcccccagcctgccgccaggcaccggggctgtactgtcacgcatttatccctccctgtggcccggggcccacctgtcggggccacacagctgtggtggtcaccaagtttctaggtgctgggtgttctcaccagtgatgtagatatgtggtcctcagaaggcttgagacaggcagcaccaccccatcttaaaaatccggagagcgaggctcagagccagcggtgcctggggagccactgatgagagagaagtggcagagagggggcgccgctggtctgctgggcgctcggcatctttatgggagaacgcacaccccttgtgactgcagtcagtgggagccaagccggggagcggtacctctgtctagctgccggcctgtctctgcagcccccaggcccccttctgttcgcagcgtgccctggacttcagggagagcagggaagctgagccccacccgctgtgggagtacccatgccgcagcctctccgagccctggcagatcctgacctttgacttccagcagccggtgcccctgcagcccctgtgtgccgagggcaccgtggagctcagaaggtgggtgcagagagggctggggggcagggaggggctgctgcttgcccttggagttctcacccccgtggtgagcacagctggcctgggagacgctgacacgtggagggggtattcgtcctccccacaaccttgcccttccctgtcagagtggccctgcgcgtgtggtggttcccacggtcctgtgtgtgccactggtggaggagccaggaagggctctgctccccctctacagctgaggctcccttgttggatcacagctcaggaagatgggagcttacttcctgtggtcaccgatgcaccattttcctgaaccctcctgggagctgaagcaggtcagggtcagcaagtgctgcttgcgtccagggacgggcagccctgtcctgctccggccctcaccccaccctcgcccgaggagtgacttctcctggaagcacctcccaactcggggcaggcagccaggcagggcgggcgccatcacctgagctcccagggttgctgtctggggcatcagaggggccttccggccttcagtgccaggctgtgcctcaagctcccccagaccctgcagccacaccggccctgccccatgtgtggcccggctgcagggctcgggttggctcaggtgggggcttggctgcggctcttctggctggggtttttctgaggaacgtttatgtaactgcagcactaggaactcccggcagggcaggaaggaagtggggaagaccacaggtttctggaaagccgcaggagctgcagctgttcccccgctgcctcttgtgtgactacttctgctgggcccccctctccttgacaggcccgggcagagccacgcagcggtgctatggatggagtaccacctgaccccggagtgcacgctcagcactggcctcctggagcctgcagaccccgaggtagtgcctgcgcaccgggcccagtgtgcgtgcagaccctgagagcaggcgccgcctggggaggcctccctgcccccatgctctgggtgtttctgtcacaagttcttcgggccagatgatgacccctcagtggtcctgggccatctggcccctgagcagcttctctctgctgcgagctgcctgggctggaggctggctaggaaggaggctcaggtgccagggagccctcaccatcttcctgctcttcttcctacaggggggctgctgctggaacccccactgcaagcaggccgtctacttcttcagccctgccccagatcccagagcactgctgggtggcccacggactgtcagctatgcagtggagtttcaccccgacacaggcgacatcatcatggagttcaggcatgcagataccccagactgaccactcttgagcaataaagtggcctgagggctggggttctgagtggctcatggctttctagcggggaaggctgaaggccctcctctcctctctgggagctgctcggcctcagggatgggaaagactgcgccgtgttgcatcttgttgcatctttgcactgctggcctctggctccagctgtggcaggaagcatgagagggtgactgaatttggagccctggaggggctgggaagacccccctgcttgtgcttctgaggtgctgagaatgctccaacacagagacatctctccccagctgggaagggagtggaagcacagggagcttgtggggctggccggtggggttgtccacgccgcccttggcgagcagtccccgtggcgggagcctgtcctgtctgtctcactctcgaggatctccgggtccctgctcttctggcttctgctaggagggtggagatgctgagttgtggctgggtctctggggcttgaagaccctggctgggcccgggctgagaggcctgggttctggccctttcacctgacaggtaacttcaagccacatccataggtgtctggcctcagtgctgcaccagctggtggcctgccaggacctgagactggacacaaggcagctgtcccagagcagttcctgagatgcaggcccaggaaagtggctgtcaggggagctgggaggcagccctgttccctgcacctccctcagattggaaagcccctcctgcaggtggggtatggcagggagcagcccctgcccagcgccgcttcaccaggaaggtcagtaggtgccgtggccttgcttctctcacacactaacccccctttggttatgtcccagctctcagaggtaacagcagacaccacgtgagagaacccagtggcctctggctcgcagcttagaaggtgaggcttgtgccaggccagccgagccgcctgtatgagcagagttccggtgtcctcggattcagggcagacttgggcagtgcctgtcctgcagttgggggcaggaactccctcccctgcccccaggcgtgcccctgaggcctggccccagcttgtcgctgaaataagtggagaacaccagccttgagcctcacagttttattttctcctcgttatccatccttcctttcagcaccagtaaggaaaaagaacacctctcttcgcaaaatattttatcaggtgtaaagacttgtttttcttctagggaagaaccgtctggatatatatttgataatgtttttaccaaaaccataggtgtgcttaccatagaaaacccctaatgtcccatgaagatacaatacagaaaaaaatacagaaattaaaaaagtttttataacagtatttctaaatctcagcaagttaaaaagcaatagttaaaaagcatcaagattaatatacttaaaacttaaggtggttttggacaaatgaaaatgaacatttccttcctcagtggcccccgcgccttgtggcttcctttgagactgggcctagggcaggaacagagtcttggtatgggcctcgggtgacccgtgtgcccacccctgctaggccttagatgccacagaatctgagatccagcaatggttcactttaaaaaatcagtggaagggcctggcctgcacacaaggcccgggagtccataggcagccacaatgagacacgtgggtgggggggtcccggtcttggtgctgagggaggtgtgcgggggcctgggggccgcacatccttactctggaccccaggacctgactaggcagaggcgaccttgtgatgacagaaaatgacttgcctaaggccgcctgtgaggtgggaggggaggagcatgcagccctgactcccacgcctgctgccccgggagggggtgcctgggtggggaagctatgttggggtctggtgtgggggccctgcccgggcctcaactgctctccctgtgcaggcagtcggcaggcggctcggggtctaggggtccagggccggccggcccagtcgcttgtgtgagcagagtaccagctgcttctggaagttgggggcctccacatcatgaatcccagtcaaggctcacaggccagccccttggaggggtgggccgggcagagagcccagcaggatgctcgccctcagcagccccttcctggctctggactctggaggggcagggcttgggcccgggcagacggtgcttcccaggccaggtgagttcagacaggccagtgtcacaaggacgcacgtcctagcgccaggctccctgggctctgcagcgttgtctgccccagcacagggccaggcatctggctggctgcgtggccccctcttggtccctcttgcagctcaatgggtgacaaggcacagcatcagggcaccagcaccaggaggggctgacagcagacagcaggtcctggtgctccctccagcctcaccaggcaaagccggccctgggccaggctgggtgtagggccagggcgccacgaggagcggaggtcagcggggattgtcaaaaacagtccctcaagttgagtctcgaactttgaaacagacaaaaccttcgctgcatgacaggagcagccctggagtctcttaaaggcaggtgggcagaggcagtgctgccgaaggggcctgggggctgtaggcatcttggggctggaggcagatcggggaccacaagctgttggccagctctgccatgctgaacttgggtgccagtaccacaccctgccctgggcatgcagcaactgtcagccttgctgccccagcttgcgcactggtgagggccaggctgctctctgcaccttggcttcctgcctcctaggccggggtccccttgtggccttggtgttggctggggtagctgttgaggatgggcctgggaggccagagccgcagccccacccggggggcaggcaggggttcctgagctcagccggcacgcaggtggggcacgtccccagggagggattggtcccgaaccagagaggtgtcccgtgggggagaggattggcagaaagaagaggatgtgttggttttgatagaagagaagctacaaatagattattttcaaaatcaggatcccccccacccccgtttatgctgtgagtcccttcttcctgtaaaaaaaaaagtggatactctcttctcggatccccgtttatggctccactgcccagatgggaggctcccggaggaggcccagggtgccagagcctgccagactctgttgtgcctgagctggggaagggaccctgtctcgggaagagcaaagttctatgagtgacttacagaccctgtgaagtgagggttggttttgtgattaacctttttctgtttttctttttaaaatgtaattgcccttgaatgcgagaccctgggaagagccctgggctggctggtagagatgcagccctcggaccctgcaggagccggcccacactggaggcgggagagctggtggccgtgcccaggaagtgcttctttggctggttctgattgtgtttggagtttggccttgggtgaggcccgagcaaggggtctgtggctacagcgtggcacgtggcatgcgggcagcgtgcatgcgagggtgcaggcatgcgagacgacattggcagcagacaaaaataaagaaccctggacgaagcttaagaggagatacagagagtacacgaacccggtcctcatactaacccacgggttacaaactcggttgtgctgtagatttgtagaaaatcgtgttgtgaaagaatggcactggttaggcagctggaggctgcctggggcgggcctgactcctctgtccacagtgaggcccagaggcgcagagcagcgcagcttgccaggttcccgggcactgactgtggctccctgccctgtccctgccctcctgcccccaagcaccgggcactcgatggaggggacatggcccagggatgggctgcagctgcaagggctggcagaggccccgctgctgccggacggtctatgcctcctcctcccccgaagacaccatcagtcgcatggctactggcaggtggtccgtcaggccggacagctgggtgataaaactgaattcttccacctcctggggtgagtgggagaggggagaaacagcctggtcagattccaagggcatcttgcagggagcggcctggggatccccaaagtgaggccccggggctggggtgggctgggaccttcctgcagtcagagggatggggcctggaggacctggggccctaagggtctgagggagtgatgggtatcattgtaagagtggcctggggcgtggggtttcagggagcggctgtcgagagctgcagggcccgggccctgctctctctttgcatggccctggctgctgggccctcctgactcacggccttccagtctgggcacagcccctcctctgcatgcagcatgtagtcgatgcgccggccgttgcccttcagcagctccttccgccccttctggcccgagctcttgctggtgggaaacgcca

SEQ ID NO: 1385 - DNA, 22400 bp, Homo sapiens
aggaaaattgtgaggccgtgccccacagagccaccgtctatgcacagctggtggagtccgggaggatgtggtcgtggaacaagctatttcccatccacgtgcagaccagcctcggagagcaggtcatcgtccctcccgttgacgtggagagctgccctggcgcaccctctgtctgtgacattcagctgaaccaggtgtcaccagccgactttacagtcctcagcgatgtgctgcccatgttcaggtaccaaggagccaccataggtgatggcgctttgagacatttgatggaagttgggtattaggaggttctttttgagtgggaaggaaatctagctgctgtcacctgcctcgaaggcaagagtcctttgcagccaaatgtcattgccagtgaagtcactgtaaaagcttaaaaaatggagtgtgtgaggttaaactctgcttacattcttgaatattattcctcagcatagacttcagcaagcaagtcagtagctcagcagcctgccatagcaggcggtttgaacctctgacatctggccgagctcaggtggttctctcgtggtgggacattgaaatggaccctgaggggaagatcaagtgcaccatggcccccttctgggcacactcagacccagaggagatgcaggtaagaggcaggagcctagcatgtgccctgtcaggaaacttgtccactgctgttcatgggaaagtaacagttgagccttggacccaggagaatttagagacaggagggctgtgtcagaatcaaagacaaaagtttttaaaaagcaagcaaaggctagctgtagtaacgtagccttcccagggtgagctcatggtgagcactcatggacacagtgaggaacagagaagttggctttcctctcccgcctcatcatgatgcagccacccttagataccacccctcatcccctgagtaatcccagggggctcccatcagcttggaatagagaactacagcctcaccttctgtggcctcaaaatctcctttctccaccccgatagaaagtaggcagaggacatgaaacacagaaaaggaaatacagatgatggggatagttgcccactgtccctcataataagagaaatgcagttttagctgctcacagcacctatgctcccagcctctcaggagactgaggcaggagggttgcttgaacccaggaagttgaggctgcagtgagtcgggactgcattactgcactcccgcctgggcaataagatgagaacctgtctctaaaaaaaaaaaaaaagagaaatgcaactttaaactgcaatgagatctcattttcacctactagtgaataaagtttaaacagtttgcaagcacactgttggggaagctcagggaaaaagcaggaaagcgagtcatcagaacgtttcaggtagaaagcaatgctgctttcagacatggggctgtggctggatttgcgtctgtgcagaatagatgtgtgcagccctggtttagtagaaaaaggccaacctaaaggccactagcagggatcaagtccattatcctttcagtgggtgaggtagctctctgtgcactgatgtgggacaagcttcagggtggattattacctgacacaaaaataaaggtgcagaatggtgtgttgtgtggcagcactggtgttagtaaaaataggaatatatgtgtttgtgagtggatagtcatgtgtggtgtacatataaggaggtctttggaagaattcccagaaattcgtaaaactgactgcatctgggaatggggactggaggttaggggtggaaaggaaacatattttttactatgcgtccttgtataccttttgaattttctctcatgtgcttgtgttatttacacccccatccaccctctctcactctcacactcaaaggaaaagaaagtgggaaaggtgtgtcggaattgcctgatgggttcttcccacccactgttcagacaaaaccaattcgctgacaccatggcattgcaataaagactttaattgacacgaagccagccacaccacgtgggggagagatttgttactcaaatcagtctccctgaaaattcacaggctacggttttttgtttgtttgttttgagatggagtttcgttcttgttggtcaggctggagtgcaatggcgcgatctcagctcactgcaacctctacctcccgggttcaagcaattctcctgcctcagccccctgagtagctgggattacgggcatgcgccaccatgcctggctaattttgtatttttagtagagatggggtttctccacgttggccaggctggtctcaaattcccgacctcaggtgacctgccccaccggcctcccaaagtgctgggattacaggcgtgagccgctatgcccggctcaggctagggtttttcaaggatagtttggcaggcgagggagtccacttctgggtggagtcatcagacagaaacgtaaaaacccgaaaagacatttcaaagggtcaatcttagtttctgcaaggtggtgttatctgcaggaggaatcagggaaggttgcagatcttgtgacctaacaatggcttcaccttagcagaattcagcctcctctcatcctcctaacctgatgatctttcattcagtttaagtttaattttggggaaggacggttatcatttaaagtattaaccagctgggtgtggtggctcacgcctgtaatcccaacactttgggagccccaggtgggtggatcatttgaggtcaggagttcgagaccagcctggccaacatggagaaaccccacttctactaaaaatacaaaaattacccggatgtggtggtgcgtgcctgtaattccagctactcgggaggctgaggcaggagaattgcttgaacccaggaggtggaaattgaagtgagctgaggtcacaccactgcactcaaacctgggtggcagagcgagactctgtctcaaaaaataataagaacaaaaaataaactgttaaccaaatgtctcccaaagttagcttggcccggacccaggaatgattaagggcagtttggacattaaagcaaaatgggggttggttagatgagatctctttcactgtcataattttctcactttttcgcaaaggcagttttggtttcaggaccaagaaatagaacctgtctctacccaggagcgcctcaggcaccatcctttgtccatggtccagcctgcctggccttaacccctggctttgtgttgaatgctcacctgctggttctaggtgtccacaacattatggaaggccttagcagcttcacctaccccattcccagagttactgtttaggccgaagggttgtgactgctggggaattgctgtcaatcagcgtacccataccgacagcagcatgtgagactaagaagtatgtgagcttcctagtctcccctccaccttccaggtgcctggccccgggtgtgtgtgtgtccagccagggcctgccagcatccctctgcaggctgtgtgtgtgtcactctgaattcacccacagagttgagattggcaccgcgtcacattcttcctaagactgtgttgcagaattagcataagaatagcattaaaatgttagtacttttggccggtggctcactcctataatcccagcacttgggaggccaaggcaggtggatcacctgaggtcaggagttcaagaccagcctggctaacatgttgaaaccctgtctctactaaaaatacaaagaaaattagccgggcatggtggcaggcgcctgtaatcccagctacagggctgaggcaggagaatcacttcaacctgggaggtggaggttgcagtaagctgagactgcaccattgccctccagcctgggcaacaagagcgaaactccgtctcaaaaaaaaaaaaagttagtacttttaatttgcatatcttcggagcgctactatgtattttttctccttgaatcctcttagtagacaaacaaggtaaccacaaccatagccaacccgggactcagcaggctccagggattggagcggggccttgtgtccaggagcagtagagtgggtcctgcccctggtctcttgactgtgggtcttgtgttgtttctctaccagcgttgacttttggattggaaatttgaaagctgctaatgaatctccctcatgaattcatgtaactgctttgatcctaagtatatttagtctgtcccaccttggcacagtgggttctgtcaccagctcctcaacgttaggacccaggaggtccctgtggtaggtagtatgggaaggacatgatgacagggcagtgccatgggagcctaggaggggtcgggaaagggttctcctgtcttcttcacatgcatttgcatagtgtgggaatgaataaaaggtttaaaagaacctgtgttattcctgttactatttatttttccagaacatatctggtcagattttcattttctagtttttatgttcaagtaagcgtcttaagcgtgtgggaatgtcattctcctgcctttttgttaaattaaagaccaggtgggtgggcacattccttacctgtgctcttggagtcccacagggccaagtttttcttagttcctgaaggtgacagaatgagcaggcagtcgtctcatcagagttgagccaggcatctcctgtttttgtttgttagagacagggtcttgctttattgctcaggttggattgtggtggcacctcttagctcactgcaactgtgaactcctgggcacaagcgatcctcccacctcagcctcctgagtagctgggactacaggcacttgccactatgcatggctaatcttgtgttttttgtagaaatgggtgtcactggtatgttacccaggctggtcccgtacacctggcctcaaacgatttgccagcctcggcctcccaaattgttgggattacaggcatgagccaccgtgtccagctggcatctactttttagggcagttcttcctttttcaaaaagaggcttaacaattatgagcgaaataaacctcattatataaaataaaaatatcactcatggtcctccctttcactcaaaatagctccctttgtttggtctctctccaaacgcgtgggtgtcatcggtgctcatctctgttccgggccccgtggccttcagcagcagcgtttaagatgtctgtccgtattctgcacgagggtttatatcccgttctgagtgctggccatttgggtgggttccagtttttgctggtataaataattctgtgatttgcatttttatgtgaatataacttttttttttcttttggggttttcttaggatagaaacctgtatgtggggtttgtagtaaggactagcacagcttattaaaaattgaccgtggatcattgtcaaccatgtttcacaatttagaatattcagttatttaaatacttcaatttaattcaaagaataagccaaaacctttttgtattttcccacctttttattttgaaaaattatatatccacagaataagtgaaaatgaacactgatggtcgctttattaatttaaatttaccagttgttaacgtttgccacatctgctttatctttgtctttctgcctcccttcctgcatctctacacacacacacacacacacacacgggcatgcacattttttttttttattgctaaatcatttgaaagtaagttgcagacatctgacactttacttttaaatacttcaacacttatctcccaagaatgaaaacagtctgcaacataaatgaaacacatgatcacacctaagaaaaacagtggttccatagtatcgtctaacatatggttcaaaataaaatttgtctccagaagtccttgatagcttttgtttcctcagtctacgatccagttaggtttagtgcattgagtctgactgttttgtaaattccgagtacgttaaagcctttggaatgcgtgccatggactgttctgaaaaggttccccttaaaccactaggtttaaaccaatttttttccttcaaaggaaacattcagcacagctctacgtgttgaagagagagctttggtgctactctgatggggtggggactggagcctgcacttgtcccctcccctgagccactctggcagattgctgctcttggccacattgtgtcttcctaaagccagcagggttcccgcaaacttttgggccactggcctctgagtttagagtttatttatctccttggccacaatagccagctgtagtctacattgtggacgtcctgaaaactggcagttctctggcatttggctcctggattagaagcattgctcatactgcagctcgttgacagctgactctgttctccgtttcagtggcgggaccactggatgcagtgtgtgtacttcctgccacaagaggagcctgtggtgcagggctcagcgctctatctggtagcccaccacgatgactactgcgtatggtacagcctgcagaggaccaggtacgtcgagcctcgtgggggtggaggatgagcctctgagacttgtatgtaaattccccatttacagatcctctggaggtgccagtgggttgatttgtgtctggacagaataacataagaacaaagatttgtgaccagtgtgtcagtgcccattcgtgtgtacccaggagaggctgtcatgggttgctggaatctgtttagagcagatgcgtaggaaaagtctggaattagcgggtgctctaagccctcatgcctactggagaccagtgtccagattcatgccctctggagacctgtggaggcgctcacagcccacgtctgtttgttcatctcctggcctagccctgaaaagaatgagagagtccgccagatgcgccccgtgtgtgactgccaggctcacctgctctggaaccggcctcggtttggagagatcaatgaccaggacagaactgatcgatacgtccaggctctgaggaccgtaagtgtccagccccttggcttgttgtggggaaaagggagaaagaagtttgtcccatgaaccccagcactttgcttatgatttgctgtttctttcctgtgtcctcttgtctatgagtggcttcagcgagcgcctcctgggtgggcactggagcagaaagcgggagagcctggggctggacttcctgagggcttgctctctgctctactgggagagcctctggctgggctcctgctggacacctttgccttgtcagacacagtcattgctgtgggtggtcacggtggattaggccaccccctcttttcatgtgttgtcacctttctaaaattttctaagatgtaaatctgatcatgtcgctctcctgcctgaaaacctttgctccctgctacctgtagcaggggactcggcttggggattacagatggggcttagagggagggtctcttgaggcccttgggggtgtgtacagaaataggtgtgaatgtgtgcattttgggggatggggggaggatccaagccatcctgagtttctctcagaggggtctgtcacccagaaaggcatccttgcctttgggcagtcaattgtgaacactcaagccttggaggctctcagctgtctgtgctctaaccagacagggaagaagcctgttgtcatggactggaaggtggcctgcaggtggtgcaggccttcagcggggcctctaggctgggttgaggggtgtctttcctgacactggggacaggtggggagatgtgagcaaggcgggcatgtttgtggctgggggtggttactgcatgaggacgcagggggatggtctgaggtctgggcaagtggagtgagaagggaagtatttctgacagcttgccagcaggaatcttctggcaaactggaggaagccctgtgctgagcttgcctgttccccgcaggtgctgaagccagacagcgtgtgcctgtgtgtcagcgatggcagcctgctctccgtgctggcccatcacctgggggtggagcaggtactgacatgcacccttgtcagcctcctgatgtgggcttgtgagttagagcattgcgtggtccgggtgcacaattctgtgatcaaggctctttgcaaaggccactgttgtgggcacagcatgctcgggtcaggggctggggggtttattgcctgtgcgtgcaggcaggcgtcaggcctcagagctggtgttcaggctgccccagggagggaatgagggcagggagggttgttcaggtgtgtcctctgtcttaggatggtcttgtcgcattttaatctttaatttcttctctgttaagtgaatatcttacaactaatagcgtggtgttccctctaggtgtttacagtcgagagttcagcagcttctcacaaactgttgagaaaagtaagtgagaattgttgttgctgaaatagtgagaggacctgtggggtctgggttgatggctttgaagtggcattggccccaggggaacaaaggagtggtggctcgcttgcacccctgtgttgtcttggttgctgcctggagagcagccagaggccttgggagctgtcactgaaatagaggcaggcatttgcactctgctttgtttttttgtgtctgaagaagtttaggcttttttcctcacttcacataagctactgttgcggtagaattaaatgtaggatgtgtttctgggacatcagtgctgagggagccagtgctcacagcctgatgggagatggcatttctctccctggccagtaactggtttgatttcctctccaaaggggaactcccttcaccagaactgcaggctcgcactgagtcctggtgtgcacatgcgggagaaatttcttttgcttttatcacattgtgctcctgatctcatccgtggtctataggatgccccccaaggagaggatttttccacaaagcagataaaagtggtgttccagaaccatttgccggaaaattcaaagcggagaatgcaactttgagagatttttttttcctgacaaacacaatactttagtatgaatacagtaattttacggttttctttctaagatcttcaaggctaaccacttggaagataaaattaacatcatagagaaacggccggaattattaacaaatgaggacctacagggcagaaaggtgagtagcgggagccttttggccacgctgggctgtgttagggtggtcagcacggcactgaagtagcccaggccccaccctgtccctggagtctcacagtgggtcctccacatgcaaccttacctcctacgagctcccaccatcaagggtgtggtgaagctttcatggagctgcccggtgagcagatggttgcactgctctttttttttttttttttttttttgaaaatggggtctcgcgctgtcgtccaggctggagtgcagtggcacgatcttggcttactgcagcctcgaccttccagcctcaagcgatcctcccacctctcccgagtagctgggactgtaggcatgtgccattatgcctggctaatttttgtattttttgtagagtcagcgtttcatcatgtggcccaggctggtcttgaactcctgggctcatgcgatctgccagtctcagcctcccaaagtgtcggggttacaggcatgagccaccacacctggctgtactgctcttagctcagcctcatctctgctccttcaggtcaggacagagcagctctcttggggttcctaggagcagagcatgtcctttcctctccaccgcactcctgtcttcattccccgtccacggcttcctgctgcagtcaggcttccgggccctgaaactgcttctgccagcaacctcgtcgttactcccacggtctccctgcaggcttcatctgctctacccgcttgtccttgtgacccgggacttctgcctgtgctggggaggtcgctttcccctcaccttcctggctgctccttaccttgcactgctccgtggcactctccccgtgtcccccgcttcccctactgcatcctctctggtaatcacgttccttctcatgtgtgaatcagtgaccatcagagccggccttcactctttactattttggattcaaatctcatgtccagctgccatcctgtcacctttccttgaatatgccacaaactggactcacccaacgcggagctatcatctttcatctttcctgccagtctttttttaaataacagctttattgagatgtagttgacataccacaaaattaatgcatttcaattgtacagttgagtgatttttttaagtaaatatatggagttagccgtcacccagtctcatttagaacatttccaggcccgacatggtggcacatgtctgtaatcccagaacttcggaaggccaaggtgggaggatcgcttggacccaggagttcaagaccaatctgagtacatagggagaccctgtctctataaaaacaaaaaaaattaaccgagtgtggtggcacgtgcctgtagtcccaggaggctgaggtgggtgaggtgggaggatcgcctgagcccaggagttggaggctgcagggagccgtgcttgtggcagagcactacagcatggctgacagagtgataccttgtctctaaaaaaaatgggaatgaaaagagaacatttctgttacctcccaaattcctgggagcctgttgatagtctgcatccccatgccccaggcctggcagccactggtctggtttgtgtctccagtatgtgcctcttctggcatatctcaaaagtgaggtacgcagtgtgtggtcttgtgagtctggctcctttcgctgagcataatgtctttgagattcacccatttcgttcttttgaaggctgtgtagcattccacggtgtggctatccattcatgtgcttatggacgtttggattgtgtccagtttttggccactttgaataaggcttctgtgaacatggattcactggtcttagagaggatgtatgtcctcagtctcttatgcagatgccttggtgtggattgctgggtcatgtggtagttacgatcgactttttaagaagctgctgaactgttggttgaagtggctgtccttttgacatccccatcggtaacatctgagggtccaggttctcggatcctcaccagcacctggcattggctttttttttttagcataaccatattaatgggagtgtggtgatgtctccacatagttttaatttgtatttgcccaatgactgatgatggtgaacatcatttcgtgtgcttgtcttgcttggtgaaatgtctattcaagccttttgcccatttaaaaaaataacagttttattgagatataattcacataccttacgattcactcagtgatttttgtatattcataaggttgtgtaaccatcaccacatcagtttaagaaccctttcattacccattggcagtcatgcaccatttgtccgcagtcccccagccctgggcacccactcttctcctttctgtctttagcttgcccattctgggcatcttgtgtgaatggaatcagacaagtgtgtggtctttcgtggctggcctctcatgtggcttcatgttttcgggctcatccatgtcgtagcctgaatcaatacctcatttctctttcttgctgaataagattccattgtgtggatagaccatgttatttatctgtttctcagctgatggacatttgggtggctcctacttttgggctgttgtgagtaatgctgctataaatattcatccacaagtcgccttttttctccctcatagatgagggcataggagatgattctgaaagccactgtgtggtgtaccggtagaccggggtcacattgaattggagtggtgggagcgggcgttcttgccatgttcctgatgctgtgtggggaggcgaggaagcactcagggcagccccttctgtctgccagcatttcctgctgcatctccatcatctctgactggccccactttggtgcctgactgcttgggcctgcccagggtcggctacctccttaccctctgccactccttccactcctcccacccctcccaccctgtagtctccgtttcttacccggactctttctgcactctcccaggtcgcctccgtccccagcacctgcaggttcccttccacacttcgtggtcctcagcagcatcttctaaatcacattccttctgattttgaaccctgatgaaaacttctagtgacatccaccacccccactgccgcctccgggatgagtccagcccctcaccctgtcctggctgccttgggctgggctggcttctgtccagctccacaccctcaccttggggggccttgctgtctcccggcctcactcttgcccctgctgcccctccctcggccgttcaggctcctcgctgtgcacgtgttcatttactcacaaatgttcacagaacatctggtcacggcactggcccactgctgggggatgctgggccaccagtccctgctcttgtggtgctcagagcctggggagggagacggagacaagccccggtaagtcctgagataaagcgtccagtgggggttgacaggatgccactctggaagccccgtctggcacgtttatttctgggctccctccatgacccccttccttgcttttttctatcacatggggtcagccccactttgtctgcttccctcttctgctctgctctcctgagcacgggactcatgtctggttgtaatctttacagcctccagggcaggtacagagcaccttgctgccttgcttgtttgttgactgagggagggagggactgatgagggagggagggaatgagtgagtgactgagtgagggagggagagggagggagtgagggagtgacttgagtgactgagtggcctgttgcttccgtgttcctgttaacactcctggaccgagccctactgacacctgggccctgcttctcgcccattcaccaggtctctctcctcctgggcgagccgttcttcactaccagcctgctgccgtggcacaacctctacttctggtacgtgcggaccgctgtggaccagcacctggggccaggtgccatggtgatgccccaggcagcctcgctgcacgctgtggttgtggagttcagggtaggccacccaggggatgttggagaaaaaagcagaggaggcgggtggggaaccttgttttcttgcaggaaccttgggtgcctgtagagcggctcaggccttgatgatttgagcttgtgttttctttctgtgtcagcacactgtggggttgaatagaagatgcttgccttttaaaaaatgcgataatttgacatacgaaatggaaatggctgagtgttgtcattttacaattgtggcttatcagaataatttaaaaatataaattaagcgtttcagaagccatgccgtgtggcctgctctgctctcattaatagccgaggcttcgattgttaaaggcattttgagatgggagagtcagctgctttgtgcaagaaaaaatggaaaagcttccttttaattttctcatcaaagcagaaccatagtcacaaagtcattttgggaagggcatttttattaaaaggatttgaaaagctttaccctggatggagagtgtatctcatttgatgagagtggttttctctcctagcttagtggctccatcactgaaagtctgggcatttctcctgtgttacttgtttacctaatcagatttccacatgaattctggttttcatggccaaagaggggatgtcacgatccatgcgtgcgtgtgaccaggaggaagggagggaaggctgtgtggcctgagtgtcctctgggttcctcttggcagggcctttttctctccccagcatcctcatgaactggagatgatgctggggagagaattggcttacagatttcttcccaaagaaatgatgttcaggatggcccggataggagtgtgcagcccccagcctaggagctctggccgactgtcccttataggagaggactcaggtgtcacgtcagagcttgcaggttcccgcccagcccagtctgttacagaaaccgttgtggatctttgttctctctgagccccttcatacttgggggtctctttcaggtgtgcagggaacagcaagatgtgcctcttgttcttgctgccacgcttccctgtgtcctggcgggcgggtgtggacggggctgctccttcctcacaggacctgtggcggatccggagcccctgtggtgactgcgaaggcttcgacgtgcacatcatggacgacatgattaaggtaggcagggccacactctgcatagtacccccgacctgctcctgtatcgcaggcctctcacagggtcccagcttgggcagcacaggctcttctgttgggggcagtgaggtcaggtgctgccattttgtgtggttcaacatgagcattgcttggtaccagccctgttcttggctccgtgctgtcaccctgtgtcagaatctccactgggcctgcacgtcctgtcattgcaactgcccctgccagtgcccacagcttcttttctagtggggctgactttccagaggccatctgggaaccttcttaggcagccatttccatggtgggggctccattcccgggaggggtacctgaggagattcccacaggttatttacatggtaggggttagcaactgggcctacgttctccagaaccatgggctgtcctgacagcgccagtggtccttggattcatgaggactgaagctgagagtcgtgttccatccacatgagaggggcagggtgaggagcatgggccgtgctgtgtattaaggaaatgcacgtggctcctgcttgtcatcccagcactctgggaacctgaggctggtggattgcttgagcccagacgtttgagaccagcttgggcaatatagcaagaccctgtctcgacaaaaaataacaaaaaattagccaggcatggtagtgcacacctgtattcccagctactcaggaggctgaggtgggaggatggctttagcctgggaggtcgaggctgcagtgagctgcgtttgtgccactgcctccaggctgggtgacagagcaagaccttgtctcaaaaaaagaaatctcatggacaccagaggagcgggaagcagcggtggccccgcagcagcagctatgcatcgggaggtggggcttttctgcttctgctcacctttctgctctcattttcccatagtgaacatggattgcctgtgtgtgaacacttttttaagtaaattaaaccttgtggatattttcagtttgtatcttatctgcccctcacagcagaccattgactgttcgatgcttttagaaatctccttcgtgctgagccctgcgtgctctggacccatgcgctctacgcctcctctgggcccctgctcatggcctgcccaccctggctgtccctgtcccctcttgctgatacggttctgctactctggtcctgggccagtgtctgtctctcgtgtgctaaggcagatggccgagagtggtgggtatcccacagtggggtgccaggcatttttacttctatgctttccaaatccacctgcccttccccacccttagcctggcccttccagtgccctgtcttagacctggcgccacttcacacgaccagccaggcccagggccccgggcatcctccctggcaagtcctcccatcccctgccattggtcttcgtgctcctggtgagcctccgacccaggctgtcccctgactgctgccgtcctggtttgagcccctcctgctctggccgtcctccacacggagcccacatgaacttgtagatctgagtctggccacatccccactgcaggaatgccctagctggctccccacaccacacctgcagagtggcccggctggcctgggtgccctggcctgctctcctgacttagctctatcctcaaggccccctctggcccttctcctgccggctcccatttgaccgtcacctcccctcctccaggtagctttctgcatccctcctggatgcaggtgcccccagcctgccgccaggcaccggggctgtactgtcacgcatttatccctccctgtggcccggggcccacctgtcggggccacacagctgtggtggtcaccaagtttctaggtgctgggtgttctcaccagtgatgtagatatgtggtcctcagaaggcttgagacaggcagcaccaccccatcttaaaaatccggagagcgaggctcagagccagcggtgcctggggagccactgatgagagagaagtggcagagagggggcgccgctggtctgctgggcgctcggcatctttatgggagaacgcacaccccttgtgactgcagtcagtgggagccaagccggggagcggtacctctgtctagctgccggcctgtctctgcagcccccaggcccccttctgttcgcagcgtgccctggacttcagggagagcagggaagctgagccccacccgctgtgggagtacccatgccgcagcctctccgagccctggcagatcctgacctttgacttccagcagccggtgcccctgcagcccctgtgtgccgagggcaccgtggagctcagaaggtgggtgcagagagggctggggggcagggaggggctgctgcttgcccttggagttctcacccccgtggtgagcacagctggcctgggagacgctgacacgtggagggggtattcgtcctccccacaaccttgcccttccctgtcagagtggccctgcgcgtgtggtggttcccacggtcctgtgtgtgccactggtggaggagccaggaagggctctgctccccctctacagctgaggctcccttgttggatcacagctcaggaagatgggagcttacttcctgtggtcaccgatgcaccattttcctgaaccctcctgggagctgaagcaggtcagggtcagcaagtgctgcttgcgtccagggacgggcagccctgtcctgctccggccctcaccccaccctcgcccgaggagtgacttctcctggaagcacctcccaactcggggcaggcagccaggcagggcgggcgccatcacctgagctcccagggttgctgtctggggcatcagaggggccttccggccttcagtgccaggctgtgcctcaagctcccccagaccctgcagccacaccggccctgccccatgtgtggcccggctgcagggctcgggttggctcaggtgggggcttggctgcggctcttctggctggggtttttctgaggaacgtttatgtaactgcagcactaggaactcccggcagggcaggaaggaagtggggaagaccacaggtttctggaaagccgcaggagctgcagctgttcccccgctgcctcttgtgtgactacttctgctgggcccccctctccttgacaggcccgggcagagccacgcagcggtgctatggatggagtaccacctgaccccggagtgcacgctcagcactggcctcctggagcctgcagaccccgaggtagtgcctgcgcaccgggcccagtgtgcgtgcagaccctgagagcaggcgccgcctggggaggcctccctgcccccatgctctgggtgtttctgtcacaagttcttcgggccagatgatgacccctcagtggtcctgggccatctggcccctgagcagcttctctctgctgcgagctgcctgggctggaggctggctaggaaggaggctcaggtgccagggagccctcaccatcttcctgctcttcttcctacaggggggctgctgctggaacccccactgcaagcaggccgtctacttcttcagccctgccccagatcccagagcactgctgggtggcccacggactgtcagctatgcagtggagtttcaccccgacacaggcgacatcatcatggagttcaggcatgcagataccccagactgaccactcttgagcaataaagtggcctgagggctggggttctgagtggctcatggctttctagcggggaaggctgaaggccctcctctcctctctgggagctgctcggcctcagggatgggaaagactgcgccgtgttgcatcttgttgcatctttgcactgctggcctctggctccagctgtggcaggaagcatgagagggtgactgaatttggagccctggaggggctgggaagacccccctgcttgtgcttctgaggtgctgagaatgctccaacacagagacatctctccccagctgggaagggagtggaagcacagggagcttgtggggctggccggtggggttgtccacgccgcccttggcgagcagtccccgtggcgggagcctgtcctgtctgtctcactctcgaggatctccgggtccctgctcttctggcttctgctaggagggtggagatgctgagttgtggctgggtctctggggcttgaagaccctggctgggcccgggctgagaggcctgggttctggccctttcacctgacaggtaacttcaagccacatccataggtgtctggcctcagtgctgcaccagctggtggcctgccaggacctgagactggacacaaggcagctgtcccagagcagttcctgagatgcaggcccaggaaagtggctgtcaggggagctgggaggcagccctgttccctgcacctccctcagattggaaagcccctcctgcaggtggggtatggcagggagcagcccctgcccagcgccgcttcaccaggaaggtcagtaggtgccgtggccttgcttctctcacacactaacccccctttggttatgtcccagctctcagaggtaacagcagacaccacgtgagagaacccagtggcctctggctcgcagcttagaaggtgaggcttgtgccaggccagccgagccgcctgtatgagcagagttccggtgtcctcggattcagggcagacttgggcagtgcctgtcctgcagttgggggcaggaactccctcccctgcccccaggcgtgcccctgaggcctggccccagcttgtcgctgaaataagtggagaacaccagccttgagcctcacagttttattttctcctcgttatccatccttcctttcagcaccagtaaggaaaaagaacacctctcttcgcaaaatattttatcaggtgtaaagacttgtttttcttctagggaagaaccgtctggatatatatttgataatgtttttaccaaaaccataggtgtgcttaccatagaaaacccctaatgtcccatgaagatacaatacagaaaaaaatacagaaattaaaaaagtttttataacagtatttctaaatctcagcaagttaaaaagcaatagttaaaaagcatcaagattaatatacttaaaacttaaggtggttttggacaaatgaaaatgaacatttccttcctcagtggcccccgcgccttgtggcttcctttgagactgggcctagggcaggaacagagtcttggtatgggcctcgggtgacccgtgtgcccacccctgctaggccttagatgccacagaatctgagatccagcaatggttcactttaaaaaatcagtggaagggcctggcctgcacacaaggcccgggagtccataggcagccacaatgagacacgtgggtgggggggtcccggtcttggtgctgagggaggtgtgcgggggcctgggggccgcacatccttactctggaccccaggacctgactaggcagaggcgaccttgtgatgacagaaaatgacttgcctaaggccgcctgtgaggtgggaggggaggagcatgcagccctgactcccacgcctgctgccccgggagggggtgcctgggtggggaagctatgttggggtctggtgtgggggccctgcccgggcctcaactgctctccctgtgcaggcagtcggcaggcggctcggggtctaggggtccagggccggccggcccagtcgcttgtgtgagcagagtaccagctgcttctggaagttgggggcctccacatcatgaatcccagtcaaggctcacaggccagcccccttggaggggtgggccgggcagagagcccagcaggatgctcgccctcagcagccccttcctggctctggactctggaggggcagggcttgggcccgggcagacggtgcttcccaggccaggtgagttcagacaggccagtgtcacaaggacgcacgtcctagcgccaggctccctgggctctgcagcgttgtctgccccagcacagggccaggcatctggctggctgcgtggccccctcttggtccctcttgcagctcaatgggtgacaaggcacagcatcagggcaccagcaccaggaggggctgacagcagacagcaggtcctggtgctccctccagcctcaccaggcaaagccggccctgggccaggctgggtgtagggccagggcgccacgaggagcggaggtcagcggggattgtcaaaaacagtccctcaagttgagtctcgaactttgaaacagacaaaaccttcgctgcatgacaggagcagccctggagtctcttaaaggcaggtgggcagaggcagtgctgccgaaggggcctgggggctgtaggcatcttggggctggaggcagatcggggaccacaagctgttggccagctctgccatgctgaacttgggtgccagtaccacaccctgccctgggcatgcagcaactgtcagccttgctgccccagcttgcgcactggtgagggccaggctgctctctgcaccttggcttcctgcctcctaggccggggtccccttgtggccttggtgttggctggggtagctgttgaggatgggcctgggaggccagagccgcagccccacccggggggcaggcaggggttcctgagctcagccggcacgcaggtggggcacgtccccagggagggattggtcccgaaccagagaggtgtcccgtgggggagaggattggcagaaagaagaggatgtgttggttttgatagaagagaagctacaaatagattattttcaaaatcaggatcccccccacccccgtttatgctgtgagtcccttcttcctgtaaaaaaaaaagtggatactctcttctcggatccccgtttatggctccactgcccagatgggaggctcccggaggaggcccagggtgccagagcctgccagactctgttgtgcctgagctggggaagggaccctgtctcgggaagagcaaagttctatgagtgacttacagaccctgtgaagtgagggttggttttgtgattaacctttttctgtttttctttttaaaatgtaattgcccttgaatgcgagaccctgggaagagccctgggctggctggtagagatgcagccctcggaccctgcaggagccggcccacactggaggcgggagagctggtggccgtgcccaggaagtgcttctttggctggttctgattgtgtttggagtttggccttgggtgaggcccgagcaaggggtctgtggctacagcgtggcacgtggcatgcgggcagcgtgcatgcgagggtgcaggcatgcgagacgacattggcagcagacaaaaataaagaaccctggacgaagcttaagaggagatacagagagtacacgaacccggtcctcatactaacccacgggttacaaactcggttgtgctgtagatttgtagaaaatcgtgttgtgaaagaatggcactggttaggcagctggaggctcctggggcgggcctgactcctctgtccacagtgaggcccagaggcgcagagcagcgcagcttccaggttcccgggcactgactgtggctccctccctgtccctgccctcctcccccaagcaccgggcactcgatggaggggacatggcccagggatgggctgcagctgcaagggctggcagaggccccgctgctccggacggtctatgcctcctcctcccccgaagacaccatcagtcgcatggctactggcaggtggtccgtcaggccggacagctgggtgataaaactgaattcttccacctcctggggtgagtgggagaggggagaaacagcctggtcagattccaagggcatcttgcagggagcggcctggggatccccaaagtgaggccccggggctggggtgggctgggaccttcctgcagtcagagggatggggcctggaggacctggggccctaagggtctgagggagtgatgggtatcattgtaagagtggcctggggcgtggggtttcagggagcggctgtcgagagctgcagggcccgggccctgctctctctttgcatggccctggctgctgggccctcctgactcacggccttccagtctgggcacagcccctcctctgcatgcagcatgtagtcgatgcgccggccgttgcccttcagcagctccttccgccccttctggcccgagctcttgctggtgggaaacgcca

SEQ ID NO: 1386 - DNA, 442 bp, Homo sapiens
aatccctttctggcactgttgccctgagacaagcagtatgcccgtctgcttcctgccagcctgtcccctggggcctcagcaccactgggccagaggcttaggaccccctcctgggagcccccattgcagagggcaggctggggccagggcctgggatggcaagtgcagtggtgagagaccctgcaaaggccgccaggtctgtgagtgcctggacggatgcaaaaggggcacccggcgaggcagggcctgcaaacatgggcttccacaaggttttcatcagccttaagataaatacactaatgacattcaggacattgttacagctcagaaatggaatccatcactgtcctttgcccttgataattaattccagcatcaatgatctgagagctactggtagtcatttttaaatcatcatctcataaaaagaattttctcagca

SEQ ID NO: 1387 - DNA, 442 bp, Homo sapiens; identical to SEQ ID NO: 1386

SEQ ID NO: 1388 - DNA, 3026 bp, Homo sapiens
agccctgctgagcgaccccgccagtcgggtccatcctgcagtaaatgcacaacccggacggaagtgcctctccgacagcagatccaggctcggagctccagacgctgggacaggtgacccggggcggtagcgagccggacggccttgcaggtggggcggaggtcccgaggagctcctcgggcgcggtcgtctgtgggctctgcgcgccctggaggtcgaggctccggcagcgcgggggttaactcgagccggtcccaggctgcgcggcgacgtcagagttcatttacatagcgcttatttgggttgcgcagtcgtgggcggggtctggacgtcgctgcggaccaatcgcgtgcgtctatgcaaatagcggtcgttctggggaactctgctcccgcggggtgagagttggccgctcttcggccgagctgcccgcgcgtcctttctccgtgcgcgtcgtcaggcgtgtcctctccgcgtgtccacccacaggccgcccgcagaccacccccgccgcgcgcgggacacgacgccccccgcaggacccgcccatcagcccggaaacccctgagctgcttctcccggaggccgatgcccacccgggagcccccaaagactcgcggctcccgggggcacctgcatactcacccgcctgggcctgggcccccggtgagcctgaccgggagggggtccccaggccgggcctctaggcaaaagatttagcccctccagtttgagggactccggtttcccgacaccccgatttaactccagaccacgattcctgtggcagctgcagggactggcgccccgaggcctcaaaaccagcgccccccgccctccgtgccagccccagccgggaccccacaaggcaaagaccaagaagattgtgtttgaggatgagttgctctcccaggccctcctgggcgccaagaagcctattggagccatccctaaggggcataagcctaggccccacccagtgcccgactatgagctgtgagtgtcccccatgtgattcttcatgcctgggatcaggagaggggcactgaggctggggctttgatagttgaataagagtttaccaaagagtagaaaggaaaggatcccttgctgatcagtagtgggattgtccctgtgaataagccactgcactccagcctgggcaacacagtgagatcccgtctccgaaaataaataaataaataggcgaggcgcggtggctcatgcctgtaatcccagcactttgggaggctgaggcaggcggatcacctgaggtcaggagttcgagaccagcccggccaacattgtgaaaccccgtctctactaaaaacacaaaaattagctggatatagtggcgcatgcctgtaatcccagctactgaagaggctgaggtgggagaattgcttgaacccgggaggtggaggttgcagtgagctgagatcgctacactgcactccagcctggacaacagagcaagactctatctcaaaaaataataataaataaattaaaagagggagagaaaaggaacgtttctagtaggggcccagcatggacaaagaaaagcaaattacactgactgggggaaagagtggggttctttacactcacactctgaccctcttcaacctggtagtaagtacccgccagtgagcagtgagagggaacggagccgctatgtcgcagtgttccaggaccagtacggagagttcttggagctccagcacgaggtggggtgtgcacaggcaaagctcaggcagctggaggccctgctgagctccctgcccccaccccaaagccaggtcagcactagggagaaagccctgccccgcagcccttctgagtggcccgacccaagcctctgggacacccactgggtccagatttccaggactctttctcctctcggttggctgggcgccgtgacacatggctaaggtcagcccttgaagtccccactagatgggcatttagtctgtctgagcctcagtttcttcatcccttcttgaattcaactctccctaaaccccctttctactcctccccttgcagaaggaggcccaagttgcagcccgggtttggagggagtttgagatgaagcgaatggtgagtcttgcatcccacagcttggtcttgcacccctgagacttctgtgaggctggggtgcctgtgcccagtttcttttttttttctttcttttgagacagaatctcgctctgtcacccaggcgggagtgcagtggtatgatctcagctcactgcaacctcagcgtcccgggttcaagcggttctcctgcctcagctgggatcacaggcgcccaccaccgtgcctggcaaatttttgtatttgtagtagagatggggtttcaccatgttggccaggctggtctcgaactcctgacctcaagtgatccgcccacctcggcctcccagactgctgggattacaggcatgagccaccttgcccggctcacccggtcgcctgtgcccagtttcaaggagagaaaattgaggctcggagaatgaaaggcagagagttaagcagcttgaaggccacagggcagactgctgcaaagacttccgggtctcgccctgcctaggatcctggcttcctggacaagcaggctcgctgccactacctgaagggtaaactgaggcatctcaagactcagatccagaaattcgatgaccaaggagacagcgagggctccgtgtacttctaagtgcccctgcagatgggcagagggatgcatggggatgcaggtcccttgcatttcttggtatctctcagcttttcctcttgcagctccccctaccaggggtcgctttctcctggattgcaaatgcctcttcagtttggactcagctctgacagcccctcctccaggaaggccttccaggacttcctcctctgggtcctctagctctgaccctacagggactccagatctcaacctgttccctggaagtagggcctgctctccatcccagtgaaataaacatgtattagacacctactgagtataa

SEQ ID NO: 1389 - DNA, 146 bp, Homo sapiens
tttttgtttgagactgtgtctcactctgtcgcccaggctggagtgcagtggcacgatcttggctcactgcaacctccgcctccccggttcaagtgattctcctgcctcagcctcccaagtagctgggattacagacacctgccacc

SEQ ID NO: 1390 - DNA, 10093 bp, Homo sapiens
aaaagcaagtgattcgcctaagtaagaatggggtggcgcctctcctatttttttaaaatagagatagagtagcgctatcttgcccgggctggcctcaagcaatcctttcccacctctgcctcctaaaatgctggcattacagccctgagccaccgcgcccggcccagcgccccgtctcaaaacaagatattacttccgctccaaacaaagatgggccagctaacgagcgcgggggaaacatccgcccggaaggccacttgaaggcacttccgccctctcttaacatggagccggcggaaggggtggtgtagggccgggcgataatggcggcgtcgaggctggagctaaacctggtgcggctgctatcccgctgcgaggcgatggcagcggagaaacgggacccggacgagtggcgcctggagaaggtgaggggatctcgcactgccgcgtagagcccgactcccggggggtgattcctagggttggaagccacctggcccgactccccggccccagtagcctctcgggcagcgccctttccggtcagtcccgccacgtccacctgtagcttccgcccccgtccctgggactccgcccctcccccactggccccgcctcctttacgcttgacccctcccatttgtcggccccgcccccccgactcccatgatcaggtcatgggaaagacccccgggtgacaatccacttttcctccccagtacgtgggagccctagaggacatgttgcaggccctgaaggtccacgcgaggtgagtgcaggcagcctcagggctttcacatcagcacgtggctgtgctactggacatcccagtaccgctatcccagctgggacccttccctgagctggggaccatggacaggttttgtttttcttcttcctgccttccagcaaaccggcctctgaggtgatcaatgaatattcctggaaggtggattttctgaaggggatgctgcaagccgagaagctggtgagaaggggtgcccctgccccctcagcccccatcaccgctcactttggtccccaggacctgcccctccagtgacttatcttcccacatttctgcagacctcctcctcagagaaagcactggccaaccagttcctggcccctggccgtgtgccaaccacagccagagagcgagtgcccgccacaaagacggtgcatctgcagtcacgggcgcggtacaccagcgagatgcggagtgagctactaggcacggtagggctccttccctggtccctgggaatcccttggacaggaataggggttctatgcttgtaggcagccagaaccacaatactgtcagatacaggaaccctaagggggtccagcaatctcttccctgggtcatcacacaaggctgcccaacagaggggcattgtggctaaggctttgctagatgaataggaatttggtacaaggcaaaaatggaatgtgtctggttaagccccagagttggcccaagagcagggtttgagtcctggcttgcaacttacaagacacataagtttcttcagccgtaaaagaggatgacaagttcctttctgagcactttatgtggatcagctcaatcttttaaaatatgagttgttgtggccaggtgcggcagctcacgcctgtaatcccagcactttgggaggccgaggcgggcggatcatttgaggtcaggagttaagaccagcctgaccaacatggagaaaccccgtctttagtaaaaatacaaaattagctgggcatggtggctcacgcctgtaatcccagctactcgggaggctgaggcaggagaatcgcttgaacccaggaggcagaggttgcggtgagctgagatcaagccattgcactccagcctgggcaataagagtgaaactccgtctcaaaaaaaaaaaatatgagttgtcgttaccagtttaaggttgaggaaacaggctcagaggtcatgggatttccccatgtcctgactgaaggtgaggaggttgaggtcagaagggacaggtttgggaacaagacaaggggggtgacttcatggcatttacttttttttttttttttgcgatggagattcgctcttgttgcccaggctagagtgtggtggcgcgatctcggctcactgcaacctccgcctcccaggttcaagcaatactcctgcctcagcctcccaagtcactaggatcacaggcacccccaccacacctggctaactttttgtatttttagtagagatggaatttcattatgttggccaggctggtctcgaacttctgacctcaggtgatctgcccaccttggcctcccaaagtgctgggagtgagccactgcacccagcctcatgccacttacttctttccacaggactctgcaggtgagtcaccatgaacacaacaggacttgagggccagctgactaggacaagacatgtatccttgctgccccggggcctccatgccgagactccatgccctgactccaacaggagcatcaccaaactacacctggaggaagagccaggacagaggaaatggccccgagaggaaacaaagctaggcacagtggctcacacctgtaatttcggaggctgaggcaggtggatcacctgaggtcaggagtttgagaccaacctggccaacatgacaaaaccatgtctctactaaaaatacaaaacttagccggatgcagtgccacgtgtctgtagtcccagctactcgggaggctgaggcaggagaattgcttgaacccaggaggtggaggttgcaatgagctgagatcacaccactgcactccagccggggcgacagagcaagactccgtctcaaaaaaaaaaaaagcaaaaaaattagccaggcgtggtgacgcacacctgtagtcccagcatacttgggaggctgaggcaggaggattgcttgagcctgggaggtagaggttgcagtgagctgagattgcgccagtgcactccagcctagttgacagagagagactctgtctcaaaaataagcaaataaataaattttttaaagctaggcactcccagcctatgggaccaaggctaggctggagggagggacctggggtctgagggaaccgagacaggagtaaggagaccctcctagaagagggggtattcaagcatggtcagaagccaacggggcagcagacaagatgaggaaacagcattccaagcagtagacccagcacaggcaatgctcaggatgccggaaacgggaaaccaacactcgccttttttgcttggcctgttttgctttcagagcctgagatggacgtaaggaagagaacgtgagtgtctgcggccctggggcagtagtggcaattgggcggtgcggcagggacggggtagcagtggccaaaccctggaccaccgaggcactaccacaaggatctaaaccaaccagaagccacttctgtggatgctcttcccagaagtcaaaggccaggcgcagtggctcacgcctgtaatcccaatactttgggaggctgaggcaggcagatcacctgaggccaggagttcaagaccagtctggccaacatggcaaaaccctgtctctactaaaaatacaaaaaattagccgggcatggtggcatgcgcctgtagtcccagctactcaggaggctgaggcaggagaactgcttgaacctgggaggtggaggttacagtgagccgagatcacgccattgcactccagcctgggtgacagagcgagatgctgtctcaaaaaaaaaaaaaaaaaaaaaggtcgggcgcggtggctcacgcctgtaatcccagcactttgggaggccgaggcaggtggatcacgaggtcaggggttcgagaccaccctgaccaacatggtgaaaccctgtctctactaaaaatacaaaaattagctgtgcatggtggcaggtgcctgtaatcccagctactcaggagactgaggcaggagaattgcttgaacctgggaggcagaggttgcagtgagccgagatcatgccactgcactccagcctgggcaacagaacgagactctgtatcaaaaaaaaaaaaaaaagaaaatgtgttggtcttctcccctttcccactccatctctcatgtcctcctccccccgtgtgtgaaatcagtggagtggcagggtcccagccagtgagtgagaagcagtcggcagctgagctagacctcgtcctgcagcgacatcagaacctccaggaaaagctggcggaagagatgctaggactggcccggagcctcaagaccaataccctggccgcccagagtgtcatcaagaaggacaaccaggtgtggggactgggggagctctccagcctctgccctggggcatcagagaaggcttcccagcacaggagcattgtggctggggctttgcgggatgaataggagtttcgtagaaggcaaaaatggcattcccagcagagggcacagcaccagcaagcgacaagaggtgcaggccagtcccagggaagtagagagaggccattcttggccccagtcctgttgacaccttttccacctcccccacagaccctgtcacactcactgaaaatggcggaccagaacctggagaaactgaagacggagtcagagcgtctggagcagcacacgcagaagtcagtcaactggctgctctgggccatgctcattatcgtctgcttcatcttcattagcatgatcctcttcattcgaatcatgcctaaactcaaataaagacccccgcccaccttgtctgtcttccgtctgtcccctgcccccatctagcagtgcctttcaggctggccaatgagatgggagggtttttggaggtccctgaagagccacagacagacagtgcatgagcaggggaagaaccacctcagggccagatgcgggggctcacgcctggaatcccagcactttgggagtccaaggcaggtggatcacttgaggccaggagttcaagaccagcctggccaacatggtgaaaccccgtctctaccaaaaaatacaaaaatcaggcaggcatggtggcgcacgcctgtagtcccagctacttgggaggcttaggcacgagaatcacttgaacccaggaggtggaggttgcagtgagctgagatcccagtactgcactccaacctgagcaacagagcgagactccattgcaaaaaaaaaaaaaaaaagattctaaaaagaaaaagtcagtcttggcaggtggtgactcatcaaacgctgcctccgcccatgttcctctggagcctaccccacaatggacgaggcccagccccaggaggccctaggagcctccgactggcagacttgtagccgaacacagtgccttcagcgatgtaaggccagggtgaggccaaagggcagaacaggggcttggagggtcggggaggagtggggccatgacaggagctcagcctggaggagggcgcatcaacacgaggtcttccctggaattaaaggcaatagttcaaggacacagctcagccacactgcagcctcagctctcgggacactacagatccctcacagtcactcgacaaacacacatgggtcgtgcccagtgctcactggagactctgccctccccaggtcacagtctgatcacttcaaaggagaactgggtgagtactagggtaggggtcctgaaaagggtcgtggagtaggaattctggggtcctgagccctgctctcacaccagctccagacagggcacagcctgtgagagcaactgagggggctcagtgacgagggcttggggtgtctgccccatggcagcattgacggcattgtggggacacttggaggtgcccagtggacccccactgacgtgggtgtaaaatccttaggtagggttgtgtggttttttttgttttgttttgtttttgagacagggtctcgctctgtggcccaggctacggtgcagtagtgcaatcatagctcactgcagcctcgacctccaggcctcaagcaatcctcctgccttggcctcacaaagtgctgggattacaggcatgagccactgtgctcagcccaagtagagatttttaaaagtgctactggcagcttttaaaaagtagaacatagagccaggcgtggtggctcatgcctgtaatcccagcactttgggaggctgaggcgggcggatcacctgaggtcaggagttcgagaccagcctggccaacatggtgaaaacccatgtctactaaaagtacaaaaaattagctgggcatggtggtgggcacctgtaataccagctacttgggaggctgaggcaggagaattgcttgaacccaggaggcggaggttgcagtgagccgagatcacgccactgcactacagcctgggcgacaagagcgagactccatctcaaaaaaaaaaaaaaaaaaaaaaaaaagatcataagaaggagacagccaggcatggtgactcacgcctgtaatcctagctactggggagtctgaggcaggaggaccccttgagcccagggactggaggctacggtgagcagtgatcatgctactgcactccagcctgggtgacagagtaagacccctactcaaaaaaaaaaaaaaaaaaaaaaggaagtttatgcctgagacacagggatgattccttattagaaagccacgttggccagggcaccgtggctcacaccttgtaatgccagcactgtgggaggctgaggtgggaggaccacttgagctcaggagtttaaggccagtctgggcaacatggtaaaaccctgtctctacaaaaaatactaccagctacttgggaggctgagacaggagaatggcttgagcccaggagttcgaggatgcagtgagctgtgatcacaccactacactcctgcctgggtgacagagccagaccctgtctcaaacaacaacaaaagccagctacattaatgcctcagaaaacaaaatcacagatgctgaaatgacaaattgtactgtttagcctccgttacccaaagtctcctaatttaaaaagaaaggaaatagatggacatgttcctcacttcactgaaaaatctcaagccaaagggagcattgactttaatgggcaaatactcaaaacttctgccatcaaaatgaggaataggccaggtgcggtggctaaagccacctgtaaccccagcactttgggaggccaagataggcagatcacttgagctcaggagttcgacaccggcctgaccaatatggtgaaacctggtctctacaaaaatacaaaaattagccaggcatggtggcacgcacctgtaatcccagctactcagaaggctgaggcaggagaatcacttgaactcaggaggcagaagttgcagtgagccaagatcgcaccactacactccaccctgggtaacagaatgagactccatctgaaaaaacaaaaacaaaaaaacggggggaatggaatggggaaggatgcttacagtcgccctgcctccataatgtaacatagtcttgaggtggtagtcagcacaactagacgaaaaaaagaggctgggtgcggtggctcacgcctgtaatcccagcactttgggaggccgaggcgggtggatctagaggtcaggaggtcgagaccatcctggctaacacggtgaaaccccgtctctactaaaaatacaaaaaaaaaattagccgggcatggtagcgggcacctgtagtcccagctactcgggaggctgaggcaggagaacggcgtgaacccaggaggcagagcttgcagtgagccaagatagcgccactgcagtccagcctgggcaaaagagcgagacttcgtctcaaaaaaaaaaaaaaagaaaaaaaaagaaaaaaagaaatggggccaaatatggtggtgcacgcctgtggtcccagatacttcaaaggctgaggcaggaggattgcttgaggccagaagatagagactagcctgggcaacaatagcaagaccctgtcaatagaataaataaaatgccaggcatggtggctcatgtctttagtctcaactacttgggaggctgaagcaggaggactgcttgagcctaggagtttaagacctgactgggcaacatagcgagaccccatctctaccaataaaaatttaaaaattatccaggtgtaggccacctggttggctcaccaggccacactggccaagatggtagaaccctgtctctactaaaaatacaaaaattagccaggcatggtggcgggcacctgtaatcccagctactcaagaggctgagccaggagaattgcttggcccaggaggcggaggtagcagtgaaccgagatcacaccactgcactccagcctgggagacagagcaagactccgtctaaaaaaaaaaaattatccaggtgtggtggtgcgtgcctatagtaccaattattcaggaggctgaggcaaatgatcacttgagcccaggagcccaagtgatcatgctgcactgagctatgatcgtgccactgcactccagactgtgcaacacggtgagaccccatctctaaaacaaacaacaagaaaaaaagaaatgagattgaaaaataagagaagaaaaataagaaatgagaaggcaaaattatttgcagatgatatgaccgtatatatgataggcccaagcgatgtgactaaaaatatttcaataaaagaattccttaagctagcaagagacttatagatatttaaaaattcatttcttgtatactatatatgtatatagctttaaaatgtattaaagcatcccatttatagcagcaataaaaaaagatacactgcctgcttaaacgaattttgttgacatttgaagaactttttttggagtcgcccaggctggagtggtacagcagcacaatcgtggctcactgcaacctccgcctcccggtttcaagtgatctcctgcctcagcctcctgagtagctgggattacaggtgtgtgctaccatgcctggctaatttttgtatttttagtagagacggggtttcaccatgctggccaggctggtcttgaactcctgacctcaagtggtccacccacctcggcctcccagagtgctgggattacaggcataagccaccttgcccggctgacatttgaagaacttctaaaaatcaacaagaaaaaacatttgcaggatataacaggaaaagaattacgaaatagagaaatagtctctaaattttttcactcatacactaggcaatatttccttttttttgagacagtctctcaactgtcatccaggctggagtgcactggcgcaatcttggctcactgcaacctctgcctcccgggttcaagcgattctcctgcctcagcctcccaagtagctgggattacaggcgcccgccgtcacacctggctaattttttatatttttagtagagacggggtttcactatgttggccaggctggtctcgaactcctgaccttgtgatccgcccgcctcggcctctcaaagtgttaggattacaggcgtgagccaccgcgcctagccttagtaggcaatattttcaactttgaaagtacaggtgaggggccagcgctgtggctcacgcctgtaatcccagcacgctgggaggccgaggcaggcggatcacgaggtcaggagatcgagaccatcctggctaacacggtgaaacctcgtctctactaaaaaatagaaaaaattagccgggcgtggtggtgggcgcctgtagtcccagctactcaggaggctgaggcaggagaatggtttgaaccctggaggcggagcttgcagtgagccgagatcgcgccactgtactccagcctaggagacagagcgagactccgtctcaaaaaaaaaaaaaaaagaaaagaaagtacaggtgagggaatccgttatcatgccagtgccgccaaggttgtgggaaaacccctgtatctcttggagcataaatggtacaatctcactaaggagtaacttggcagtatgttccaaatgtaaaatacacacatcccagacaggaggctgaggcaggaggatcgcttgagtccaggagttggaaaacagcctggacccataaggacatttcctctcaaaaaaaaaaaaaaaaaaaaaaaaaaaaaa

SEQ ID NO: 1391 - DNA, 935 bp, Homo sapiens
cttctgaagattcacagagtccataaatgtccttgtcctccctttggcttaaattagttcatctatgttttggtcactttcagcaagatgagttacaagaacccagtcaggccaggtgtggtggctcacgcctgtaatcccagcactttgggaggccaaggcaggtggatcacgaggtcaagagattgagaccttcctggtcaacatggtgaaaccctgtgtctactaaaaatacaaaaattagctggacgtggtggcatgcacctgtagtcccagctactcaggaggctgaggcaggagaatcgtttgaacctgggaggtgaaggttgcagtgagccgagatcacaccactgcactccagcctggtgacacagcgagactccatttcaaaaacgaaacaaaacagaacaacaacaacaacaacaacaaaaaacccaaaaagaacccagtcatcacagaatctgtacatggcctgtgggtggtagatgctggccctacacatgaacggttccatggtcctcatccatgacagagtaggacctatgacccagatcctttggcagtgagttcagtgctctttcttcttatgccatgctcggccatgaggagaaatcctgaagttctgcacattctttgaaaaaacacagtgatggaagtgagacagattgtgggcacagggccatagccctgttgaatctgcacttgttccacaaggtttgagttgttccctcagactttcagaaaatcattgttgtgctaatgtttcttcttgctttcttttaaggaaaagtgtttgagaagagtacaacacagccaccaccattttttcctaggtcaacaagcacgcctgtgttctgataattaagagtcctaatgatacacatctaatggtaaaaagttcagggttactgactttagtcatggctggatccagg

SEQ ID NO: 1392 - DNA, 337 bp, Homo sapiens
gtctccttgtgatccttaaaaaaagatttgagccctgtttgaggttgatcttttatatgaattaaaagtaattatatctcaaagaatcagtgtaaaatgtatgtattgtttggtttcatgaccctttgttattacttaccactctaccactgcagttcctaggtactttaattcagttgccatccttcccactctctctgagctccataatagtgctgatttaacaaatactcactaaatagacaaaaccctacttaccattaattatgaactgaaatgaagcataaatgtggaataaataaaggatataatgagaaaatgtacaaaatgcttcaaa

SEQ ID NO: 1393 - DNA, 485 bp, Homo sapiens
ccagagattgtatttgtatcctttttctccactcggaaatgctttttatactgccttgaatagtaccatgtatttatgtattttaaaggtgttttaagacatgcttggtaaagatgttattaattgcttatgcatatttcactgattgacatatacaataaaatagtaaattattaaactttttaaacacccagccacaaatattgtttccttgatattgcatgacaactttgcatagtgctctattaagtatttaatataaacaagatatctctctctccacccacttttcctctccgtcttctctccattgcaacttttctggaaacttcttcctagtccagtagtagctggaagagaattcctcttattccaaaaaagtaatctccctatttcaaagtacaaataaatcaatatgtttgcagatcccagcttcatattgtatggcggtctttaaaaaaaaaatgtggttaaaaaaaaaaaaa

SEQ ID NO: 1394 - DNA, 1124 bp, Homo sapiens
cccgggttcacgccattctcctgcctcggcctcccgagtagctgggactacaggcgcccgacaccacgcccatctaattttttgtattttcttagtagagacggggtttcaccatgttagccagggtggtctcgatctcctgacctggggatccacccgcctcagcctcctgaagtgtagggattacaggcgtgagccaccgcgcctggccctggtttctgttaaactggacatgccactttaacattagctcattctttatttgcttagccaattatatacatttttacccttgcaacaaagaaggataggcatagatgttctggacttattgttgaaggagaatccaggttaataatctgactaggctagtggacaaatttaagtaaggaaaggaacatagttaactatcataggtctgatacacacgtttcagtgttaaagaggaatcactaatagtctattattcacagataaactgaggtacatgaaaatgttaaagagtttattttagcaaataaactcttgaatccagcaatcccagatgataagtggctcaggagttccacccaagaaacatgaggtgaagacttttgtcagatgaatacagaagcaaggcaaagaaaatagtttgattggctaacgtggagcggtagccttatttggatcattcaaatgaaaagtccccagttagagattagtttcgaattgattacacttaattttcgttttcctaaaatgtgattgttacactgagttgggtttcagtttgcttacataggatcccaggatgctgggtcccctcagtcttatggcctcctgattaattaattttaacactaggaaactgggaaacagaatctgggactgaagaagagggtctgagctaagaaaaaagtcctaaacagaggtcagagacactaggcaaaggaaaaagtgtgccaggaattcaataaacttggtgtggagctaaagcctttacaattatgggctttcctactgataagagtagatcactgcaggaaggacactcagaggacacctggtctatgaggctattggggaggatggaactccatctaccacaagtgagatttggtattgtagaaatagccaaaaaaaaa

SEQ ID NO: 1395 - DNA, 647 bp, Homo sapiens
attaccactgttgacggttattttcgtcgccgtggggatctggggcggatctctggtcggcgtcagttggaaaggcattgatagcgggttcttctggtcggcaatgcaaaatgccgtcgactggcgtatggatctggtcaactgtctgattaagagcgtggtgttcgccatcacggtgacgtggatttcgttgtttaacggctacgacgccatcccgacgtctgccgggattagccgggcaaccactcgcaccgttgtccactcgtctctggctgttctggggctggattttgtgctgaccgcattgatgtttgggaattgagttcatgcaaacgaaaaaaaatgaaatttgggtgggtatctttttattagcagcactgctggcggcgctgtttgtttgcctgaaggcggcgaacgtgacgtccatacgtactgaaccgacctacacgctttatgcgacgttcgataacattggcggcctgaaagcgcgctctccggtcagtattggtggcgttgttgtgggtcgggtggcggatattacgctggacccgaaaacctatctgccgcgcgtaacgctggaaattgaacaacgttataaccacattccagataccagttcgctgagcattcgtacttccggcctgctg

SEQ ID NO: 1396 - DNA, 346 bp, Homo sapiens
caggtggggcttccactcccacctcttagtcccaattcatctccatctcaccctccccacgtttctctatccaaacccagccttcaaggtcctatattttaaccacagggaaaccacttccctgtgctgtctctgttgttcaactaacgacaactaattttctgagcacctacattaggcaaggcccatcctgagtgctgccaccaagaggtaagtcagaaacagcccccaccctccagagtcagaggacagggcagcgataagccacaccgccacacaaatactatgcaaggcgagagatgagaaccgagtcagtgccagaagggctgagtgagctcagagcata

SEQ ID NO: 1397 - DNA, 411 bp, Homo sapiens
ccggcaagcacgccgagcacggtaatcaactggcggaaatttgccgccagcccaagccccgccggaccaaatgacaccgccagcaacttaccgaccagtaacccggcaccaatcttgaccagtgtactggccgccgtccacaaggacgcttttgccaacgacatatcaggaaaagtagttcaacaaagtcgcaattaccgtacgctgattgacgggcgacaggttgtagaacagcggcaggcgcagcaggcgctcgctctctttggtggtgtagcgatcttcaccgtggaactcaccaaagtgttcccccgcagggcaaccgtgcagcggaatgtaatgaaacaccgccatgatttcccgcttctttcagaaagttaatcaacgcgctccggtcatcaatatcccgcagtt

SEQ ID NO: 1398 - DNA, 417 bp, Homo sapiens
gcaatatcagaatgttcttttccaagtttgtgggtttttttctttttctctttgaccgataaacatgtaagttagctgctgtgaaaatggcaggttggtgtaacctatgtaaaaaacatatatgcatgtgatcaaagcctagaaaggaatctgaatgaaggttaagagatataggaggaagaactatgtctaattttctttttcattttgatatattggttttaacgttaaaaacttgaaaataaaaataatgaatctgtttcctggaatataacaggctagtttatttggactagccctctgtttttgaaaaggattttcaaatactggattttaaaaatccaacttctcaaaagtatcaaagattatgaaaatattaaggtaaagcctgagaggtcagcagaatactgaaactgc

SEQ ID NO: 1399 - DNA, 500 bp, Homo sapiens
gagaaacattagaataccttcaaagatacaatagttagattgacagttgacttctcaacaacagtggaagccagtagagtgctatcttgaatgttgatgaaggacaataactgcctacctaggattctaaacccagtgaaaatatatgtcagaatgagggctaattaaagacattttcaatcaaaagagagttttctgtcagcacatcttattgaaggaaattctaaataatgtatttcagatggaaggaaagtgatctcagatggaaagtctgaaaagcagaaagaaatgaagaacaaaaaaagtggtaaagatgtgaaaagactagtcacagggagaagacattgctatatatatttaatagcaaaggactagcatttagaatatataaagaattcggccaggcgtggtggctcacacctgtaatcccagcactttgggaggccaaggtgggcagatcacgaggtcaggagttcaagaccagcctggccaacatggtg

SEQ ID NO: 1400 - DNA, 170 bp, Homo sapiens
  SITE (10): n equals a,t,g, or c
atcctttatntacaaatagacagctgtgtgaggtcaggggtgagtttttacttctgtgttcatagaacaggacagtgctgtcagtatgtggtgtgtgtgtgtgtgtgtgtgtgtgtgtgtgtgtgtgtgtgttttgttttgttttttcagacagagtttcactctattgc

SEQ ID NO: 1401 - DNA, 597 bp, Homo sapiens
  SITE (5): n equals a,t,g, or c
ggggntggcgtgatgtgtaacttcttcgcccagtcggctgaaaacgccacgctgaaggatgtgagggcaacgagtacatcgatttcgccgcaggcatgcggtgctgaataccggacatcgccaccctgatctggtcgcggcggtggagcagcaactgcaacagtttacccacaccgcgtatcagattgtgccgtatgaaagctacgtcaccctggcggagaaaatcaacgcccttgccccggtgagcgggcaggccaaaccgcgttcttcaccaccggtgcggaagcggtggaaaacgcggtgaaaattgctcgcgcccataccggacgccctggcgtgattgcgtttagcggcggctttcacggtcgtacgtatatgaccatggcgctgaccggaaaagttgcgccgtacaaaatcggcttcggcccgttccctggttcggtgtatcacgtaccttatccgtcagatttacacggcatttcaacacaggactccctcgacgccatcgaacgcttgtttaaatcagacatcgaagcgaagcaggtggcggcgattattttcgaaccggtgcagggcgagggcggtttcaacgttgcg

SEQ ID NO: 1402 - DNA, 583 bp, Homo sapiens
ggggttggcgtgatgtgtaacttcttcgcccagtcggctgaaaacgccacgctgaaggatgttgagggcaacgagtacatcgatttcgccgcaggcattgcggtgctgaataccggacatcgccaccctgatctggtcgcggcggtggagcagcaactgcaacagtttacccacaccgcgtatcagattgtgccgtatgaaagctacgtcaccctggcggagaaaatcaacgcccttgccccggtgagcgggcaggccaaaccgcgttcttcaccaccggtgcggaagcggtggaaaacgcggtgaaaattgctcgcgcccataccggacgccctggcgtgattgcgtttagcggcggctttcacggtcgtacgtatatgaccatggcgctgaccggaaaagttgcgccgtacaaatcggcttcggcccgttccctggttcggtgtatcacgtaccttatccgtcagatttacacggcatttcaacacaggactccctcgacgccatcgaacgcttgtttaaatcagacatcgaagcgaagcaggtggcggcgattattttcgaaccggtgcagggcgagggc

SEQ ID NO: 1403 - DNA, 362 bp, Homo sapiens
cgtcgtctttctgccactccgcgcggggttggcgtgatgtgtaacttcttcgcccagtcggctgaaaacgccacgctgaaggatgttgagggcaacgagtacatcgatttcgccgcaggcattgcggtgctgaataccggacatcgccaccctgatctggtcgcggcggtggagcagcaactgcaacagtttacccacaccgcgtatcagattgtgccgtatgaaagctacgtcaccctggcggagaaaatcaacgcccttgccccggtgagcgggcaggccaaaaccgcgttcttcaccaccggtgcggaagcggtggaaaacgcggtgaaaattgctcgcgcccataccggacgccctgg

SEQ ID NO: 1404 - DNA, 105 bp, Homo sapiens
aaatccagcaacgcgcgctggcgcaggggctgctcctgctgacctgtggcgcatacggcaacgtgattcgcttcctgtatccgctgaccatcccggatgcgcaat

SEQ ID NO: 1405 - DNA, 384 bp, Homo sapiens
actaactcatgaccactctgttttcttctatatccaccaccacccaccctctactgtattattttaacgctaaatagttgagtatctgcaagataaggattctttaaagacataatgagaagaccattttaatcatgacaataattaacattaattgcttacatcatctggtatccgcacagtgttaacatctcagatcatctcataaatatctttctagaattggtttgttccaatcaggacccaacagggctcaccattggagttggttcatctgcgtgtgaagcctcatttaatctatggcttctccctccctccagctcactgcaacctccgtctcccgagttcaggcgattctccacctcagcctccttagtagctggg

SEQ ID NO: 1406 - DNA, 384 bp, Homo sapiens; identical to SEQ ID NO: 1405

SEQ ID NO: 1407 - DNA, 584 bp, Homo sapiens
cctgcagagattcaaatcttccttgtttttatgttcattcatttgacatttgccggtctccaccactgctcataccctgtcctgagcttgccaataaacagatgaaccagtccagtcatctcattgtgtgggcacggctgctccaggccttacctttgaccgggtggggccttgcgggtgtttgtcgaagtaatgagactgtggacattcccatctttctctctctttcccctgtcgtgcattgtcagaccttatagtctttggtgagttcctgctctacgccaaggaattagtcctttatgcttggggcaagaggtttttgagtatttggatttcttctgatctgaaactccattcctagacaaaagaacaataaagggctctactccattgcagaggcaagccctggtaacctggccaggggcgagccctgaccccagccactgttgtctgggtcataaattcttgagagcagtagcacgcttgaaatcatttagatgctttgggatcagttattcattatattgcacgatatctaagggcctctttgctgctagagattacaacacattcctcctgggggc

SEQ ID NO: 1408 - DNA, 441 bp, Homo sapiens
gaaaggagccatcagacaccaggatggtacctgtagatgatgccctccccacttttggttctttgattaattacacagatatttatggagcacctgttttgtacaggcactattctgggaactgggaagagagtaatggaaaagcaaacggggtctccacccttgcagagctcgtattttaaaagagcagctagatagtaagcaagtcagttacttagtgcgtcagagataaggggtgtgaagaaaaataaaggaggctgggcatagaggctctcaactgtactcccagcactttgggaggctgaggcaggaggattgcttgagcccaggaggtcaaggctgcagtgagccgagattgcaccgctgcgttccagcctgggtgacaggctaaaaaaaaaccctgcctaaaaacaaacaaacaaaaaaaaaaacaaaaaaaaa

SEQ ID NO: 1409 - DNA, 584 bp, Homo sapiens; identical to SEQ ID NO: 1407

SEQ ID NO: 1410 - DNA, 441 bp, Homo sapiens; identical to SEQ ID NO: 1408

SEQ ID NO: 1411 - DNA, 218 bp, Homo sapiens
cttgtttctgaagttagtataaatgatgtcacactttgtatactttttaaaaaattcatccctactagtgtatctgcctgtatatacttgatttattttattgtttttagttttctattatatgactatactgcagcttgtctcctttctttttgcttgacatttgggtagtttcctgttttttttgttttgttttgtttttgttttttaatgctatt

SEQ ID NO: 1412 - DNA, 218 bp, Homo sapiens; identical to SEQ ID NO: 1411

SEQ ID NO: 1413 - DNA, 357 bp, Homo sapiens
tggattcaatggttgtgattgaagatagtaagttttcaaaaggtaattaagtacatggtgaaataattttatatctggcacaaccattaattttaggggtgtttgtggtatcttaatgactgctatgttatagcttttattttgtaaatttgttaacagaaaggggtcctgatccagaccccaggagagggttcttagatcttgtgctagaaagaatttgaggtgaatccataaagtgaaagcaagtttattaagaaagtaaaggagagcagccctaaggcctgctggttgcccatttttatggttatttcttgattatgtgttaaacacggggtggattattcatgcctcatttat

SEQ ID NO: 1414 - DNA, 358 bp, Homo sapiens
tggattcaatggttgtgattgaagatagtaagttttcaaaaggtaattaagtacatggtgaaataattttatatctggcacaaccattaattttaggggtgtttgtggtatcttaatgactgctatgttatagcttttattttgtaaatttgttaacagaaaggggtcctgatccagaccccaggagagggttcttagatcttgtgctagaaagaatttgaggtgaatccataaagtgaaagcaggtttattaagaaagtaaaggagagcagcccttaaggcctgctggttgcccatttttatggttatttcttgattatgtgttaaacacggggtggattattcatgcctcatttat

SEQ ID NO: 1415 - DNA, 8807 bp, Homo sapiens
agaagcagaagtgtcagaacactccacaggtataacccatcttcctcctgaggtaatgctgtcaattttcagctatcttaatcctcaagagttatgtcgatgcagtcaagtaagcatgaaatggtctcagctgacaaaaacgggatcgctttggaaacatctttaccctgttcattgggccagaggtaggtaaatgggtttttaaaatattttcatgtatttttctagatgaatattcatttacattaatgagcaaggccagagagagaaactctgagaggtcaatcaaaaagtagattttatagttagatgatgttttggtggtatatatttttggaaaactagcagtgatgaaattcatgggtaaattataatgatgtctgtaattaaaaaaaattaggaaaatatatttgtgggaggggatgcaaaaagattgacaaaattgataattattgaagataagtgatagatacatggggattcattatactagttctgcttttgactgtttttcagaattaaaagttaaaaattcaattagtaagctttcaaaactgctttaaataattatgtttaataataattatatgaatatttttaaaatacagaataaattctataaaaattaagggtgatataccattatggctccattttggtgatggctcaaaataattgtgaatctgtttttgcctttgacctatctttatttgattggtaatgccacattctctgaatcacagtttcatattaatatcattatagtaaattactttcacatgtgaacagttaaagaaaattttcttttcatcaacatataatgcagttatgggttaaatacaactaatatagcatacattttttctgtcactgagttaaaacaatttctgctaggtgagtttttttttttttttttttctttttttgaggcagagtttcgctcatgttgcccaggcaagagtgcaatggcgcgatcttgggtcgctgcaacctctgcctcccaggttcaagtgattctcctgcctcagccttccaagtagctgggattacaggcgtgcaccaccacacctggctaattttgtatttttagtagagatggggtttcatcatgttgatcaggctggtctcgaattcctgacctctggtgatccacctgccttggcctcccaaagtgctgtaattgcagatgtgagccaccagacccggcccaggggaatattagcttcaaaattcacataatttttaaaaattgttttctgtttatgactttatgtctgatttaaatcatgagtctgatttaaaagcaattttattcattataataatgtatagcacttttttttttttttgagatggggttttactctcacctaggctgtagctcagtggcatgatcttggatcactgcaacctccacctcccaggttcaagcgattctcctgcctcagcctcccaagtagctgcgattacaggcatccgccaccatgcctggctaattttttgtacttttagtagagacggggtttcaccatgttggccaggctggtcttgaactcctgacctcaggggatccacccgtctcggcctcccaaagtgctgggattacgggcttgagccaccgtgcccggccacgtatagtacttttaaaataagctgttagatatttttttgaatgaagctatttgaaatattaggtagacttacatagtctaaataattagttgttatgtgggataattttttctgttgtaggataatgaaatatttagtaaaaaggcaaacatggatgcagaaaatattttttctggcttaaaaatttttaatttttaagaattattaagaattatgtcacgatttgataggaatgtcaaatgtgataatgctgtgctttcataaattcacctaaatctcaaatatactgcttttttctgtttttaatatgttaaacaaaaagttccaataagcctgggcaacatacagagacctcatctctactaaaaaaataaaaaaaaaggccgggcacagtggctcacacctgtaatcccagcagtttgggaggctgaggtgggtggatcacctgagttcaggagtttgagaccagcctggccaacatggtgaaaccctgtctctactaaaaatacaaaaattagccaggtgtggtggcaggcacctgtaatcccagctactcgggaggctgaggcagggagaattgcttgaacccgggaggcagaggtggcagtgagccgagatgtgccattgcactccagcctgggcaacagagtgagactccgtctcaaaaaaaacaaaccaaaaaagaaaaaaaattagtcagacatggtggcacatgcctgtaatcccagttacttgagaggctgaggtgggagggaggatcatttgagcatgggaagtcgaggctgcagtgagccatgatcacatcactgtactccaatccgggtgacagagggaagactctgtcttaaaaagaaaaaaaaaatcaatagaaatcggtttttatttatttatagtatgtgctttgagtggttctcaatcaaattgatttttcccccttccaggggatatttgaaatatctggaggcatttttgtttgccccatctttgggtatcatattggcatctagtaggtagaggccagggttgttgctaagcaccctataatccacaggacagcacccaaaaacagttacccagcccaaaatgtcagtattgtcaaggttgagaagccttaatttagatgtaatgttaagagttcagtaaattggccaggcacggtggctcacgcctgtaatctcctagcactttgggaggcaaaggcaggcagattgcctgagctcaggagttcgagatcaccccgggcaacaaggtgaaaccctctgtctactaaaatacaaatacaaataaattagccaggtgtggaggtgcattcctgttatcccagctacttggaggctgaggcacaagaatcacttcagtccaggaggcagagtttgcagtgagcggagactgtgccattgcactccagcctgggcggcagagtgagactctgtctccagaaaaatgagttcagtaaattgattccgcataatctctcatttcatgatcatataatttagttgcagtacattctccaggatctataaatttatagtttagctttacattaatctttccctttgcttctgttcccatctacttctgaactgctgactggttgactacagagtagacaatcctgcttccttttagttattagctgttatcataatgaggctattgtgggaaccagtgtgaaatgacagcaggggaaattgtttgctcatcgtgatttctaaaattttatgcaagacttgataatcattaagcttatttctataaaaaagttgaaaaactttttgtatagaaagtagatacatagcaggtacatagcagactctgtacatttttgtagttattattctgtttccatagtttgaaagagaaagatttactttgggaaaatatgaactttggttaattgattattatcgttaatcgaacccacctgtcatagttcttctcagtgtgtctgaaatggaatcctttgcttatttcagtgtaactttttttaaccataattaaatatttctaaaaaattgcccattgcctgggcaaaaactggaagcattccctttgaaaactgacacaagacaaggatgccctctctcaccactcctattcaacttagtgttggaagttctggccagggcaatcaggcaggagaaagaaataaagggtattcaattaggaaaagaggaagtcagattgtctctgattgcagatgacatgattgtatatttggaaaaccccatcatctcagccccaaatctccttaagctgataagcaacttcagcaaagtctcaggatacaaaatcaatgtgcaaaaatcacaagcattcttatacaccaataacagagagccaaatcatgagtgaactcccattcacaattgctacaaagagaataaaatacctaggaatacaacttaaagggatgtgaaggacctcttcaaggagaactacaaaccactgctcaacaaaataaaagaggacacaaacaaatggaagaacattccatgctcatggataggaagaatcagtatcgtgaaaatgaccatactgcccaaggtaatttgtagattcagtgccattgccatcaagctaccaatggctttcttcacagaattggaaaaaactacgttaaagttcacatggaaccgaaaaagagcccgcgttgccaagacaatcctaagccaaaagaacaaagctggaggcatcatgctacctgacctcaaactatactacaaggctacagtaaccaaaacagcatggtactggtaccaaaacagagatatagaccaatggaacagaacagaggcctcagaaatgacaccacacatctacaaccatcttctttcacaaacctgagaaaaacaagaaatagggaaaggattccctatgtaataaatggtgctgggaaaactggctagccatatgtagatagctgaaactggatcccttccttacaccttatacaaaaattaattcaagatggattaaatatttaaatgttagacctaaaaccataaaaaccctagaagaaaacctaggcaataccattcaggacataggcatgggcaaggactttgtgactaaaacaccaaaagcaatggcaacaaaaggcaatattgacaaatgggatctaattaaactaaaggcttctgcatggcaaaagaaactaccatcagggtgaacaggcaacctacagaatgagagaaaatttttgccacctacccatctgacaaagggctaatatccagaatctacaaagaacttaaacaaatgtacaagaaaaaaaaacaaccccatcaaaaactgggtgaaggatatgaacagacagttctcaaaggaagacgtttatgcagccaacagacacatgaaaaaatgctcatcatcactggtcatcagagaaatgcaaattaaaaccacaatgagataccatctcacaccagttagaatggcgatcattaaaaagtcaggaaacaacagatgctggagaggatgtggagaaataggaacacttttacactgttggtgggagtgtaaattagttcagccattgtggaagacagtgtggcgattccttaaggatctagaactagaaataccatttgacccagccatcccattactgggtatatacccaaaggattataaattatgctactataaagacacatgcgcacatacgtttattgtggcactattcacaatagcaaagacttggaaccaacccaaatgtccatcaatgatagactggattaagaaaatgtggcacatatacaccatgtaatactatgcagccataaaaaatgatgagttcatgtcctttgcagggacatggatgaagctggaaaccatcagtcttagcaaactgtcacaaggacagaaaaccaaataccgcatgttctcactcatagttgggaattgaacaaagagaacacttggacacagggcggggaacgtcacacactaggtcctgtggtgggggtaggggactgggggagggatagcattaggagaaatacctgatgtaaatgatgagttgatgggtgcagcaaaccaacatggcacatatatacctatgtaacaaacttgcacgttgtgcacatgtaccgtagaacttaaaagtattaaaaaaaaacagttgcttattgcctagggctcagatgttttctctttgtagagatttttatcgtaaatagcttagtttttcataattgcaggcaatctgatattattttgaaccttttacttgtttattcattgagtaggtgactggtatagtggtcccgcaactgaacttgatactgaacctgatgatgaatgggtgaaaaataggaaagatgaaagtcgtgcttttcatgagtgggatgaagatgctgacattgatgaatctggtaagcttgtttggaattaaaattattacatagtgttttaataattgataattaagtactcataattattaggtattagatttatgtattttgtgttttctaaagaaactggtgtttctaagcctactactttttaaaatttgaaggaataataataaaattttaaattaattgaagtactttaaagagtgcataggattatttctcgtttttatattaaaatcaaaaatcagaaaatggtaccttttttcttatgaaaataatgtacgtttattatagtgctttgtagtttacaatgtgattttagcaccacttcaagtgatcagttgcacagcatctattgagtcatctatggcttgagggaaataggatgaaactgttgagtcgacttactcgtttgtagatagtcttaatacttgcctaataaggttattgtagaattaagaagtaatatacataaatattgtttgtaaatggtaagggattacaaaaactaatgtagccattcattaaacactgtgggagagttcaaggatggataagacttcatcgctactccaaacaactcacaaatgagagagaatttagaacacataatttttaatttaaagtatatgatggaaaaatgctgtcatacttgtgcagagagatgctatttggaagtgtgaggaggaaaacaaattctgtcttggatattctagataataattattaaaagatggtaaaatagtaaaaaatgaacagatgagacattcttctagttggtaaaactgaaactataggaaattttatttataaagttacttgcttaaagtaatttggtctggcgaaagaattaaatgtggaaaaaagacacgtggaaagtaacagtgtaagtataaagattgttgtatcagcagctaaagtagtttatttttatgaaacgcagatgtgccacattttgatgtaaagattcaaaatgtcctatataaggaaaaggtctattctagtttgatagatttggtgatgtgcttacctgtggcaggcattgttttaggtatgaaggatctaatggtgaacaaaatggaaaaaaacaaaacaaaactggcgcttgttgagcttaaaatttagagacaggaggcaaacaataaatacaggtaaaatatattccatattagatggtgacaagtgttgtagagaaaaataagacaaggaaaacatgccaagaagaatttaaaattacagttttaaattgagcgattagttaaggtcctttgggaaatttgagtaaagacctgaaggagatgagatatttgctcagatgtcaacttaaggaagtctcagtttattcattctagaaaattaattcataatacccgtggtaagaatgttgaaggttctcacaaattcagtgtatttgtctccatacttgaagatagccagaggaaagactcaatttctttcatattgaaaaggaaaagttaacgctgtaaagattgagcctttttagataatatatctgttgattattaaagactaaactgtcatttacttcagtgcttttttcggtttagctgccttgtctttttacttgtcctaagaagttattgtttttcatagaatgtttaactttcttaaagatttcacagttccagttaccttgatttaatcatcacacattgtatacaggttccatagtatcacatgtacccccaaaatatgcataattattgtatatcaataaaaaattaaaaatttaaaattttcacagtaaatagtatacatttagatagtgagggccacagaaacaaaagaatggtttgggaataaaattatagtagggctcactaaagtaatttttatctccttatattttatcttcgtgtgtgtgtgtgtgcgtgcgtgtgtgtgtgtgtgtgtgtgtctgtgtctggctaaaggaggaatttaggataatatctaaacaaggaaccatgagtaacaaattcttttagttgatatccttttgtctgctatacttagttttgttttaaatgagacttccttaacttattctgttaaatcattttatgtttaaagacattcaaattggtctttaggtaagaataataacaataggatcctgagaaaggtaatacaatacaattattcattctttttagtgtagtgtgttttttccttttttcgaattggagtttatggtgttttcatggtggatgttacagtagtacattctgttgtaaacatccaagctttacagaagttattaagtaaaaccaaaagccatgctcatttttagcttcttagaaattctaaagtaccttcctttgcttgattcattatgatcaggctaatttagttgagtttcaaatcttttctagctttgtgccctttttagttatgtggaatcagtgatagtacgttttactatggatcatttttcttttgatatcatattttcttttctcttgaaaacttttgctgttcttttcagttttcacatttttttccaaaactttttcattgcctaaaaatgggatggtttacataagaaagtataaggatagcacaaagtatgtcatatttaacaatttggtgagcgcttgagtagcttaattattatcagtttatcaagttcttggacttttgaattcattttacagaagagtctgcggaggaatcaattgctatcagcattgcacaaatggaaaaacgtttactccatggcttaattcataacgttctaccatatgttggtacttctgtaaaaaccttagtattagcatacagctctgcagtttccagcaaaatggt

SEQ ID NO: 1416 - DNA, 480 bp, Homo sapiens
gaacatcagaaatatctacattttgtcgtctcacctgcaacataaataactgaagtagtttaaagcatctctaggttaaggcagtcagatttcgcagacctcttgtatgaaatgtgaaaatcaaagagggaatacaagcaagattattgacaggagtcataatgcataaatggaaaaggtcatgagatttgtgtgtgtcattaaaaatgccttggagatctcataatctggctgactctatacttgttgatttaaagctgtataacctgttttgttcctttttcaagtgatgctgcttaatgctacaaagtgagtattgttttttctgtgatgcctttgtaagaggaagttaattctgtgttcattattgtagctcccactgatgaagtatgatttgggccatgatagtttaaccctactggttcttcacaagtttaacatccccatgttacctctaatacatgttatttcattttcaca

SEQ ID NO: 1417 - DNA, 484 bp, Homo sapiens
ttcattttacagcgaatcatgcaagctacaatctgatcacccaaattgagccaatagaatgaatgcctggtgatcaatcagctggtgtgtcacctatgatctctgctttcaggaattaggggttcttcttaacacagttgaaaagcttccactcacaatggccccagccacagtgtcagataaaagtgcaccttcattagctagcaacatgaaagatgacggtggttaggtggggtagtgagtgctggtggagatcttttgactggacttcaggaagcaggaatgtgaggtttgatattgcttattcaaccttggttagtttcttaatttttaatttttttcatttttttgagagagagtcttattccatcgctcaggctggagtgtagaggcatgatcacggctcactgtagcctcgacccctcaggctcaattgattctcccaccttagcctcccaggtagctgggaccacaggtttgcacc

SEQ ID NO: 1418 - DNA, 484 bp, Homo sapiens; identical to SEQ ID NO: 1417

SEQ ID NO: 1419 - DNA, 179 bp, Homo sapiens
gttcactctgatcgtagtttcttttgctgtgcagaagctctttagtttaattagatcccatctgtcaattttggcttttgttgccattgcttttggtgttttagacatgaagtccttgcccatgcctatgtcctgaatggtaatgcctaggttttcttctagggtttttatggttttaa

SEQ ID NO: 1420 - DNA, 1162 bp, Homo sapiens
ggtcgcgaaaattttctcccattttgtaggttgcctgttcactctgatcgtagtttcttttgctgtgcagaagctctttagtttaattagatcccatctgtcaattttggcttttgttgccattgcttttggtgttttagacatgaagtccttgcccatgcctatgtcctgaatggtaatgcctaggttttcttctagggtttttatggttttaacaacgcaacctactcatctgacaaagggctaatatccagaatctacaatgaactcaaacaaatttacaaggaaaaaacaaacaaccccatcaaaaagtgggcgaaggacatgaacagacacttctcaaaagaagacatttatacagccaaaaaacacatgaaaacatgcttaccatcactggccatcagagaaatgcaaatcaaaaccacaatgagataccatctcacaccagttagaatggcaatcattaaaaagtcaggaaacaacaggtgcaggagaggatgtggagaaataggaacactttgacactgttggtgggactgtaaactagttcaaccattgtggaagtcagtgtggcaattcctcagggatctagaactagaaataccatttgacccagccatcccattactgggtatatacccaaaggactatgaatcatgctgctctaaagacacatgcacacgtatgtttattgtggcattattcacaatagcaaagacttggaaccaacccaaatgtccaacaatgatagactggattaagaaaatgtggcacatatacaccatggaatactatgcagccataaaaaatgatgagttcatgtcctttgtagggacatggatgaaattggaaatcatcattctcagtaaactatcgcaagaacaaaaaaccaaaggccgcatattctcactcgtaggtgggaattgaacaatgagaacacatggtcacaggaaggggaacatcacactctggggactgttgtggggtcgggggaggggggagggatagcattgggagatatacctaatgctagatgacgagtcaatgggtgcagcgcaccagcatggcacatgtatacatatgtaactaacctgcacattgtgcacatgtaccctaaaacttaaagtataattaataataaataaaataaaattttaaaaaa

SEQ ID NO: 1421 - DNA, 15041 bp, Homo sapiens
aggtgaccctgagagtgtggctggggagtatgggcggcactccctctacaaaatgcttggttacttcagcctggtcgggcttctccgcctgcactccctgttaggagattactaccaggccatcaaggtgctggagaacatcgaactgaacaagaaggtgatgcctattgcctctggcccctcttgccagagccagaatatctatttctagagaaccactctgatctcttaggacaaatttccaggagaggaaagaggactgttccctcaggccattgaaagttgagactaaaactgggcaaacagctgtggtaaaaagctagacctggacgattttggtagttaacaacagttttttattttgttttcaaaatggaatgatgatggcagcttgctctgtcaccaggctggagtgcagtggtgtgatctcagctcattgcaacctccgtctcctgggttcaagcgattcccctgcctcagcctcctgagtagctgggactacaggcatgcgccaccatgcccagctaattttttttttttttttttttttgtattttagtagagttggggtttcaccgtgttggccaagatggtctcgatctcctgacctcgtgatccgcctacctcggcctcccaaaatgctgggattacaggcgtgagccaccatgcctggcccatggcagctctttgctcttcacattttgctaaaggattgagaaggccagacgcagtggctcacacctgtaatcccagcagtttgggaggctgaggcaggtggattacttgaggtcaggagttcgagaccagcctggccaacatggtgaaaccctgtctctgttgaaaatacaaaaaaaaaaaaaactagctgggtatggtggtgggcacttgtaatcccagctactcaggaggctgaggtaggagaatcacttgaacctgggaggcagaggttgcagtgagccgagatcacaccattgcactccagcctgggcaacagaacaagactctgtcccagaaaaaaaaaaagaattaagtaaagatgtaattctaagatggtatgttcattgatacatggttagctgttgtgttcttcctaaccacagaaaaatattacagataatttttatttggtgtttggctcatgtgcatgtatgtgtttctgtcttccctgtccaaaaggacttaattgaaaaagcaaggaaaaataacaaaactgagatgtatagcattttagagctgaaggagattttagggattacctgatccagaaccttcttgtttacagctaaaaaaatggattcctcaaaacatacaacttaattgatgaataggaagatccgctctcaaactctgggactccagagcttcctctggatagttgagggcctctgcagggaaaactcttggtgtttctacctctggttctatctaggatgaattgggactcatgaatgtttgttctacctccttctacagagtatgtattcccgtgtgccagagtgccaggtcaccacatactattatgttgggtttgcatatttgatgatgcgtcgttaccaggatgccatccgggtcttcgccaacatcctcctctacatccagaggaccaagagcatgttccagaggaccacgtacaagtatgagatggtaagggggactctgcctgccaccagtggcctttctaatcagggggatccttggcacctatgccaaccattcttggtaaacaccatccaaaatattgcacttttaagccaggagttcaagactgtagagcgctctgtgattgtgcctactaatagatcacccagctggagtgcagtgacgcagtcacagctcacgtcagcctcaacctcctgggatcaggcgatcatcctaccttagtcttccgaatagctgggcttaaaggcgcacacaacaacaccggctaatttttttttttttttttttttttttttgagacgaagtctctgtcacccaggctggagtacagtggtgcaatctcagctcactgcaacctccgcttcctgggttcaagtgattctccagccttagcctcctgagtagctgggactacagacgcgtgccaccatgtccagctaatttttgtatttttagtagagatggggtttcactatttggccaggctggtctcgaactcctgacctcaggcgatccatccacctcagcctcccaaagtgctgggattacaggcgtgagccaccacgcccagccaaaatgaacttttaatggctagcatactcttaggagtttctgttgtgatgcctgttacctcagatcattaacatcttgatgataaggacttgatgataatatcttttgtttcagttatatcctccagcagtgcctacatttatttattcagcatcagtatgctgagtgttcactgggttctaaatgttttgatataaggtgtggatattggtgggaaggaggatgggttcaagaattgggaggagcttcctaggcagagaatatcatgagcaaagtggttgagacttgaaagtgtggtgatgcagccgcacaataaactgttctggctggagggcaagtaggtagtaggaattgggttattagattctgagaaccttcattaacccaggtaaagtatagtcctgtgtcatttgatgctgcagatacattctgagaaatgcatcatttggtgattttgttgtgtgaacatcatagaatgtacttacacaaacctagatgggataacctactacatacccgggctacatggtatagcctatggctccttggctacaaacgtctagaacatattactgtactgaataccataggcagttgtaacacaaaggtatttgtgtatctaagatacagtaaaaatacaggattataatcttgcaggatcaccatcctatatgtggcccatggcccgttgttgactgaaacgctgttgcacggcacattactatttagtctatatttctgtcgtcatcaaggttgcatcaaaggttttgggtaactcgatcctaactgtgtaaaaggattgacctgctagtgatgtgtgggacaaactggagagactaagacagaggtgccagtaaggaatccagaagatggctaaggaggatctggagctaggatggaagttaggtagatctagagggaggattggaagagatgttggggaagttcaatggctggtatgaaacaactgggtaagtcaaagatctgtgcagagaatggtgaggccagttggcagtggggacctcaggaagtccgtctcatttgacccagtaccactctccaccccatccccagattaacaagcagaatgagcagatgcatgcgctgctggccattgccctcacgatgtaccccatgcgtattgatgagagcattcacctccagctgcgggagaaatatggggacaagatgttgcgcatgcagaaaggtgacccacaagtctatgaagaacttttcagttactcctgccccaagttcctgtcgcctgtagtgcccaactatgataatgtgcaccccaactaccacaaagagcccttcctgcagcagctgaaggtgttttctgatgaagtacagcagcaggcccagctttcaaccatccgcagcttcctgaagctctacaccaccatgcctgtggccaagctggctggcttcctggacctcacagagcaggagttccggatccagcttcttgtcttcaaacacaagatgaagaacctcgtgtggaccagcggtatctcagccctggatggtgaatttcagtcagcctcagaggttgacttctacattgataaggtatgcctgtcccctgggcttggggtcttgtattaagtgttcagtatctttcattcactattgtgggcacatgaagtatatcggggaacaaaaagattcctggccttgtggtgctgccacaaggtgccaggtgtggtggctcatgccagtaatactagtactttaggggaggctggggtgggaggatcactctagcccaggagttcaagaccagcctgggcaacgtagtgagaccttttctctattaaaaaaaaaaaaaaaaaaacacaagagataaacaatagatggttttgttttggttttttttttgagatggaatttcgctctcgttgcccaggctagaatgtgatggcacgatctcggctcaccgcaacctccgcctcccaggttcaagccattctcctgcctcagcctcctgagtagctgggattaccggcatgtgttaccatgcccagctaattttgtatttttcgtagaaatggggtttctccatgttggtcagtctggtgtcaaactcccaacctcaggtgatcagccagccttggcctcccaaagtgctgggattaccaacaatagatgttataattaaacaatagatgttataattaaacaaactatgtagtaagaagttgccaagcactgcagagtaaaggaaggcagaggtggtgggaagcacaggttgcaatgttaaatacggtgttcagacaggctttgttgagaaagtgaagtttaagctaagctaagacttgaaggaggtgagggagtagtgttttggtttttttttttttttttttgacagtcttggtctgtcgcccaggctagagtgcagtggtgcaatctcggctccctgcaacctccgcctcccaggttcaagcaattctcctgcctcagcatcctgagtagctggaattataagaggccgccaccacacctggctaatttttgtatttttagtagagacagggttttgccatgttggccaggctagtctcaaactcctgacctgaagcgatccatctggtggagagttcttaatagctcaccaaaggctggacacggtggctcatgcctgtaatcccagcactttgggaggccgagatggacagatcatggggtcaagagatcaagaccatcctagccaacatggtgaaaccccatctctactaaaaataaattagctgggcatggtggcgcatacctgtagtcccagctacccgggaggctgaggcaggagaatcacttgaacccaggaggcggaggttgcagtgagctgagatcgctgcactgcactgtagcctggcaacagagcgacactccgtctcaaaaaaaaaaaaaatagctcaccagatatctggaggaagagccttccaggcagaggaacagttagagcaaaggccccgaagaggagtgaggccaataagtttaagggacagttgtagtatgcccgagtagcctgagaaaggaggctgtgaagatgagattggagaaagggggatggtgctttgtatactgttggagtactttacaagtgggaagccattgtcctgctgccttctttatttttttatttttagttagcaataatcacacctcacataaccctcattggccatactgccactgcacaaagctttttttttttttttgagatggagtgtcattctgtcgtccaggctggagtgcagtggcacgatcttggctcactgcaacctctgcctcccgggttcatgcgattctcttgcctcagcctcctgagtagctgggattacaggctcacaccaccacacccagctaatattttgtgtatttttagtagagacagggtttcactatgttgaccagactggtctccaactcctgaccttgtgatccgcccgcctcggcctcccagagtgctaggattacaggcgtgagccatcgcgcccggtattattttatttttattttattttattttattttgagatgtctcgctctgtcgcctaggctggagtgcagtggcgcgatctcagctcactgtaagcttcacctcccaggttcacgccattctcctgcctcagcctcccgagtagctgggactacagacacccgccaccacacctggctaattttttgtattttttagtagagacggggtttcactgtgttagccaggatggtctcaatctcctgacctcgtgatccacccacctcggcctaccaaagtgctgagattacaggcgtgagccactgcatccggctctcttttttgagacaaggtctcactctggttgcccaggctggagtgcagtggtgtgatctcagctcactgcagcctcaacttcctgggttcaggtgattgtcctacctcatcctcccaagtagctgagattacaggcgcacgtcaccacgactggctaatttttggtatttttagtagagatggggtttggccatgttgcccagcctggtctcgaactctgatatgtgccactgttcccagccgattttaagtttttactttatagaaacagggtctcactttgttgcccaggctagtttcaagtgatcctcctaccttggcctcccaaaatgctgggattactggtgtgagccactgcgcctgtcctgtcctgatgtctaacatcttggattagtgctgcctgtttgtgaactttatataatggaattacacagtatgtactctttaagtctggcttcttttgctcaacgttataattgagtgagtcaccgtccattgtgtgtagcagtgattccttcatgtttattgttctgtgatagtccagcatctgctgttgttattgtactgcagtttatccattctcccattgattaacgtttggatggtttgtatattacaaaaaatacaagtaaggtttttacagagtggctagtaatacatttatatatgcctatgtatgcctcaagttctttccagaaggatacacaagcaacatagcagtagcttcctctcaggaggggaggtgggttgaagaacagtgttagttttcactggcacttttaagttcaagctggacattttaatgtctgatgagattttcatttttatttatttatttagagacagagtctcattgtatcactcaggctgtagtgcagtgatgtgatcttggctcactgccacctccgcctcctgggttcaagcaatccttctgtctcagcctcctgattagctgggactacaggcgctgatgagctgatgaggtttttaaaagaattgttttctttttttttagactgagtcttgctcttgttgcacaggctggagtgcaatggcacaatcttggctcaccggaacctctgcctcccgggttcaggcgattttcctgcctcagcctcccgagtagctgggatgtacagggatgcgccaccatgcccagctaattttgtatttttagtagagacagggtttctccgtcttggtcaggctggtctcgaactcccgccctcaggtgatctgcccgcctcggcctcccaaagtgctggggttacagacatgagccaccacacacggccgtcagcccaggttttctaagatcagcaaatgtccatagggcagagggggtcttctgtgcttttcttagaatggtttcttttttcccaaaatgttctgttactatcttgtcagctctttgatgctgtaagtttttttctaatatcctgcatttttaattgtttttgaaagcattttgggccaggtacagtggcttatagctataatcccaatactctggaaggacgaggcaggagaattgcttgagcccaggagttcaagaccaacctgggcaacaaaccaagaccctgtctctactttttaaaaagagaaaaagcatgctgggcatgatggctcacgcctgtaatcccagcactttgggaggccaaggcgggtggatcacctgaggtcaggagatcaagaccatcctggccagtatggtgaaaccctgtctctactaaaaatataaaaattagccaggcatggtggcacatgcctgtaatcccagtaacttgggaggctgagacaggagactcacttgagcccaagagacagaggttgcagtgagctgagatcaagccaccgcattccagcctttgtgacagagatgagactgcatcttgaaaaaaagagaaaaagcattttggtctaaatgtattgttggaaatagcactttttgagcagttcttaaaaatacataattttaggctgagtgcagtggctcatacctgtaatcctatcactttgggaggccaaggtgggtagatcatcagaggtcaggagttcaagacctgcctgtgcaacatggtgaaaccccgtctctactaaaaatatttaaaaaattagccgggcatggtggtgcgttcctgtaatcccagctactcgggaggctgaggcacgagaatcacctgaacctgggaagcagaagctgcagtgagccgagattgtgccactgcactccagcctgggcaacagagtgagagactgtctcaaaaaaagaaaaaaacataatttttatacataatttgcatgataagccgggcgcgttggttcacgcaagtaatcccagcactttgggaggccgagctaggcggaacacgaggtcaggagatcaagaccgtcctggccaatatggtgaaccccatctctactaaaaatacaaaaattagctgggcgtggtggcgggtgcctgtagtcccagctacttgggaggctgaggcaggagacttgcttgaacctaggaggcggaggttgcagtaagccaagattgcaccactgcactccagcctgggcaacagagcgagactccacttcaaaaaaataaaaaaaggctgggcatggtggctcacgcctgtaatcccaacactttgagaggcgaaggtgggcggatcacttgaggtcaggagatcaagaccagcctgaccaacatgaagaaaccccatctctactaaaaatacaaaattagccagacgtggcagcgcatgcctgtaatctcagctactccggaggctgaggcaggagaattgcttgaacccgggaggtggaggttgcagtgagccaagatcgtgccattgcactccagcctgggcaacaagagtgaaactccgtctcaaaaaaaaaaaaaaaaaaaaaacttgcatgatcccagcactttgggaggctgaggcaggcagatcacgaggtcaggagatcaagaccatcctggctaacacggtgaaaccctgtctctactaaaaatacaaaaaattaaccgggcatggtggtgggcgcctgtggtcccagctactcgggaggctgaggcaggagaatggtgtgaacccgggaggcggagcttgcagtaagcagagctcgcgccactgcactccagcctgggcgacagagcgagactccatctcaaaaaaaaaaattgcaggatataaacttcaccattttaaaatgtgcaatttggccaggtgtgatgctttacacctataatcccagcactttgggaggccaaggctggcagatcacttgagaccaggagttcaagaccagcctggccaacatggtgaaaccccatctgtactaaaaatacacaaattagctgagtgtgggggcgcatgcctgtaataccagctacttgggaggctgaggcacaagaatcgctttagcctaggaggtggaggttgcagtgagccaagatcatgccactgcactccagcctgagtgacagagtgagaccctgtctccataaataaatagaatgaatgaatgaatgaatgaagaattcagtggttattagtatgttcacagtgttttgcaaccatctccactgtctaattccaaaacatttctgtccccccaaaaagaaactccctacccactagcagtcactcgcagttccccagttccccctttctgccatcccctagcaaacccctaatctgctttggtctctctgcatttgacatttcagataaatggaatcatgtaatatatggacttttgtgtttgggtcctttcactgagcatgtcttcaagtttcatccatattatagcatgtgtcagtacattccttttatagctgaataatatcccatgtattaatgtactgcattttgtttatccatttgttgttgcacatttggggtttttggtttttgggggttttttgttccttttttcactttttggcttatgaatagtgctgctgtgaatattcatctagaagttattgtgtgaacatatgtttttaattttcagatatatatctagttgtggaatttctaggtcagtttgggtagtttgtttttgaaagttcattttgctttaaaataaatactctcatttcatttttatggcttctggaagacttggtttttgccataagttagctagcccgatacaaacagatttgccaaaagtaataacacgtcagtagtggaagttttccagtgttttaaatcatgcttttataaatcaaagaaaactgagccaggcttcgtagcgtgtacttgtagtcccagctatgggagagagtcccttatagcccctgccttaggacgctgaggcaggaggatggcttgagcccaggcgtttgaggctgcagtgacctaagatcttaccactgcagtgcagcctgggtaacaaagtgagaccctgcctctaaaaataaataaatatataaataaataaaaataaagaaaactttctcccttgccaggatcatgtcaagccttttttttttttttttttttttttttttttaagatagcatcttaatcctccagttgtccaggctggagtgcagtggcaaaatcacagctcactgcagcctcaactcccgggggctcaggtgatcctcctatctcagcttctcaagtagctgggactacaggactgcaccaccacatcttgctaatttttgtattttttgtagagatggggttttaccatgttgcccagcctggtctcaaatacaaactcttgggctcgggtagtctgcccacctctgcctcccaaagtgctgggattgcaggtgtgagccaccatgcctggcctagttttttctcaatacctgacatatatacgttctttggcaattatagtagcctcctgcattcctctgtcacctcttaattaccagcctagctattctcaactaatctgggtagtttaacaaaacatttctcctaagaattggctatttgattattatttaattgcatgttttactgttattcctctgttgctggttcaggtttgtctttggcaaagtgcttcttttttttttcctttttgactcttcattcttaacttgaaagaaatcctatcagagatttagaacgttcttagatcttaacctaggggatatagaaaattttaaagtaaaatggtgttcaaaatattttcagctaaaaacaaaacttaaagattggactaatttgcaattttatcaacagtgtaggagcataaacttttttttttttttttttttgagatggagtctcactttgtcacccaagctggagtgcagtgacgcagtctcggctcactgcaacctctccctcctgggattacaggtgcccgccactacgcccagctaatttttagtagagatggggtttcaccatgttggtcaggctggtcttgaattcccaacctcccaaagtgctgggattacaggcgtgagtcaccatgcccagccagcataaacatctttattcccaaaataaaaaagacgaggctgggcacggtggctcacgcctgtaatcccaacactttgggaggccaagacgggcgaatcatgaggtcaggagatcgagaccatcctggctaacatggtgaaaccccgtctctactaaaaacatacaaaaaaaattagccaggcatggtggcgggtgcctgtagtcccagctactcgggaggctgaggcaggagaatggtgtgaactcgggaggtggagcttgcagtgagccgagatcgcaccactgcactccagcctgagtgacagagcaagactccatctcaaaaaaaaaaaaaagactagaaaataaaagacaaaaaaaaagtctagaaaataaaagtacaaatgaattgataaaaaaaatatatataaactaggccgggcacattggctcatgcctgtaatcccagcactttgggaagctgaggcgagtggatcacctgaggtcaggagtttgagaccagcctgattaacatggtaaaacctcatctctactaaaaatacaaaaattagccaggcaagatggcgggagcctgtaatcccagctacttgggaagctgaggcaagagaattgcttgaaccctggaggcggaggttgcagtgagctgagatcatgccattgcactccagcctgggcgacgagcaaaactccatctcaaaaaaaaaaagaaaagaaaaactctctagaaagagtgagttactgttaactggtggtgtttttccagtggtcttttccccacctttacatctaacactcaccatcattatcacttgcaagtccatggtggctcctgggttagatggccctgctcctccacctggctgctcttccctgactgtgctttcccccacaggacatgatccacatcgcggacaccaaggtcgccaggcgttatggggatttcttcatccgtcagatccacaaatttgaggaggtgagagatctgagagaagaggggtttgttggctcaggacagagcttaggaactgaatcgagagtttacttttttttaatttttattcctttatttattttgagatggagtcttgtgctgtcacccatgctggagtgcagcgacgtgatcttagctcactgcaacctctgcctcctgggttcaagcgagtctccctcctcagcctcccgcatagctggaattacaggtgtgtgccaccacacccagctaatttttgtatttatggtagagatggggtttcaccatgttggccaggctggtctccagctcctggcctcaagtgatccagtccgtctcagcttcccaaagtgttgggattacaggcatgagccaccatgcctggccttttaaatttttcatttctgttattaagaaagcctactgccctccagcctgggcaaccgagcaagaccctgtctcaagaaaaaaaaaaaagaaaaagaggccaggtgcagtggctcatgcctgtaatcccagcactttgggaggctgaatttgagatcaggagttcaagaccagcctggccacatggtgaaacctcatgtctactaaaaattaaaaaaattagctgggtgtggtggtgcgcacctgtaatcccatctacgcagaaggctgaggcaggagaatgatttgaacctgggagatggaggctgcagtgagcagagatcatgccactgcaaaagaaagcttgaggttggccctttaaattttcaagctagactggctggctgcttggggtttggggagtggggttgggcctgtaggaattgctgcatcagccttctccagagcatctctttccaagatctccctctgcgggtggccagctctcctctccctccctggtatttcctaatatgggtggattcactgcctgctcttgcccatccctccccgtttggcattgttttccaacttagacaggtctggctagttcctgtaggctggaggacaggaagctctgttttgacatacttggtgcattccttgtcttgccctaggagaggtcttgtgggtcaggccaaacactgtaagggtgtgggtctctctttgtggccattgctagggctactgtgtcctggtgctttgagttctccagcagaggtcaggctcttcctgcaggatcataacagccctgctgctctttttactttctggctgtttagatcacatctgtcagggtggtgggctagggctgtcttctaacaaggatcctgttcaaagcttctcattcttcccctaactgaactagtaaccttgaaacgtctggccagtctgaatcctttttctgtcagatggatagagcagtgttgtgtatgggtttgttgagtgtgaagggcagataaaagaataatccgcgtgaactgtgcagggccatatgaatgtcacggctttgcacacacatagtggacacccacatcagaaacttcctttcttggcttcagaggggcagctgggaatctgacctagtgatcatacacactgtaggaaaggggttggggaaatccccgtatgtaactttgcttttctttctcttctagcttaatcgaaccctgaagaagatgggacagagaccttgatgatattcacacacattcaggaacctgttttgatgtattataggcaggaagtgtttttgctaccgtgaaacctttacctagatcagccatcagcctgtcaactcagttaacaagttaaggaccgaagtgtttcaagtggatctcagtaaaggatctttggagccagatttgtcgtctcattattgtaggagagaatttgtgggttgtggcagtaatacatttcccatgtgtcctgatgctttcaggatacatcagttgttagtgtttaaattgagttatttttattttgtgcttttgagatggagtctcactctgtctcccaggctggagtgcagtagcgtgatctcagttcgttgcatcctccgctgcccaggttcaagcagttctgcctcagccttccaagtagctgggattacaggcgtgtgccaccacactcagctaatttttgtattctcagtagagatgggttttaccatgttggccaggctggtctcgaactcctggcctcaagtgattcgcctgccttggcctcccaaaatgtgctaggattacaggcatgagccaccacgccccgcctaaattcaaaatctttttgtttttttttagacggagtctcactctgtcgcccaggttggagtgtactggcgcgatctcggctcactgcaagctccacctcccaggttcctgccattctcctgcctcagcctcccaagtagctgggactacaggcacccgccaccatgcccggccaattttttgtattttttagtagagatggggtttcaccgtgttagccaggatggtctcagatttcctgacctcgtgatctgcccatctctgcctcctaaagtactgggattacaggcgtgagccaccgtgcccagccctaaattgaattcttaaatccctcttgttcataaagcagtatatttggtttacaggac

SEQ ID NO: 1422 - DNA, 314 bp, Homo sapiens
ccatctcggcctctcaagttgctgggattagaggtctaagccaccaagcctggctaaggactagttcttttagtgcaaatgcatggcaagaagcaatgcagtgactactggtacaattttgtgtcgttgcctgatttatgcttaagttgacagtaattttacccaacatagtgtttgcatcatgcaaaattcaactcagtgggaagggcaagtaacatcttagtgttgttattaggaaaatagctttgacctcatgtgctttctgaaaggaggagtcttcgtggttgtattttactgatgagaggggcctttgc

SEQ ID NO: 1423 - DNA, 226 bp, Homo sapiens
gcggtggctcacgcctgtaatcccagcactgggaggccgaggcgggcggatcacaaggtcaaggagatcgagaccatcctggctaacatggcgaaaccctgtctctattaaaaatacaaaaaaattagccgggcgtggtggcgggcgcctgtagtcccagctactcgggaggctgaggcaggagaatggcgtgaacccgggaggcggagcttgcagtgagccaaga

SEQ ID NO: 1424 - DNA, 599 bp, Homo sapiens
agagattgtgcacaggctgcttgagtacttggttcctaaacagtagctgttagaattattatgagccctgatcagcgcactttgccctctcataacgtctatttattcgtctgtataatggaataatagtggctgctgttaaatgaattaaatacgacggcgtttggagggaaacattactactccagttttacagataaggaaactgatgatcaggtgcttgaagtgacttccgaagatcaggaagacagcatatggcagggacaggaacccacgcctacgccccagcctctttttaccgaaccttgttcttcaggaagtggttaaaacacctgggctactcccagcaaaacgccagtcacgcagtcctgaaacaggtcctctaaggtgcccagcccaacacaggctgggcgtgctgagccaacagaatgtttgttcctctgtcccttcctagaaccccaagtcacctttctccagccagttaaaaacgttacttttaactaggatgacgtttcaatttatcggccatatccaagcatttctgagaatgaactgtgagacatgctattaataaattaaccatgaacagcaggttcaaa

SEQ ID NO: 1425 - DNA, 312 bp, Homo sapiens
gggccgaaagcgatggctcacacctgtaatcccagcactttgggaggccaaggcaggcgcatcacgaggtcaggagatcaagaccatcctggctaacacagtgaaaccccgtctctactaaaaatgcaaaaaattagccgggcatggtggcgggcgcctgtagtcccagctactcgggaggctgaggcaggagaatggcatgaacccgggaggcggagcttgcagtgagcggagatcgcgccactgcactgcagcctgggcgacagagggagactccgtctcaaaaaaaaataaataaataaataaataaaa

SEQ ID NO: 1426 - DNA, 394 bp, Homo sapiens
ccggcgtggggccggtggtcctgaactcccccgtggtcctgggccgagagactgggggagcggacaggggaaggcctgctccggcccgggggctctgcgcacacccatgggagaccggggcgcagccgcccgcgggccttacgtaagctcttagccggaccagggggctccacgcttcctccccgccaagagagcaagtctaaaaggtgacctggcttctgggctgaagggaggaggacactggatttcggcccctggtgatttgctggggccggtgggtcgtctcggtctgcgcgacttcgcccggttttccaacgccccctgccctttgttgtgtttgatccacttccacgatgggtttccgaccagcagtgcagtgtaacgaaaagaggaa

SEQ ID NO: 1427 - DNA, 297 bp, Homo sapiens
ggaatttttgaacctaaaagattcaagctgagtggttccctatacactgaaaggtatagtcaaattgaaactatattggagacacaaagatgaataataagacgtgtaaacataatattttctagggtgctttggattttgagttgccaaatcatgttggaaaagcaacagctttgtataaaagctgcaaaggaaacatctgtgttttgtttagagaatacgttatattttggccaaataagaaaaaagagaaattgtcaaagtacaatatggggggaagaatgtcttctaaagatc

SEQ ID NO: 1428 - DNA, 348 bp, Homo sapiens
ggaatttttgaacctaaaagattcaagctgagtggttccctatacactgaaaggtatagtcaaattgaaactatattggagacacaaagatgaataataagacgtgtaaacataatattttctagggtgctttggattttgagttgccaaatcatgttggaaaagcaagagatttgtataaaagctgcaaaggaaacatctgtgttttgtttagagaatacgttatattttggccaaataagaaaaaagagaaattgtcaaagtgaacaatatggggggaagaatgtcttcctaaagatcagaatgaacttatattatttccttaactgatccatgctttttaaaaaa

SEQ ID NO: 1429 - DNA, 309 bp, Homo sapiens
gagccgacccaaggtctgcaaggagttcgcggcacccgcccgcccacgccggacccggagggcacgtccgccgggaggggcagttcccacgaggaaagtcccattgatgcgagttggcagtgtagaggatgctcccctccggccgccgcggaagccgtcgtccaaatgcaggcgagcggggaggaggaggccgggatgcggccggcgggccacctgctctcgccggcctgccagtctcctgcttgctctgaagccctgccatagacggccccgctcccccgtgtatccactgaaacatttttttataaa

SEQ ID NO: 1430 - DNA, 309 bp, Homo sapiens; identical to SEQ ID NO: 1429

SEQ ID NO: 1431 - DNA, 5251 bp, Homo sapiens
ttttttttttttttttttttttttttttttttttttggagacggagtctcgctctgtcgcccaggcgggactgcggactgcagtggcgcaatctcggctcactgcaagctctgcttcctgggttcacgccattctcctgcctcagcctcccgagtagctgggactacaggcgctcgccaccgcgcccggctaattttttttgtatttttagtagagacggggtttcaccttgttagccaggatggtctcgatctcctgacctcatgatccacccgcctcggcctcccaaagtgctgggattacaggcgtgagccactgcgcccggccagaatatagctaagttttaagcaagtgttcactaggcataagaatatacatcctggagagaaatcacagaagtgtagtatatgtggcaagaatactacttaaaggtcaaaacttgtggatctataactcaaagtgcagatatgctttacaaatgaaatgagggtggcagaagcttcaccagagttcagtcactacttgagagtttatattggaaagaaatcgtataaatgtatgtgctagaggcttccccgaggtgtctgaactcactagacctcagaatatacatctttgacaaatgtaatgtgtgtgctaagactttttacccgaacatccaaatggaaacatcagagtattcatactggagaacagtcttacaaatgtaacgaatgtggtaagcctttttaaaaatcaaatgggctgggtatggtggctcacacctgtaatcccagcactttgggaggccgaggtgggtggatcatctgatgtcaggagtttgagaccggcctggccagcatggtgaaaccccatctctactaaaaaatacaaaaattagctgggcagtggtgggcacctgtaatcccgctacttgggaggctgaggcagaagaatcacttgaatccaggatgtggaggttgctgtaagccgagattgcgccattgtactccagcctgggtgacaagagtgagactctgtctcaaaaaaataaaaaaatcaaatgttcatgtttttggagtttgagagaatttatacaggaaaaaagtcatatcagtgtgcttaacatggaaggacctttaatcagtagtgtgtcttcaggctttaccaaattattcatactggatagaaaccttgcaaatgtaattaacgtggtaaaattttaaaccatttctcagccagatgcggtggctcacgcctgtaatcccagcactttgggaggccgaggcaggcagatcacgaggtcaggaaatcgagaccatcctggctaacacggtgaaaccccgtctctactaaaaatacaaataattagccaggcgtggtggcacgtgcctgcagtcccagctacttaggaggctgaggcatgagaattgtttgaacccgggaggctgagcttgcagtgagccgagattgcaccactgcactccagcctgggcgacagagcaagactccgtctcaaaaaaaaaaaaaaaaaaaaaatttctcaacagattccatgttaggtaaatcatactatggataactaagtctgcttctccatccaggattgacctggaatgatacatacggtaaaataaccacaagacaaaatttgttaaaaccccaggtaatatgtacatcaaaggatcaagagcgtgtgtggaaatggccaattcagtatataaaataattgtattcactttgacatttcttaaaaaggctagttgactatttgtgaccttcatcctaaagtatgaagtcttgcctttcctacacatctttcattgtggtctctgggaataaatcagtaaggtgagagggcctgcttcattaggtgtggttccttcatatccatgttttctggaagattaaggtcactgtactgtgtgagttaagcagcatggaatatggtggagaatgatgtaaatttacaatgtaagtcactgagcttgttgtgttcagagtgtcctttgacaaatacagtgttgctttgggatatgggaaacatacggagtatgtttcactaacctaaaaatctgtgctccacctagatttgtacattcttttcacttctgtcacttgttgcttcacatgttttgcagctggttttaagtgcatacagacaagattctcaaatcatctttgtaaattgacattattatcatgtcaccaccctgttgcccaggctggagtgcaatagtaataaggtcaacttttggaacccttctgcaaatttcctaggatttttagagtagcttcctagcttttccttacattgctgtatatcagttatagagaaggggacctgcaataggactggccattcggctcctgctgcttccctacggggtagcaaggctggagggagagtagaatatggtgttccccactgagtgtttgggggacttagtagggtccccagtgtttgctcctggttttagcctcaggagcacttggtaagggggctatagggatggtcgctcttcacccttagagacaagtggctcttgtaaaagggggtcatctggtttggcacggtggctcacgcctgtaatcccagcactttgggaggccgagctgggcagatcacctgaggtcgggagttcgagaccagcctgaccaacatggagaaaccccgtctctactaaaaatacaaaattagatgggcatggtggtgtgtgcctgtaatcccagccacctgggaggctgaggcaggagaattgcttgaacctgggaggtggaggttgcagtgagcggagatcaagccattgcactccagcctgggcgatgagagcaaaactctgtctcaaaaaagaaaaagtaagagtgggggggatcatctataatatctaattctaccttagaactttcctttggtggtgggggtgggttctgggagtttgacagattgctaggttttggtataaggtcataaaatcctgtgcatatgggatttctgaccatttgccctgcctcttgcaaaataggtctaatggcaggatggtgtcataattaaggctaccaagactgcccattgttccaggctgggcagttcataatgggggcagacaatagtgcaaaaaaaattttacattttatctttagagtgtcagggtcaaattgatttccatggttgaggatgtagccaagtgtggaatcaggtggaataggtggagagttgcccatagtggtttggaaaagagaagaggactttgaaaagtggagggctcattaggtgacccaaattttacctggggcatcccccctttagggccccaacttagtctgtcagacatctctgaccttagatgggtgctggcaccactttggaatggttccctccatcactgaggacctgacttaaagtttttctatctcacttaaaacaaccctttaacgctctcaacttaggcaataataaattccttttcatgaattccctccaccaccatgcaccacacagaccacatgcccggaccctctgacttgtgtaaccttttgtgcatagctaggtgggttttctgtcctttgccagttgggtgggagaagggaagaatttagcataaataaaagcagcataagtcacctgaaacctgtgagtttgccctggacgagctgctgctgctaactgcatcacacatagggatcagggattataactgaaaaggacagaaatgagtcttttccctttctgggcagggcagccatccctgttcactccttggccttcagaggataccagagagtggccccagtcagttcccctcaattaccaacgagctactaggaaacggccgctgaaagactgaaaaaggagaaaaggaaaataactcagaaaaaaaaaaaaaggaataggactcagaaaaacaaaaacgaggaaaaggactcaggttcctcaccttaaccaagcggtggcagttaggcacttccacacggaaaccttccagtttcaccagagaatggccctggccagaaacttgcaagtgtctttgtgcttaggtgctgtccactgagggtcctcagttggaaaggaaaagatggagagaggaagatttccctgtatgtaaaaggggaaaggagaaaaagaaatcccaaactttgggcctaccttctctcctggctagctcaccagaatatgttaccagtagagggtcttgactgcaagttgtttaggttcttggcattttgaacaaagacttggaagaaacacccagcaaagcaatgaaagaatgcagcatcaaaagaatgaaaacaggaatttattgaaaatgaaagtacactcccacagtgtgggaacaggcccaagcagtggcccagatacagaatcttcttgggtccaaatgactactagaggtttcccgttggctgcttggtgctgacctaatgtaaatgaaatggtggcctgcagtcagtcaaccaatcagaggctgaagtaaagttacaaaagtcacactcctacgcaaatatctgattggttgcaaaaagcaaccaatcagaggtacttttaatttcccatctgccaggcagaaaaggtagaggtttgcaaagggagtagtctctggtccttttgttacttaggtgtggaaagttagggttttcccatcaatttagcttaaggacgttagcgtgaaacagccttaggtttcctgcctccagaccatgttctcctgcctcaggatcacaggctcacgccaccatgcctggctaatttttgtattttttgtagagatgaggtttcgtcatgttgcccagactgggagaaatatattttaaggtataattagcatgttgtgttttaaaaatcctgttgatatacttgcacattagtaacagagcttttgcttccacattgtacaatttcagttcagtatcttgtatcattctaattatttcactgaacttaaaatgtaagggaccttctacatattgatagaacacatgctttgcatctgtcatttctctgtgtgtgtgtgtgtgtgtgtatatatatatatatatatatttttttttttttttttttttttagacagagtctcgctctgtcgcccaggctggagtgcagcggcgcgatctcagctcacttcaagctccacctctcgggttcttgccattctcctgcctcagcctcccaagtcgctgggactataggcgcccaccaccacgcctggctaattttttttgtatttttagtagagacagggtttcaccatgttagccaggatggtctcgatct

SEQ ID NO: 1432 - DNA, 465 bp, Homo sapiens
atgaggtctggctcatgcctgtaatcccagcactttgggaggctgaggtgggcggatcacttgaggtcaggagttcaagagcagcctggccaacatggtgaaaccctgtttctgccaaaaatacaaaaattagctgggcttcgtggcgggtactggtagtaccagctactcgagaggctgagtcaggagaattgcttgaaccctggaggcggaggttgcagtgagccgagatcgcgccactgcactctagcctgggtgacagagtgagactccatcacgcacacgcacgcacgaaagtgaatggcacctccctcttgtttgttcttctggccatgtgacatgcccttcacctcccaccatcattttaaccttcctcaggtttcccgagagggtgaacagacgtcagcgccatgtttcctataaagcctgcaaaattgtgagtcaattaaacctctttatacatta

SEQ ID NO: 1433 - DNA, 492 bp, Homo sapiens
atgtaaatctataaattgggttaaatgatttctaggaaagtgtataataataataacaattatttttttgagacagagtctctgtcacccaggctggagtgaaactgtgtctcaaaataaataaataaataataaataaataaataatagaaatgaagttttgctatagttgagaaattatagaatgccatgcttattatgataacctcatacagaaatttttacagctttttgaaaaatggcttttttgttattcaatttttatagtcttataaacattaattttcacaagactagtgtaaaaatattgtagacaatttgtctaagcagtatttcggaagcactttcaacagttatgtaaagggtcctatttatgcttgaagaaaggacatgtataaggtttttagcatgaggaaattaagtctttctcaacctagaagtcaggagtttcaagagtaaacattcagtgttgaattaaagaatctgaatcta

SEQ ID NO: 1434 - DNA, 436 bp, Homo sapiens
agcaaattaattagagaataaagagtccaggtaaagatttaactgtattaaacttttaatgaacatcaaagttgatactctagggctgtgaaggaaagacaactattttaaattaaagaataagatctaatatttgatatcacaacagggtgactatcatcatcaataatttgtcgcacattttggaataactttggaattaaaagaatgtttataactcaaagaaattatgaatgcttgaggtgatggatataccatttactccaatgtgattatttcacatatttctgtatcaaaatatctcatgcaatcgataaatatatacacctactatgtacctgtaaaaattaaaaattaaaataaaataaatgctgccaagtcaattaaatgcacataggtaagagagagggttagggtgagagataaagaagaagaa

SEQ ID NO: 1435 - DNA, 16057 bp, Homo sapiens
aggcaattatttgggatatacctgtaagtgtgggggccttcagtcaggaagtcccttaagctcccagacatcccagcctgagcaagaagtggggacctcagaaggaaagccaatcagcagcctggatgccttccccactcaggaaggtacgctgtctccagtgaacctgacagacgaccagatcgccgctggcctctatggtaacttttctcactcacagtcattggcatcaggattctagggccagcattgccagcattccaatttaatgtcaatgtaccttttaaattgacctggaagaaagttaatatcgttatttggaaggtaggcccagaatatctttaaataaggttaccaaagaggccgggcatggtggctcacacctgtgatcccagcactttgggaggccaaggcaggcagatcatttgaggccaggagttcgagaccagcctggccaacatggtgaaaccccatctctactaaaaaatacaaaaattagccaggcatggtggtgcacacctgtagtcccagctactccggcggctgaggtgggagaatcacttgaacctgggaggtggaggttgcagtgagctgagatcacgccactgcactccagcctgggtgacagaaagaggccctgtctcaaaattacgaaagaaagctgtacaagaaagcttacctgatattacaaattatgaaatattttaaatagcattttattcacgttctggcaggcataagttttttcaggttatctcagctgaagaagaataataatccctgtttagtacgtaaatggtccttgaggctcgtgagacacgacatcactttataagcagtaaagccggatacaaatgtcagttttcactggctttgttatgtctggaaggactaattgatttttttcccatgtgaagaatgttattaatggaactttgaattattttctttgcatgcacacactttcccattgaattttgtggaaacttctcacatatatatgccaagatctacatttacatgcatgagaaaagaactgtacaggaaaaaagatcatttaacatgtatgggtgtgagttttcatttttattgccttgactttttcacagcatgtacaaacaatgaaagtacactgaagtccatcatgaagaagaaagatggtaacaaagattcaaatggcgcaaaaaagaatcttcagtttgttggcattaatggagggtaaggaaagatggtggttctagaggctaatgctgtcagtctcctttacctcctgcctaagtcacatttcaaggcgcctagtcggggaagcggccacagcgcagtgatgaaagattccctcctcagaaaggcagaaaggtgcatttgggctttgctttcctcctctggtgctgtctttaaggatttgtcactctcttaaggatacctgatgaagctgagcggtttacatctcctcacctctgatctgaaagaaatagtcttcagcgaacgcagcagggttcctgcactgtgttggacaacttgtacttacctatacgagaactcacaattgagcagaaaaagactgagagcatcactctctgggccaacgatcgtcatcttttccttcaaaatgggtccttttgcttagctctccatgtttacgacccaaattgtagggcctttcacaattgataaccacatcaccagtttgctttctaaatagaatggttattgtttgttccttctctttgcattggcccacgtacatagttaagcccctttgttgtcctacaattgaatcaaatcaatgaattgatacatggcccccacaagaaagaaataatacaaagtgtaccattagggtttaaccttatggtgcctgttttccaaatctagaagttttattcagtgataatggccaggagattttggagggcatacaccagaaaaactatcgattgcctatgtaatctattccccttgatactgggagaattaataggatgaaataggaagacatggggtgggggggggacaaaaagcacctaccgatctgttttccataaagtatgttttctcatgatttatgctaagccggagatgccattattttctttaacaagtgttacatgataccaattggttatatgataccgataaccagtttaagttagagtccattcaaaaccaccaggcatttaaatagaccttactttgaacttctaagtgcaggatctaaaaccactagtgaaatttctggagtcaattagcaaatcccttcatagaaatttctatcactgggtcttcgtgagcacaccttgcatctcctgaaatcccaattgccacctaggtatgaaacaacttcaagtgatgattccagctcagatgaaagctcttcttccgagtcagatgacgagtgtgatgtcattgagtatcctcttgaagaagaggaggaggaggaggatgaagacactcggggaatggcagaagggcaccatgcagttaatattgaaggtttgaagtctgccagggtggaagatgaaatgcaggttcaagaatgtgaacctgagaaggtggaaatcagagagaggtgtggtacattccccttccctcccttgcccctcccacatttaatgtactttggcaatagagttggccagttcagagcttttgtaattaaatgtttgcttttatctgttcctcagaggtatacacatcttgagatactaatatatacaagtgcagagtattacaactcttagatctcttatggtagaatggcctggtacctaatcacccttgttttctgaaaccttaactctgctatataatttaacatatggaaccacaatccactaaaacttgcattgtttgaacaccttaccttatatttaaagacattttaattttttggtggccagcctactttaagatttcagattttatgtttagccatttatcttgatacaggtgtatcattattacaggatcattgtgtggatgaggcctcagccaaagatcacatatactgtaaagatgatgcatatcacttacatgtttgtattttgttacacattgaatgatcaggaataccacaagaatggatttgggtatatcataaatagtagctgaaaaacactctggttggctgaaatatgtgcctcagaatgtaagttttcaagaccattagataaggatttgatgctcataaaatagagagtagaaaaggtggaaacttcagtatggtttttcagtatgtgaaatataaatagaacatttcagaaaacttacctctatttaatttggcaaatgaaagtttaactgcattaaaacaaggtaagtgtttttagtttatatttccaagtgtttcacatggctttttaacagctttgagatgtaatttatataccatatgtcatttttttacttttcatatgggttaaacacttgagtcaccaaatgtgggttcagatgtgtggtttactggtcagcacgatggatatatggtaatttgtggaaagtcaaggcaagaggatcgcttgagcacaggagtttgagactagcctggacaatatagtaagacctcatccctacaaaaatatcaattacctgggcatggtgtcacatgccagctgctctggaggataaggtgggaggatcacttgaaccctggaggttgaggctgcagtgagccagtgcactccagtctgggtgacagagcaagaccctgtctcagaaaaaaagtaatttgggtctccttcaacccccttaaaattaaaaatattttttaaaaacttagaacaggttgggcacagtggctcacacccataatgccaatactttgggaggctgaggcaggcaggcagatagcttgagcccaagagttcgagaccagcctgggcaacatggtgaaaccctgtctctacaaatacaaagccgggtgtggtggcacacacgtgtaatcccagttacttgggaagctgaggtaggaagattgcttgagcctgggacagcaaaactacagtgagccgtgattgcaccactgcactccagcctgggcaacagagtgagaccttgtctcaaaaaaaaaaaaaaaaaaaaaaaaacttaaaaatggcaaaaaaaaatctctaaatgttattccagaatgtcataaaggccaattggtgaagccgaatgtcaccctcccaaacaaggcctcaatctctggctggaggtgttggctctgcacagtggacgtaacccttagacccctaaggatttctgtgctgcctctgcccaagcaccttgtgccataatgacctgcctgggctggcttggggccacttgccttttaaaaatatatttttaaaagttgaagctgcgcagtgtcccacccctgtaatcccagcactgtgggaggccgaggcaggtggatcacctgaggtcaggagttcaaaaccagcctggccaacatagtgaaaccccgtctccactaaaaatacaaaaattagctgggcctggtggtgcacacctgtagtcccagctactagggaggctgaggcaggaggattgcttgaatccaggaggcggaggttgcagtgagccaagatcatgccactgcactccagcctgggcgacagagcatgaccctgtctcaaaaaaaaaattagatatttgggttgaaataaaaatgattttcttcttgtgaccaatcgtaacttgttttttctcctttcaggtatgaattaagtgaaaagatgttgtctgcatgcaacttactgaaaaatactataaatgaccccaaagctttgaccagcaaagatatggtgagtctgacctgcaaacaccatccccagtgtgtacaaagtgcatgagtgggttcattgtcaaggccagctgtaggctgcccgagctgttgcttgcatgcttttctcctgaactgtttccagcatgagtgggctgggtaaacatcatgtggtcttgctccctggatcacactgccagcgtttccttgaggcccaacttcggacatcctttacccaccctggacttttcctggggtggaggcatctgtgaggcgtacacttgcagacagaaagcagggctaattgcagtcagtcgtcatctttctacatatttcatttctatttatagaacagtaagatccagggagcagcatccaagaattttttttttaagttagcatatgtttttaaaagaaacctatctgagccaaggtcagcattcctttcagttatgaaactgtatgttatgctctgatgtggaatgcaggcggccactatttttaaacataaaaataaccgcacttgtcatctcgcagtctaagaaattcagagcaaacagcaaagagtttgtggttgccttagtgatcatgaatggtacaacataggacacaagtatttctatggcaatggttaatgtgacaccatggccaagaatgacatattctcatgtgtcgaagttatgtgcacattctttcataggccagactaaccccctggttgacagctgtcttttttattagtgcattgagaaaatgtaggatcccctaaggataccgaaatgcacagatactcaagtcccttatgtaaaatggtgtagtatttgcatataaactatgcatctactttaaattctgccatatattttaaatcatttctatatcataatacctaatacagggccaggtgcagtggctgacacctatgatcccaacacttcgggaggccgatgcaggtggatcacatgaggtctggagttcgagacgagcttagccaacatggtgaaaccctttctctactaaaaatacaaaaagttagccaggcatggtggtacacccgtgtaatcccagttactcgggagtctgaggctggagaattgcttgcacccgggaggtggtggttgcagtgagccaagattgcacctctgcactcaagcctgggtgacagagtgagactccatctgaaaaaaagcctggagtgcagtggcgtgatctcggctcactgcaagctccgcctcccgggttcgggccattctcctgcctcaccctccccagtagctgggactaccggcgtccaccacaacgcccggctaatttttttgtatttttagtagagaccgggtttcaccgtgttagtcaggatggtctcgatctcctgacctcgtggtccgcccatcttggcctcccaaagtgctgggatttacaggcatgacccaccgcgcctggcctcaaaaacttaacacaatgtaaatgctatataaatagttgttatactgtattgttttgtattacatattttttaaatattttcactctgccagtggttgaatctatggaaatggaacctgtagatacagagggccagctgtactaaataaaattgctggtcaagtccaggcacagtggctcacacctgtaatcccagcactttgagaggccaaggcagtggatcacttgagcccaggagttcagtttgagaccagcctgggcaacatggcaaaaccctgtctctacaaaaattagccaggtatgatggcatgtacccatggtcctagctacttgggaggctgaggcaagaagatagctggaggcccaggaagttcaggctgcagtgctccatcatcatgccactgcactccagcctgggagacagagtgacaccctctcaaaaaaaaaaaaaattcctagtcaaggggaaacatagaactacatattgaaattcttggatttgtattcatgaaaatacctggctataccctggtcactagtaaaaccataaaatctcactgcagggtcagtatttcccatcaggtttaacctaaacttaaaactggtgccttacaaccccagattttatagccatagtacacttttctttcactgttctcaaaatactaggttacgtggcctttgggaaggattctgttttcctgcatcctccaaattgccgagcatggtgtcatccacacacactgtgatgggtacatctttttaactgaattttcatttggtgtgaaagtgtttaaagtattgtgttgtgaaaagtagtggacgagtaaacacaatgccagggctagataatcatgtcaggacaccagttatttagcagtaatagaattagaatgaccagaagacataatttcccttctttcagtgtgacaactccagagaaacaggaatgtgaatatatacagaaaaaaaaggacactcttcaagtgacccaaaatgtgattgaaatggttaaaactaaataatcagtagcaggatgataaagagatggaagctctataatcccaactctaccttttctacagaaagaggacttcttgggttctggtgcttctgacataggctgtctttctttgatatatttttaaacttttaaagagtaagcacagcagaaatgaatattaaactcatatgaaggcccattgaaaagacactgtagtcatcctcatcaccagtactgactgctcagtctccactgagcttcatgtgacccagggttgagttgatcatccacaaagcaagtgccttcttcatgtgtccacagcctaaggaagtcagagtggagctgatgagagaatgaaattagttccagacggggttcccttttattttccctttccgtggttgaacagttgtatttgggattggggtgggaattgggttggctatacacgtacggtctcccaacctagtgctgtgctgaggagttgaaggaggtgagtttggtctggataggaaggaagcagcataattcagtgtaggctagttaatttcttcctaatttctatgaaaattgtttgcaaggccagtatgattacatcatattaatagcttaataaatggagccaagcctgagtgtttattctcatcacagaaactatgaaagcatggtattatccagtttttcagatgaggaaacggaagcagaataacttccctcgggtcataaagcttttaggtagcagagcctgcatttgaaactcagtggtctggctccagagcctctgcttctgcatggtgctgtctggtctcctttatagacattagaatctacacgtcatttaaaatcaggagaaatgtcccagtttggtgtttgaagcttctcttagggctgttggtttttgagagcagattctaactgcatatatatactttgactataaaaggacaggttacttgtgctttcaactaggtctcagaaagtctataaatagaagaactaacgaccacttggtgttttggcagaggttctgtctgaacaccctccagcacgagtggttccgcgtgtccagtcagaagtcagccattccagccatggtgggggactacatagctgcttttgaggccatttccccagatgtcctccgctatgtcatcaacttggcagacggcaacggcaacacagccctccattacagcgtgtcccactccaacttcgagattgtgaagctgctgttagatgccggtatgttggctgcccttccaccctctcttctctaacagtacttgggttgtgactcatctcagagaacctggttgagccactcctgaattctctgaccatgctaaaatcctttttattgcttttccacatgacatggcaagaattttcttgagtcattcataagaggcttgaagtttaaacaaaactgggtgacacagattctagatctgtttttgaaaggaggttttgaggatcttcttgctgcagttcagctgcattcaaaagtgagaggtgtatgcctggtaagaagcatgtctcacgttccctcctgagctgaatcatgcgggcttggccggtttgcactcaggaggcagagtgctgcttacaggcccagggtcacagccttggtgcgtgtggaccacttgatttgaccttactccatgactgctgtccttgcagaagtgtgtggttagtcaagatggggactaagcaaagccaccttaacagatggtcaaatgatcaccattctcaccaaaatatactgttattggggaaacagcatagagcaaagggcatgttattcttgtctctcaaccataatagaatagtagaaacttgttatcccagaatagagccagtggacatcttagacatgaagtgagggaggggcacatacacagatggtaccctcaagaaactgtgagctttcaacttcttgttcaaatggagcagcctgatgccacatagaccccaagtcttttaatttttgtaatacatatttttatttctagtatgtgacagagaagtcagagtatctcagtctgattaatgaggatgtagtgtgaaccttagaatatgcaatcatactgtccaattttctgaaattctgtcttcatccactgtccaatctcttctgctctgttttgggaacttggaattgatgcagagaagaaagccaagcagatttatccttcctttctcttataagtgtgtttgttccctctttttggagccatgttagggtataactgcttccatcttacaggaaggaatttcaagcccctcctcttcaggctttctagactataaacagagctggtgatacagtcagccagagtgattgtttaaacagaagtagataatatccagggaagctgaaaacaagatttcactatcactcctgacaggaacagcttagtatacccttagaagttgataaaacatcttggcaaattaaataattttaattccattgctggatggtttgggttaatcacttatcttaatggttactgctcccccttctaggctgagattctggctccataaggtgtagatctaggatgcttcagcatctatgcagagcagagtccgcaaagtccgaggtgctaaggagccccgaagcgcacacgaattcacctgcttctcctccacagggccttttattttctgcattaaaaacacccacttttaaaaacatgtccttagtatggagttgtttgggatcttaaggtaaatgttcatggtaccttttattttcctttatgatagaaacattctgaacattttaacttcatatttggtcccacataaaagctgctttctaacactcaccattccggtcatttcagagaaagtgccgaaggaacttttaaatgcccgaaggataattttatccctgaagactccttaagaattacaagaatagaaaaggtctggttcatcgattctgttaaggggacttaactgcatttgttctcgaccataaattctggagctggatgttatatgattggaattctgcttttcaggacccccgacaggccagagtagtaaattcagagtctcagaatgagtaatgtttggataagtaggtaccaccctgtccaacgttccatacgtaagcgtttgcaaacacttcgttcatgaatagctcactacctgcttcactttcctaaacacagctgagtgcctagattccaaaaatcgtttattctcaagagcaaccagtagaacaaccaccctgacttccaagccattgcatttcagccaccagttgcaaacaagatacgctgtggaagcttaccgttgtttctcttgcttcaggtgtcgtgaaatagggggaaaaaaagtttttggtttagtatgaaaacatctctcacatttccttctaagtcactcttggtctccagccacctggtaccatttcactgggctcctgtaaacaccatcccttcagtggcttcgtaagcggctgctattagaaggggctgcttcctaagagacttttttttttttttttttacagatgtgtgtaatgtggatcaccagaacaaggcaggctacacccccatcatgttggcggccctcgccgctgtggaagcagagaaggacatgcggattgtggaagaactcttcggctgtggggatgtgaatgccaaagctagtcaggttagtgcgcctggttcctgtgctcaggaatgcacccgtaaccagcagacaggactgcggtggccattctggcagagcaggcatagatgccacgcttccaccacagtgcacttgtttgcaggcctgccctgagtccatacactgcctggcactccttgctgaccaaacataccagggaaatatgggcttaaatttcacactggaaacttctccctcctttgccttgccttttgtccatttgcatagtttgcatggaaatactgttagttcccctacatataaatgattgcgcatccccatcagatgctcagtgactgttgcttcctgtctctgtgttgtactgtcttcatagcaaacagtgtcccaggtccagatgtgttcacagcttgacttttttttttttaagagacggtcttgctctgtcccccaggctggagtgcagtggcgggatcttggctcactgcaaccacccccggctccctggttgcagtgattctcctgccttagcctcccgagtagcagggactaacaggcacacaccaccacacctggcttttttttttttttttttgagactaagtctcattctgtcacccaggctggagtgcagtggtgcgatcttggctcactggaagctctgcctcccgggttcacaccattctcctgcctcagcctcccaagtagctgggactacaggcgcccacccccacgtccggcttattttttgtatttttagtagagacaaggtttcaccgtgttagccaggatggtcttgatctcctgacctcatgatccacctgactcagcctcctgaagtgctgggattacaggcgtgagctactgcgccagcccctggcttttttttaagtagagatggggtttcagtgttgcccaagctgctcttgaactcctgagctcagacaatctgcctgcctcagcctcccaaagtgctagggttacaggcgtgacccaccactccaggcccacagcttgacttttaaccaccacctgaacttccagccccttactctactgagacatcctccacgctaaaatgaagttggctccttactttatgcccttcctttgctcatagctcatgggaagctggtttctccctgcttgccaccacctgccccaagtagttccatcgccagttctttcccttctgtcaccacactcttccccctttccctagcacagccccactagaggccaccactgccagctcagtacgtacttctgaagtccttgtcatctcttcccataggcgggacagacggccctcatgctggcggtcagtcacggacggatagacatggtgaagggccttctggcctgtggggctgatgtcaacatccaggatgacgagggctccacggccctcatgtgtgccagcgagcacggacacgtggagattgtcaagctgctgctggcccagcccggctgcaacggtcacctagaggacaacgtaagctgtctccattgggcctcctggccaggggtctgggggactctggacgggagctctgggagtgccttttggccaggagcgaccaaatcctcctctattctcctctgggatttgtgtcgccatctaggtgcctcccttcacagccaagcttggctacacttactgtgtgtgtgcaaactaacacgctcataaactagtacccaaagcagaataaataggccctaccccaaaaattcatgaaatgaaaaagtgatttaacgggcatgtccaagagcccctctactaaagggaaatcaatggatttgcactgcagaatcaaattcagtgtaggtgacttctgacaggtgcacttggaaatctggattatcattagaggctggggttacacggtgactaaaaccagttcctactatagtgaaccttttccacccaaagtgaacacactgacccatcaaagtgagtagcttgtgacacaacatatgccagagcctgcagagtagcttgacttcttgaagcgttttcccatttctgcttagtctgtcccatcaacaccactctgctctcttctcccagttcccaggctgtccacatttccagataactccttgaccgggaaactcaaccaaagggggtacttttgcgtgtctctaggccaaaggacaggagtggtgataggtagaaggtaggaactggcatgtaggcagtgagatggtgtaaaggtcacagaggtcgggttggcttggttccgtttttgaaagtttatctctgtggatcacaggtttggatcagagcttctttagctcaaaacaccaaaaagttaggaaaatatcctttgtaggtcagattcttctgggcccaagccagtagggagaaaaaccagcggagtttttcactggtatgagggactgactagcttcacactcagccatctccacaggagcacatggaagctgcagctgtagcagattcccttcttcccctctgtgggagggagagcttctgaccgacttctttcttccagaagagtttgttagctgtgctgtggtttttgtttgattttacttctattatctttcaaagcttttgaggggaaggatcataagattaaaccaaagagaactgtgtcctgctgctgctgctgaccagagggaaatccgtatttcaagactagataggctgggcacagtgggtcactcctgtaattccagcaccttgggaggctgagacaggaggatcgctcgagcccaggagttcaagaccagcctgggcaacatagtgagactcccatctctacaaaaaaaaaattatctaggtgtggtggtatgcacctgtagtctcagataccgtggtggttgaggcaggagaatcacttgagccctggaggtcaaggctaccgtgatctgtgatcgtgccactgcactgcagcctgggagacaaaccctgtctcaaaaaacacactagacagaagacaagttgtgttgttctttcccttgatactcctttatatccatttaaatccctgaaatttaatggaaatcaagcagttaagtgaagcttttttcacccatatgtagtgtttcccctcttatttccagaagttggatctgtgcaacccactgggattgcgtgcttacacacagatgttacttgtagccttaaaccgaggtggtttagggttttaggatcacagtgccctctctaagaggaaaggtaaaagatctttggcaaattgcagagtctctaaacacacactactgctgcttgcctggtcattcataattaattagaagaaaaaaaaactttctatccccatcttctgcttccccctcctggtgggcagaatggttgagtaagataatcctcttaactgggacctctggagggtggaggcttgcctcattcatcttcacatcctcaggccttcacccttagaggtcccaaaaaagtttcccagaagaccgaacgagtagggatatttggggaaccttgccaattattggagggtgttttgttctgttacctttcggttgtctggaggtttgagaaacccaacatggcttgttctttccatcttatcttaaggatggcagcactgcgctctcaatcgccctggaagcaggacacaaggacatcgctgttcttctgtatgcccatgtcaactttgcaaaagcccagtctccggtcagtgttgtgcatttggcatttgtaaataggctgaaatccaccagactggtggacccccttcctccaggaattgacgggagacagattttatgttgattcagaaaatggaagttttagtctggagcttaagagttcatcctttccgcctccaccccgcaaaaagcaggagaactaatgttttagcagaggctggaccttgcttgtccttgcaagacatatgctcacagcttcccatagaggttttgattctgtgcagaattatccagatagcagcccctgagcccatggggatatttcgccatggttctggcattgttcctgaagcagatggcaggcagcctgtagtccacagttcactctgagtgggaaggtgacttcccaggacagccggacatagcactgctgagcccagctggccttggagctgtggacacctgttccctgttctcagccagagctctcctggctcgggctcacagctgcttgttgcctgtggtgggccaagatcctatgtcacagggtacacatctgcctgaggtcacttattaacccccagtttttttcctttcctggtctctagggcacccctaggcttggaaggaagacgtctcctggccccacccaccgaggttcatttgattgattgtatgcaaatagccctttatttacatgccactattaagctgctaattgttcctgttggggtgacagatactgaatgtatacgtattgtgcctgagctcaccagcaaacagaagcatcaagcccaggggtaaaggctgaagctttcacagtgcagagactgctagcctgggcacacacacctcctttctggccgtcttctgtgtagggcacactttaacccagtctctgttgctgttgagtctctgctccgttttgtacagtcacagggaattctgatctgaaggggcaccttctgttcactcccacaaagtggtgtctggttctcactgagacgttttaagatttttccacaaatatttatatgtactaaatgtggaaccattagaaagttcttccaaaatctcattccagcatagttttggatttttcttttgtcttattttaaaataaggaagtcgagatgactttgatcattggtaacttgggcctgggccagacaaagtataaaacttacaaaagaatattctcatttggtcttaactaggtagatgtaatatatgactttttataaaaagggtatctatatgaacttgacacagtattttcagcttttgtattccatactaaagccatgaagaactacacgtaacatcatcatttgtattaattgcacaactccaatgctaaaggttggattgtgttagaggaatcggctctgtatttgcctctagagaaacacagtgttctctttgtatttatggattcctttttaccgtgtcacatttactttggtcctctatgtatttaaatgtttgaagtgccttagactcttgccatattttcaaaataaaattccattaagctcttt

SEQ ID NO: 1436 - DNA, 225 bp, Homo sapiens
ttttttttttttttttgagaatggagtctcactctgttgcccaggctggagtgcagtagcatgatcttggctcactgcaagctccacttcctgggttcacgccattctcctgcctcaacctcccaagtagctgggactacaggcgcccgccaccacgcccggctaattttttgtatttttagtagagacagggtttcatcgtgttggccagaatggtctcgatct

SEQ ID NO: 1437 - DNA, 148 bp, Homo sapiens
  SITE (136): n equals a,t,g, or c
aaaaaaaaaaaaaaaaaaaaaaaaaaaaaaaaaaaaaaaaaaaaaaaaaaaaaaaaaaaaaaaaaaaaaaaaaaaaaaaaaaaaaaaaaaaaaaaaaaaaaaaaaaaaaaaaaaaaaaaaaaaaaaaaaaaaaaanaaaaaaaaaaaa

SEQ ID NO: 1438 - DNA, 158 bp, Homo sapiens
taaaaaaaaaaaaaaaaaaaaaaaaaaaaaaaaaaaaaaaaaaaaaaaaaaaaaaaaaaaaaaaaaaaaaaaaaaaaaaaaaaaaaaaaacaaaaaaataaaaaaaaaaaaaataaaaaaaaaaaaaaaaaataaactaaaaaaaaaaaataaaaaaa

SEQ ID NO: 1439 - DNA, 126 bp, Homo sapiens
  SITE (9): n equals a,t,g, or c
  SITE (10): n equals a,t,g, or c
  SITE (14): n equals a,t,g, or c
  SITE (20): n equals a,t,g, or c
  SITE (95): n equals a,t,g, or c
  SITE (107): n equals a,t,g, or c
  SITE (108): n equals a,t,g, or c
  SITE (110): n equals a,t,g, or c
  SITE (118): n equals a,t,g, or c
gccaaaaannaaanaaaaanaaaaaaaaaaaaaaaaaaaaaaaaaaaaaaaaaaaaaaaaaaaaaaaaaaaaaaaaaaaaaaaaaaaaaaaaaanaaaaaaaaaaannanaaaaaaanaaaaaaaa

SEQ ID NO: 1440 - DNA, 383 bp, Homo sapiens
ccttttcttttcaacttaagtaattgggaagttacaagcatagacccaacttgagaaaagacagaacatcatctcatcttagcaggaggacagcttaaccaaatgagaagttttggatttctctaatgcttctgtaataaatctagagagatttagaaggaaaatcaatcttaaaatgagaatgaacttttaataatctaaatgttgggtatgtgatttttagctgattcaggtagaatatttgttaaacgtttacagaataaaacaatggcaatgaaccaacctatttggaaagcaatccatttaagtaataagaagaaaagggaaaaaagatggaagaagcaattgctgttggaggtacttgtcacttcctgtagcatcca

SEQ ID NO: 1441 - DNA, 127 bp, Homo sapiens
ttttgagacggagtcttgctctgtcgcccaggctggagtgcagtggtgcagtctcggctcactgcaacctccgcctcctgggttcacaccattctcctgcctcagcctcctgagtagctgggactat

SEQ ID NO: 1442 - DNA, 546 bp, Homo sapiens
tttcaccatgttgaccaggctagtctcgaactcttgacctcaggcaatctgcctgcctgggccccccaaagtgctgggattacaggcgtgagccatgtgagccactgcgcccggctttgggctttgtgtagatcttaaacatgcgaattaaaggtaatgggtttgttaaactcagttagttcataggcatggtagagctactctttaatcaggagccctggctgccaatgagaattctggttgagaaaatacttaatatcccattaggggaagctacttttcactgcagagtgaatgtggatgcagcctctctgagctgtggtgctttactctcctttttattgagagaccaacagccagagagagaggggagagtgaaagtgagagcaagaatgagagagagagaccaagaaataactgtttggagacacatctggtgctccttagatcagcaactttgacacagcaatttgtaaatactttacattggttttgaggattggaaagtttcatttttcacataaccacacaaattctgtgggccac

SEQ ID NO: 1443 - DNA, 295 bp, Homo sapiens
cagaataaaaaccgcctaacagctcattatttaaaattaaaagtcctgttgtttagcaaatatccacactttccatagcagaattgtgcttttctgctccttgcttctgggtagggggcaatgggatgttcacacatgggaaacaaggaaggtcttgaaacgtgtttggcaattgaacttaccctcttgccttcctgcttttctttaccagaagaaaataagttagctgtaggatttaggagaacacattgaagaagactgagacaaaactaagcctaactaagcttagaagagt

SEQ ID NO: 1444 - DNA, 295 bp, Homo sapiens; identical to SEQ ID NO: 1443

SEQ ID NO: 1445 - DNA, 195 bp, Homo sapiens
ggatttcctttttttttttttttttttgagacggagtctcgctctgtcgcccaggctggagtgcagtggcgccatctcagctcactgcaagctccgcctcccaggttctcgccattctcctgcctcagcctccggggtagctgggactataggcgcaggccaccacacccggctaatttttgtatatttttagta

SEQ ID NO: 1446 - DNA, 186 bp, Homo sapiens
ttttttttttttttttttgagacggagtctcgctctgtcgcccaggctggagtgcagtggcgccatctcagctcactgcaagctccgcctcccaggttctcgccattctcctgcctcagcctccggggtagctgggactataggcgcaggccaccacacccggctaatttttgtatatttttagta

SEQ ID NO: 1447 - DNA, 263 bp, Homo sapiens
gcagatggtgggatgataatgcaagaactgataacctgctgattctaacaacatgttcataaagcatttccacctctaaagcacagttacgtaaattctattacatctaaatatgcgtaggagataaaatcttctccagttagtgggttaaaaagttagtaaattatttttaactaagttaataaaataaaacaatccaagtcagatgtcataaatgggccattcctttagcctggcacagtaccttctgcaaagtttatgag

SEQ ID NO: 1448 - DNA, 545 bp, Homo sapiens
actgaataaacccggcaaatacacatgatgagagaattttgacatgtctgacatattaatcataggaggaactgccaacattcattttgtgatcatacttccctagaactgtattcaactctacaacacaagatcattcaaaaaaaaaaaaaaaacagaaaaataaaaacctgtcagttcccaataaactgaacccccacatcatgactcatctcaacctttcaggttttcatgatttaaaccaccacttaataaggcagaaattatttcctcctcctcctcctttcaaaaaaaaaaaaaaaaaaatacaagtgataggaagaaagctccattcctattcctgaacaacataatccaccaatgacttctcaaagtcgttcacagatttttacatgatagcaatcagacagctgatgcgctgttttcctaagccagtatggtcaaaactacttgaccagtaactcaaagttcttttctacaggctaaagaaaaaccagttcaaagcagcattttaacatgtcatttcaaggttttgaaaaaaatta

SEQ ID NO: 1449 - DNA, 648 bp, Homo sapiens
aactagtctccagatcagctagccagcaagtggcaaacaaagtgcacagagatctgtgcccaaaggccgctcaatttaggaccttcccaacaagcacccaaatggcgatgatggctaagcattgagcttaaacatgactcactaatgacctcctttaaaaatagtgctgttcttcccttgcacaagaggtgaaagagccaagtcagagatgtctcagctgtcagagttggcactcccatggaagcccagatagctgtaatttattttttctcttttttcttcttctctccactgttttcctcctgcttcttcctctcttgtctttctccttttcctttgtctctttctctttcttctttttcctcaaaaaaaaaaaaaagcctattttgtttcagcaacaattattctccttttcatgcccattgctagccagttgaaaggtcacaggttcaaagatataacaagagccaagaaactttgggctcattggcctgagataaaaaattatacataagaaatagagatgtatcaatctcagataagaaaaaaatcttatttatttggcacaattttagtcaaattttgccctaaccaaattttgacagaaagatgtattgattttctaaaaaaaaaaaaaaaaaaaaaaaa

SEQ ID NO: 1450 - DNA, 5599 bp, Homo sapiens
ttctctgaagagatcagctggtttcccctgaagaagtatttgccttcctgggccaccatggggaagagtctgattaagattcacaccagagtccgggtccagctccggctgactaatcactgctttcggcccctaagtgtgcgcatcctgaggatggggccccggctccagggtagggtcctgactgctgtgacccccgggcaagggaatcagctggagcatttccaaggtaaaaaaggctctcctgttttgctgtgccagttagcgcagatccttcccacggcacccatcccatctatcccaaaataacaggttcgatgaaatggcaggacaggtggtggcttttacagcagtgaaaacagtttctaatataggactaacctgatgtgggagggtcaccttacaggtgagatcttctgttaagggaggagaccaactgatatttactgagcaactgtatttgtcaggcattctactagaaatgcacatctaattggatgtggtggctcatgcctgtaatcccagcactttgggaggctgagatgggcagatcacttgaggtcaggagctcagaccagcctggccaacatggcgaaaccccatctctactaaaaatacaaaaattagccgggcatggtggtgggcgcctgtaatcccagctactcgcagggctgaggtgggagaatcacttgaacccgggggtcggaggctgcagtgagccgagattgcaccattgcactccagcctgggcaatgagatggagtgagattccatctcaaaaaaaaaaaaaaaaaaggaaagaaaaaaaaaaagaaatgcctatctatccattatcttgtttaatgagagcaccaacagctcccagtatgatgtggctccaggtggtcctctgacattttcctcttctgatgtcacagcatatgcctctccttccccacaagctgaggggtgtaatcgtaggttaagctaagcttttcatactttgaaagatcctgcagtcagagctgtcttcatgaaggggcaggcctttgaaagggtggcaggcgccctatgcaatggggctgaggactgcctgggaaaggagccaagcaagcaatatgctgcaaccagggccttaaggtttctgctttatcagtgacccataacctgtcccaaggtacatattcctcaagctgcatgtgcaaatggggacatcagggaggaatactgtggaagagagatcagaggaacagcaagagctctagaacaagggacagagactcttaatttcaggttatttcaaaacagtttctcgagcaattaagacctaaatctaaggtagatgctggctgttgatttaatccgtcctggcccatggttccattccatggaatccgactacagttaagtcatcacttaacagcgttgacagggtctttagaaactgcaactttaagcaaaatgatgtacaattaaacttttttttttctcatcaacattataacaaaatggggctgggcgtggtggctcacatctgtaatcccagcacaaaaacctgtctctacaaaaaatacgaaaattagctaggcgtggtggcacatgcctgtagtcccagctactcaggaggctgaggtgggaggatcacctgagcctgggaggtcgaggctgcagtgagccgtgattgtaccactgcactccagtctaggcaatggagtaagactgtctcaaaaaactaaagaactttaaaaaaattataacaaaatgatgctgaagaaaacattggaggacctgctgtaacatcatttggcttaaagtcatggtttccaggaacctgttgacaacatgaggacttaatagatatgatcagcaggatcatgaactagaaagcggcttggattctatccttggttttgccattaactgccaaccacatgacttcagataacctcttgccctcactaccttgtggagttactgaaagataaaatcaaagtgctttaaaaagatgaaagcattatacaaatttaagattttagcacagggacaaaaaatacagctaagactatgaggagcttctgaaagcagagattgagagctgtggcaaatatatgagccgtgacgcaatggggagcgtaactagatggcaggtgccctgcctttgcccccaccctctctccccattgtcctactcattcataacccagattccagggctcattcctctggagaatccttaactgtgcctgtgccaagacaggctccacaaggctggtcaggcaggctgcctgggtgcaaacggccaagccatgagggagccaaggaagatgggacacactgcttctgaaaggttactaacacctttttaagagagacctttggactgcttcatgtcctggaagaaggggaaaaaagagaccctttgggcttctggagctagccctgaaccaaaaaactccctaatcaacctgacttaggtaaaacctttactgagctgggaatctggttcagtctgggattgtcagggactatttcagggcaacagaaggggactggcttttcttgtcataggtcacaaaggcagagagaaccacaccagcatcaccaagatggccaggagtggaaaatgcagacattgagcctaaaacaagaagccatttccttgggagcactgtgatgggggccgcgctcactcactatatgcccaaagcctctggcctgggtggctgctgttcagttgagagtgtaaccagctcctgttttccctgccagggcttgagtcctgtgagaaccttgggaagagagaagagataatgggtagttttaggggatagaataccccttcctcctaccaaatgtaagagaaatccacccccgcaacaagatcttctcaaactgttttgtgctctgaagtgtctaaagataggggagcttttcagcctattctagacccagctccttctcagaggaaaagagagggagctggccagggactactcccatgccccctcaagaagagcagagagagtttctaccccatcattccacaaagtcagaacagctagaacggaggctgaagagactgagagcagctgcagaaatccaaaaatattgaccttataagctcaagatgctgtatgctgggtttttacaaggatattcggtatttgatgaaacccagttaggcatgacatattccccttctccccattcctacctctcttttattaaaaattttatagttacagtgtctatgttgcccagcctggtcttgaaccctttggctcaagtgatccacctgccttggcctcccaaagtgctgggattacagatgggagccatcgtgtctggcccattcctgcctcttaaagccctccacccaacaggcagacttgagactcaaaccgtggtcccagctctgcatcaggggtagtttggaattcagattctttcaaactggggtaaaaaccaggcccagagttcagagttcaacaacaagcttccaagatgccgcccaaaggaaaaagtggttctggaaaagcggggaaagggggtgcagcctctgggagtgacagtgctgacaagaaggctcaaggtcccaaaggtggtggcaatgcagtaaaggtcagacacattctatgggaaaaacatggcaaaatcatggaagccatggaaaagttaaagtctgggatgagattcaatgaagtggccacacaatatagtgaagataaagccaggcaagggggcgtcttgggttggatgaccagagggtccatggtgggaccatttcaagaagcagcatttgccttgcctataagtgtgatggataagcctgtgtttacagacccagcagttaagacaaaatttggatatcatattattatggttgaaggaagaaaataaaatcatatgaaagactgaaagaaaaaaaaaaaaaaaaaaaaaaactaggcccaggacaccaaaggcaagaaaggcagaatctttaacaaattaggggctgggtgcggtggctcacacctataatcccagcactttgggaggccaggagttctagaccagcctggccaaaatggcaaaaccccgtctctactcaaaataaaaaaattagctgggtgtggtggcagacacctgtattcccagctactcagaaggctgagacacaagaatcgctggaacccgggaggcagaagttgtagtgagctgagattgcaccactgcattccaacctgggcgacagagtaagactccatctcaaaacacacacaaactaggccaaaaccgtaagcaaaaagcaaagaaaaactcttctaaaatggccactgtgatttctgtgccttctcttgtttcatacatacatatatatatatatatatatatatatatattttttttttttttttgagacagtctttctctgttgctcaggttggaatgcagtggtgtgatcttggtttactgcagctttgacctcccaggctcaagcaatctgcccccctacaaagtagctgggacaacaggcatgcactaccacacctggcttcctcctcgccccgaggcagagtcttgctctgtcacccaggctggagtgcagtggcacgatctctgctaactataacctctgcctcccaagttcaagcagttctcctgcctcccctcctgagtagctgggattacagatgcccgccaccacacgtggctgatttttgtatttttagtacagacggggtttcaccatgttggccaggctggtctcgaactccttacctcatgatccgcccgccttggcctcccaaagtgctgggattacaggcatgaggcaccacgcccagcctttttcttttttttaagatggaatcttactcactctgttgccgaggatggagtgtaatagtgcgatctcagctcactgcaacctccgcctcccgggttcaagcgattctcctgcctcagcccaccaagtaactgggattacaggcatgtgccaccaggcccggctgatttttgtatttttagttgagatggggtttcaccacgttggccaggctggtctggaactcctgacctcaagcgatccacccatctcggcctcccaaagtgctgagatgacaggtgtaagccaccatacccggcctgtcgtcttctcgatatatcaaaatagagtgcagtggctactgctgctggtcatgtgggtgtgcagaatggtacccaataaaacacaatgggtgctactggaaagcaaagggtgcattgggacacagcctactcatgttccttttgcctttctaagcctagagtccttacgggacagtgcccattccacaccagtgcgttccacttcccatggggacaccttcctgcctcacgtgagaagcagccggacagatagcaatgagcgagtagctgtgattgcagacgaggcctacagccctgcagacagcgtgctgcccacccctgtggctgagcacagcctggagctgatgttgctttcccggcagatcaatggagccacctgcagcattgaggaggagaaggaatctgaagccagcaccccaactgctacagaggtggaggcccttgggggagagctgagggccctgtgtcaggggcacagcgggcccga

SEQ ID NO: 1451 - DNA, 3164 bp, Homo sapiens
caaaatccgctcagtggtgagcctgctcattgacacctgagaaggcatgactcctcccaaaaactagccaggtggaccaaggaacccggctacccattcccagcaatgggacccatcgcggaaccatcggcacatataccaagtcctcctctcatgactcaaagtccactgcagcctaggagggtgtttcccagaagaagaaagggataggctcatgccctgtctaaacaaactgggaaaactcattttcttcagaagttatttcaagaaaggctcagcgactctgtttctcatctttccaatttgcaggataatttttggttttgaattttgatttttcatagatgtatattattttgaagtatcaaataaaaataatttattttactattactgattattgcagtagtatcacctagcagaggggacactagttgaaaactagagagctgctgtcctctgtattctgcaggagcttttcctgctggtgccactgggttccagtagactcatcactgcagcctcagcagggcaggccagggatctggacaatggggactgtttagttttttgtttgttttttttgccagccagaacttttaaaaaagtaaacatccatgtagaatgattaaatggaaagttgcttcttatgatggtctgagttggattttcttttccttttgttttttcaaatctgagcagagtgggcatctgaagggaccaccgctacagcaacagcagcatcaggggtggggtaagtctgtccccttagtctagagcctagtgggcatcaccatagttttgtataatgaaactagacttaacgtgattttttttttccgaagaacctcaagacttttatagtgctccaggggcgttaaacgaattcagtggtaccagagatagatagttctgtcagaaatgttggacaaagtgtagttaagagaaagcagagttaagttacctgagagactgttgagatttggatagcagtgcttattttatatacacccccttgacccaaagactatttcaatttatattttaacaacgaaatgttattttcttaacaattcatattttgtttttactttatggattaagaaaatagagcctgatgaactaaacgatgcaagaaagaaactgatcctgagaatgaaaagcttcagaaaatagaattccaagatcaacagccttagaagggaccaggaaaagaatcttttaaaatagatttctaagagatgcctacaaaacacagaatgtgaccgtggcagagaccaacacttagatgtagaaatgctgccccctagggtcatcctctgcataagttctaggaaagcatcaccatccttgcagagggaagtcctcgaagcacgcagcacaggcatatgaagggcgagtgtgggatcctaggcccaagctcttcaactctaaaaccaatcacacacaagatcctgttttcatctcagggagagatttctaagtcatctggggcttgagggcttatttaagggtggtcaatggacatattcctggacccacacaaaagtagagcagctgctgataccctaattggacagccccaaacgcagaacagaacaagtcacttgtagacttgacctcccctattttgtcccccgagatggtagaaccatgtccatgtttacaatatgacaactgtggaataattggggttcttagggagagatttgcataattttaaagacatcctttcatctggaccagaggtcaatcaacttatgtcaagtgctacacagtaaatattttggtttagcacgccatactgtgtcacaactgctcaattctgccatcacagcacaaaaacagccacagataatttgtaaatgaaggaacatggctgtgttccaataaaactttatgaaaacagtgagctgaatttagcctacaggccataatacgccaatcctgctctagacaataaaactgatccttaccagtatgttagcagaagagggtcagtcagctctgtttccatgcctgacatgtatcaaagatctgggacctcttcccagtggaggcactagggttgcttgtttaaagggtgcttgaacaactaaccagcaaagagatgtctgatgccaaatgggcaagatcaaatactggaatgctaaaacacagctggaatctaagaagggaagagggcttctctgaccattttcataccagcaacaatttaggcagaattataaacatctatttatcgagtgacaatacaaaccgaaggagatcctagtagagattaggggtcagttaaaatcaactagccactgccacttgtcatctacatagcaaaggctttatttagcacaggactaacgtgaaaagtagacccagagatgaaaaggctgtcaggagacagggggctggtgtccacctggtatctactgtcttatgcaacatagaagattaccttttagtgtagtgctcctacctcagtttgtagaatctggtgtttctatgcagtgagtgatagcctcaactctgacctttcatattcacattagagacagatgcagtattccatatcctagtatgttccttgtgtctagagttctaacagtacagtagtctatgccatttctaacagctaaattttgctctgtaaacagaaactttagggttgtttttttccagggctcatcccagaaaatatggatagaaaagtttccttcagtttgcttttcaaatagtgcttgaataataaacctcctttgattggtgactagtcttttttggtatatctccacctttaaaaattgttcaagtttttaacctggttatactgtgttctaacatgtctctcattttctctcaaaattagtttatctcattgtagaaaaagcaatggttttcatagcttcatctatcaggaaataaaactcttactaaagaatagcatactgcatctttaagcagtagagggtaaactacctgcaaatgtgaatttcttagatacatttaaaaatatatagttgttaaccttctgtgtgccaaaaactcttaagttacattttccttcaaagcaatgtacttttttctacatatgcagtatgtagttagcataaaatcattggtgccatgaagattatttttaaacttaaataaatatttaaatatcatgg

SEQ ID NO: 1452 - DNA, 339 bp, Homo sapiens
acctggatgaagtcgagaccgggctcctctgccctgggtccagccctctttgccctgaccagagttcaggatgtccggggcgcgtcccctgtccctcaggcaggctcctggtgatgtttgcgagtgacgagcgctggatgattttgactccatgtgccccatggggcagggcctcagggcacagagccgtccggagacatccacgcgggcctcagcgacatccggaaaccccgagggtggcctggtgtgcgtgaggaggcacgcggtgtggcgttgtcttccctggcctgcgtgaggaggcacgcggtgtgacgttgtcttccctggcttgccccaccc

SEQ ID NO: 1453 - DNA, 339 bp, Homo sapiens; identical to SEQ ID NO: 1452

SEQ ID NO: 1454 - DNA, 222 bp, Homo sapiens
attcaaattaatcacatgcaaagcattagttagaggctcttggacattttctgtttttagagctttgttggatgctcacatggcaatgtctgtgcagtcagttcctacccagcctctgggctcttcttgcagcttatcttgcagaaagaagcctcatcagaattccagaatctcagctatgattagcttactccacctcagctcagaaacatgcatgattcc

SEQ ID NO: 1455 - DNA, 268 bp, Homo sapiens
acagaaaaccaaacatcgcatgttctcactcataggtgggaattgaacaatgagaacacttggacacaggaaggggaacatcaaacactggggcctatcgtggggtggggggaggggggagggatagcattaggagatatacctaatgttaaatgacgagttaatgggtgcagcacaccaacatggcacacttatacatatgtaacaaacctgcacgttgtgcacatgtaccctaaaatttaaagtataataataataataataaaaa

SEQ ID NO: 1456 - DNA, 784 bp, Homo sapiens
atttgcaaccatatttccaggttttcttggcccggggttatttccatatggcgtagagctagtttaggagtcagatcaacctagatttgaatcctggctttgcaacacttttctccttgcttccatccatcctttcttcattctatcctctgccttccctaacctaaacactgagcattaagagctctgctttttgtcagccctgaagattctcagggaattgtaactcatatcctaacgggaaaggccctcacaatctgatgggaggagcagatgtgtcagctgaaaagaacaatgtagtgtcgggggtgctggcagggagatgttagagacacaggggcaggtgaaacaggcacaaaggaaggaaactcttaagctctaccagaaacgagagaacagggaagaatccactgaagacctttcttttgtcctctcaagggctaagtagatttacactgaactgaacaaagaattaaggtcctaattttcttccgtccatctttcattctttcatccttcaagccttgggtgcctaggcctgtgatcttttctccaatcacctgattctgttgtaggaaaaaaatgagttcttctcacatgaccaggaaagattaggcatgcaggcactttgaagagtgagaggttacaaaatatattgggtgaaaaggaaaaaagaaaaacaacacagcaaagtgagaggggttcccgttaacaggtttccatctctcagttggaatcccaggtcaccacctaggaacaggagaggccaggctcctcctccctg

SEQ ID NO: 1457 - DNA, 783 bp, Homo sapiens
atttgcaaccatatttccaggttttcttggcccggggttatttccatatggcgtagagctagtttaggagtcagatcaacctagatttgaatcctggctttgcaacacttttctccttgcttccatccatcctttcttcattctatcctctgccttccctaacctaaacactgagcattaagagctctgctttttgtcagccctgaagattctcagggaattgtaactcatatcctaacgggaaaggccctcacaatctgatgggaggagcagatgtgtcagctgaaaagacaatgtagtgtcgggggtgctggcagggagatgttagagacacaggggcaggtgaaacaggcacaaaggaaggaaactcttaagctctaccagaaacgagagaacagggaagaatccactgaagacctttcttttgtcctctcaagggctaagtagatttacactgaactgaacaaagaattaaggtcctaattttcttccgtccatctttcattctttcatccttcaagccttgggtgcctaggcctgtgatcttttctccaatcacctgattctgttgtaggaaaaaaatgagttcttctcacatgaccaggaaagattaggcatgcaggcactttgaagagtgagaggttacaaaatatattgggtgaaaaggaaaaaagaaaaacaacacagcaaagtgagaggggttcccgttaacaggtttccatctctcagttggaatcccaggtcaccacctaggaacaggagaggccaggctcctcctccctg

SEQ ID NO: 1458 - DNA, 348 bp, Homo sapiens
atctatcattccctcctctaaagaagtacatctaactgccattagaataaggataaggataaggatgaagacagatcttaactgcttcctgttgacagggggtgctgttttgggaaaacggcagtcaaattgccctcaggggcctatccaagggttcccacgagaaggggccattgcccaaggctccagttgcatgactggagtttcatggcctgaagaagagacaaactgagttattagaaaacacgtataaatatgaaataagagtgtgtggtaaggacagctcaaaaatcccaggggcttttaccagtttgtatggggagaagggggcaaaaagcctgattggct

SEQ ID NO: 1459 - DNA, 348 bp, Homo sapiens; identical to SEQ ID NO: 1458

SEQ ID NO: 1460 - DNA, 344 bp, Homo sapiens
cgctttcctcctttttgtggtcaaaaatatatgttcagctaggttcctcaggggtatttagtatttttttatttttttcttaagaatacatctgaaaatgctgtattaaaccagaagcttatttctataaagaccagactacttcgttttattctgtattatcacttatattatttagaaaattgaagtgatatttgttctgtatattttaaatggaaacataaaatacagataacttggaaattcaagtgcactatcaggattttacagagttataaataactctcattagttactgggcagtcttcatactacatgatatattttcaaatgcaaccatcttt

SEQ ID NO: 1461 - DNA, 344 bp, Homo sapiens; identical to SEQ ID NO: 1460

SEQ ID NO: 1462 - DNA, 333 bp, Homo sapiens
aaaaatataactcttattatttcagcaaaaaaagtaatcaagtgtactgaaaattaagattattgaactggagcagacaaagtaaacaagccaatgaatatagcatattatctgttgctcaaatatatactctgcaacaagaagaaagaggcaaaatgtaaaaatgattttcaggggaagaacaaattataagttgcattgatctggagcaggcatactcacataagaaaattgtggcaagtaaaacctgccatgaaattaaaggaagagaaataaaactagaacaaaagtggcatgaaaaccatccttttcttcttacattagtgagcattg

SEQ ID NO: 1463 - DNA, 333 bp, Homo sapiens; identical to SEQ ID NO: 1462

SEQ ID NO: 1464 - DNA, 384 bp, Homo sapiens
caaagcggcagtcgatccctggtctccacggcggtgcagcctcagcctcctcgcttttcacggtcggcttgggcgtcccttcggaatgccttcctcactgatggtgctttattaggattcctcttgtgcttaattacctcctagcctcctgctggcagcggggtgccgcctcctcaccgtaattaggctccgtcgagagccctttcccttcttgccagccccagcaggctcagagttggccgaagccaggggggaggggacggccatgggaacccagcggtgtgacccctgccctcggcgacggggccaaggtcaaggccagagttgttggccagacccacatagaacctcaagacaccccccttatctctctcgcacccggaa

SEQ ID NO: 1465 - DNA, 383 bp, Homo sapiens
caaagcggcagtcgatccctggtctccacggcggtgcagcctcagcctcctcgcttttcacggtcggcttgggcgtcccttcggaatgccttcctcactgatggtgctttattaggattcctcttgtgcttaattacctcctagcctcctgctggcagcggggtgccgcctcctcaccgtaattaggctccgtcgagagccctttcccttcttgccagccccagcaggctcagagttggctgaagcaggggggaggggacggccatgggaacccagcggtgtgacccctgccctcggcgacggggccaaggtcaaggccagagttgttggccagacccacatagaacctcaagacaccccccttatctctctcgcacccggaa

SEQ ID NO: 1466 - DNA, 290 bp, Homo sapiens
cgggcatggtggttcacgcctgtaatcccagcactttgggaggccgaggcggatggatcacgaagtcaggagaggaccagcctggccaagatggtgaaaccccgtgtctactagaaatacgaaaattagccgggcatggtggcaggcgcctgtaattccagctacttgggaggctgaggcagagaattgcttgaacccaggaggcggaggttgcagtgagccaagattgcgccactgcactccagcctgggtgacagagccagactccgtctcaaaaaaaaaaaaaagaa

SEQ ID NO: 1467 - DNA, 342 bp, Homo sapiens
tacacacaggggatggagcgaaggctgcagtgattcctaggaagcagcagagccagcagacagcctccaaacccaggttccctccaacacatcctcccgcctgtctttgttctagtttccacatgttccgtgttagtaactctctgcatttccaataccaggcacaggtcgtggcaccgtgtgtaggtatcagtgaatatattttggaataatagacgggagaatgggtgaaggaaattagggaatagggaagcatttgaggcagaggggctccacttggcctctggtgcatacacattgcatcctgtcctatctatgggcttcagaggttgctgcttcctg

SEQ ID NO: 1468 - DNA, 342 bp, Homo sapiens; identical to SEQ ID NO: 1467

SEQ ID NO: 1469 - DNA, 106 bp, Homo sapiens
ccaccttggacctctctctctctctctctctctctctctctgtctctctctctctctctctcgctctcgctctctctcgctctctctcgctctctctctctttcct

SEQ ID NO: 1470 - DNA, 175 bp, Homo sapiens
ggaaaccgggagaaagaggaaactgcatgacgcctggaagggactgatgtgtgtgtgcagctgtgtgtctgtgtgaggctctgtgaccctccacacaggttgggagtggtggagctgggactcaccccatcacacccaggtctgtctaaagagcccatgctttaaggaaaaaaaa

SEQ ID NO: 1471 - DNA, 101 bp, Homo sapiens
ccttggcctctctctctctctctctctctctctctctgtctctctctctctctctcgcgctctcgctctctctcgctctctctcgctctctctctctttcc

SEQ ID NO: 1472 - DNA, 406 bp, Homo sapiens
attaagggtcagaaggttatgatacaccattattcatttttgtattttatccgcaacaaatagctagaaaatcaattcattattaaataccagagacataagagtagagtagtataaaatacaaaactgttttctactaaaaagcgttaagctgaaatatgattagatctctgttaaaacattgggaagtacagttctatttagtacatttttcagctacagttgatgtttatcactaggaaaaaagctttgttgaacctgcttttctacatgggtgaacctttactcagtgggatatttggaagaggtattaaagcgtaaacaatggttttggtagggtcaaacctgggtgcaagagaaggttcgggctccctctggtggtgataatatcttactatttttattg

SEQ ID NO: 1473 - DNA, 5557 bp, Homo sapiens
cccgctgcagccctgcgacacggagtaccccgtgttcgtgtaccagccggccatccgggaggccaacgggatcgtggagtgcgggccctgccagaagtaagaccgcagggcggcgccgcccgtcccgccacactcctcccgccctcggcaaggcggaagtgcgggcagggccccggaacccccgggaaacggctccacagccgggaggaggggatgcgtctaagtgcagagcccacgctcccggggtcttcccccgccgtcctcagtggaggagacacgcaggaggcggacggtctgaggcgggcaggacggctggggaccgggacagccgggatggggagaggtggtcccgaggcctgaccctgtgtgtcgagcccaccccgccgaggccgcagccgtgaccccacggcgtctctgggcgagtgggcccttcggcgggtctcccccagccctgctcaggcggtgcccagggcggtgccagtgcccgcgcctgagctgcgtggggagaacttggaaggcagagggagtgtgagaagagaaggccggaagtgtgcgatgtcctcgggtcgctgggagccccgcgggcagcctctgtcaggcttcctgctgtgtggaagccgctagttataacccgccctggccccggggaggcagggaggccgcgcggaagggtctctcctgctgaccccccgcacccaagcccgggaggacccccacgctgggaatgcggcggcctcctcgagggtcgcctcagccagacgtgccgctcgccaggcggtccctagacccccgggcccgtggcacaccatttaacagtgcggcacctgcggcgctggcatcggggctcccttctcccccactccctgcgcgtcgtgctgcgcgggtttcaccccgggttctgtgcagcgttgagggctggggttagcgttccctgtgcacttgtcgcaaaggctcggtgcgaggatagagccagcgggctccggagtgaagcgagggcttcagagtagacactcctgaattgaaaactggctctgcgctcccccgcttatgaccgtgggcaagtgacttcgcctcctctagtctccattctctcatctgcaaaatgggcacaacaccagcctcatacagagccgtgaaggctgagagtatacacggctgtggtgtgcacgttgggtgtgtgagaccgcccatcccaggggaggcgctcggtaggcggccgctgggactgctgggaaggccgtgggcctggcgggcgggctccgccccactccgcgccactcctcgcagggcggcctcgccgagcgcggggccactgcgccacctggtggccaagctccagcgctgccgcttcgcccgggcctgcccccgccaccctcacccagagcaagtgttgcctcgcccgcccatttgctccggacggtcttgatttacgcctgtcgtccctgcatatattaatagcaactctgcactctccaaagcggcccagtttggacttcctcactgtctccagtctgctaggaaaggaaatgcagcagcaaaggcttgtgagcaaagccagtaggactgagccatctgccaggcccgttcccttagctgccccgacccgccctgcctcatggttccgggcttccctgccaccctaactccacactaaagtctccagaagttccttccctagaagcccttctcgtggtcgccacggagccatcctcgactccctttctttgctgcagggtatttgtggtgcagcagattcccaacagtaacctcctcctcctggtgacagaccccacctgtgactgcagcatcttcccaccagtgctgcaggaggcgacagaagtcaaatatatcctgcaatgctcggggatgtgtgcggtgggggcgggggctgtaggaggtgtctgtagggctcagattttgagcagcggggccagcctccttcaccgcccgtgtcctccacagggctccgttatttgttctctaacccttccctgggccccggtgctgcctcctgaccctaaagctgcttgcagggcaactggtggcaccagagcaggttcttccagacctttttccagtctgcagaatgggctccggtcctgagatattgaccttaacagtggcttctgcacataatgcctctgtcaaatgtgaccggatgcgctcccagaagctccgccggcgaccagactcctgccacgccttccatccagaggtgcgggttgaggcggatcgagggtgggctggattttcatccccaaaccctctgtgcctgggtctgtgcccctgcagacaggagcatatagggatgccaatgaacacacctgtgcctgtgcttctcgggggaaacattcgcgtttatgccctgtgacactgtgatataataagaaacagatctttatttagtctttgtcctgattcctggcaagctcctaaaacgcttgttatttcctgattagggtgataggtgcatcttttgttatagtgtttggtcttagtccctggttccttcacaggtgcctctaagacccttggaatgatagaggtatctttgtatgctaattagatgactggtggctgggggccctagacaggatgagagctggccacaggaaacaccaagttaggattagagggttgggacttttggctccaagcccctggcttctgggaaaggaagggggctggagactgagttgatcaccagtggccaaagatttaatcaatgatcataatgaggcctccataaaatccccgagccactgtgtttggagagtgtccgaattggtgaaagggtgtgggagctctgcgtaccccgtgccttggcctacgtgtctcttccactcagccgcctgacctgcgtcctttataataaacgggtcatggtgagggaagcaccttcctgagttgagtgagccacgctaacaactcacggagcctgagacaggctcatgggaaccctagatttacagccagtctgtcagaaggacaggagacctggggcttgcgattggcatctgaagtgacggccaccttgtgggaccgagccctgtaacttgcgagctctaatgctaactctcaatagtgtcagacttgaattgagtttcaggacagacacccagttggtgtccagagagtggggtgggaaaaacccttcacatttgttgaagtgctggtgtgaaagcacagcagagcccctgtgtcattaaaatacgaagtcaaccaggatcccaaggtgctttaacgaagagccacgcttcctagggcttgggccctaggtgaattagaatgcagttttcccatcttgtcctcattcccgctacacttagttccgaatgatcgagcaatgtgagggggccgtcacgtggataatagtcatagtggctggtacggatccagaacccagacccaggtgtcaggccctgagccgggtgcttcatacagtctggtctgctgggaccagaaacccccatcagagatgctcccagagttgaggacattctgagaggatgacctcgcagccactccaagcctgagggcaagcagagaaggccggtgcccccctcccaggctgaggggccagcctttgcttttcccccaaaaggtaggggcctaagagaggtagcagtgcttccccggctttccaaaactcccctttccccaggattttggcccaaattagtggtggaagcccctccctttttgagggtcctcctctgagcgccgcgctgtcacctctgctctgcgttcgcaggagaatgcccaggactgcggcggcgcctcggacacctcagcctcgccgcccctactcctgctgcctgtgtgtgcctgggggctactgccccaactcctgcggtgacaccacccagcctgacctgtgttttggcaaggtgatccttccagagccatcccaaaaagtcagcactgacatgggatgcagctaactgcagttgggtcgcccccaggccaacgctcctctcaatcctgggctggtggcccctggctccggagaatgctggatggaacaggaaaccaatcacctggcaccactttcaagatgcttcatggtgcccggtaccatctgccctaggtctcaacatgagcatacttctgacctaaccttcctgtctcctcttcgggaagccagcgtgagctcagcttggaccaagacaaaataatttagttcttcctgtactccagagtccagacccagccaagaaagggtcagttgtttctgaccctttctgtcggagtggtctctggtagaacccaaggacttctgggtactgagaagcagcagcagaatgaggccaaatgcagagatgaggctaaggcaagaatatgccccaactaaagcatagattccccaaagtgaggctcatggtgggaggccactcaccttcctagctgctgctcgaaaaggttttgactgtgttggggtgggggttgggtaagggaatggtcaagactgagaaaggaatgaaatccattcaggaaatatcgacagggctacacgtgatgtccccaaactgctgctattgaagaacttcccaaaacttctttacaaagccctaaaggaaagtttgcatctatgaaaagccaataggctgagacatccaattgctgcatggaaattgatgtacattcaggggacggcaaaaatagctgtaaaatagtgaaaaagagcagtggttgtgctcttttctggccaatgatttacaaaagaatctacttgactctgtccctggagtgaaatccttagggttggaacttgtgggaacattccaacttgctaagcagggtccactgggagggaagctctatctgggaactcacccccagcgcacacacatctcccccagggtcccaaggccccgcagcttcctcccccgaccaaaccccaagacctggatcccaggagacaacagtctccacagtgagagcaacattaagggcaaagccatggagaaatgtgggagaggccggcctcaaatctttccatttaacaaaccccagtgatgggtatggacagcatgcagggcttttggggcgcttccccccgctcctccatcaccctcagcctccacacttcaaagttcaagttcaaagctgttcaagtttcctaccagcaaatagccctaacttgcctctagagtaggccaaatgccaactctgtaaaacacacttacattatcggttacagaatgtcactcttaccgtcatgtcttgcaacaaccctgtgagggcagtattaatgcccccttacagcagaagacactgcagctcgaagacagcttaagtggcagaataatgctagaacagctaaggtttacatgtaccaaataacatgtttcagctcattccatcctcacaacagccccctgaaagtgggtactatcattagtcccatgttatagaaactgcagcagagttgaaaattgcctccaaattaccggaagagtgtatgaagattgaatgtgatgtattcacgtaacatgcttgaaactgcctggcatatactaaacgctaaataaatacatgctaactgcgatcatta

SEQ ID NO: 1474 - DNA, 277 bp, Homo sapiens
gataattccagaacactagtagacagctctcctgagcacataattttacataattatgtaattactggcagcaaatgggtatttactgcattcaagcaggaaaacccagcttcaccacagactgattcttctaaaacgtttaaaaataagtatatgaaaatgtgttctgaattaagaactgggtgagaaaattcctaattaaaaaaaaaaaaagccttagctgggtgtgttggcacatgactgtagtcctaactactcggtaggttgaggtgggagg

SEQ ID NO: 1475 - DNA, 15275 bp, Homo sapiens
ggcggtcctcggagtacagctggtggtgaccctgctcactgccaccctcatgcacaggctggcgccacactgctccttcgcgcgctggctgctctgtaacggcaggtgagccccgccccggcggtgggaggggcccgcggagtcacgcccccttctggctccccacgccccgcctcacaaattgcaaagccttgattttggttggtgggtggtggggggaaaaacgttgttgaggtgtaattgaagtacaacaaactgcatatatttgttttttctttttctttttagagacagggtctcactctgttacccagtctggagtgcagtgacctgatcatagctcactgcaacctcaacctcctgggctcaagtgaccctcctgcctcaatctcctgagtagctgggactacaggtgtgcgccaccatgcccagacaatttttaaatttttaatagagatggggtcttgctaagttgcccaggctggtctcaaactcctaggctcaagcgatcctaccactttggcctcccaaagtgctgggattacaggcgtgagttcccatgcctgacacaaactgtatatatttgaagtacacagttggactagttttgacaggtgtacacatgtgtggaaccatcaccacactccccacgtccctcactcttcctgcctccctgtaacccagccttccttccacccctgcatctgctagagctcgcctgctctggtttttgtccttgcgtgggtctgtgatgctttctgagaatctggtggcaactgaattctctcctgagaaaaatgtatgtgacaaaaacaaaggcaaaaaaaaaaaacacgtcagagatgatagctcaggcccataatcccaacactgggggaagccaaggtgggaggatcacttgaccagcctgggcaacatggcaagaccctgtctctacaaaatattttaaaaattagccaggtatggtggctcacgcctgtgatcccagctaatcaggagtctgaggcaggaggatcgtttgagcccagaaagtcaaatctgcagtgagctgagatggtgccactgtactccagcctgggcgacagaccaaggccttctctcaaaaacaaaaaacaaaggccgggcgaggtggctcacacctgtaatcccagccctttgggaggccggggcgggtggatcacttgaggtcaggagtttgagaccagcctggccaacatagtgaaaccctgtctctggtaaaaatacaaaaattagctgggcatggtggcgcatgcctgtagtcccagctcctcgggaggctgaggcaggagaatcacttgaaccggggaagtggaggttgcagtgagccaagatcatgccactgcactccagtctgggtgacagagggagactctgtctcaaaaagaaaatgaaaaagaaaagaaaagttgcacacactggcttccccaggagagttagccagcagattcaggggtatccaagcccccggagcccactcagcctagatctgttggtctcacgatttccccagaatttccccatgctgtaccctcacctacctcccagtgttcccctggcctaggctaccctctaactagaatccctggatttggggttcactgcctcaacctcccaaccccacgcctgagcttccctgactgcccgtccttgctctcagtttgttccgatacaagcacccgtctgaggaggagcttcgggccctggcggggaagccgaggcccagaggcaggaaagagcggtgagtgacctgggccccagccccagccttgggagggtggctcctccccaggaacggcctcacccctgctcagggggctctgggctcagggacacaggaccggcccacccatacttccaggcgctgatctgggcacaggtgaaccgggagaccctagtccaaggagatggtcactgtcaagttagcatctgtttcctggcagtttgctctagccagtcctgtgggtgggtggggggatccccatatcccagtgtgcagaggagccaaggttgtggaaagagatggtctccaggccagctgctctgagctctgagggtggctggcctcagtggaatgcgtgctcaccgtccctcttgcttgtcaccatcctcccaggtgggccaatggccttagtgaggagaagccactgtctgtgccccgagatgccccgttccagctggagacctgccccctcacgaccgtggatgccctgggtaatagcccagtcccatccctaaactctactccctcagccctgaaggtctccacaccctcatgggggtggggaggatttgaaggaagaatgttctattaggaggggagcgagctgggccccagggctgagcagagtgccccccacagtcctgcgcttcttcctggagtaccagtggtttgtggactttgctgtgtactcgggcggcgtgtacctcttcacagaggcctactactacatgctgggaccagccaaggagactaacattgctgtgttctggtgcctgctcacggtgaccttctccatgtatccttcctctctgctccctgccagtggggcgggtgggagcaggacctgagcttccctggctcccctaaactggtgtggcagttttcacctgctgtgccacaaacttccccaagcttagtgacatgaagcagacattttatgtgctccagctctgtgggtggacagactgggctgggctcagcaggtcggttcatctccactccacatggtcatgccctttggtggcagtagaaatgccaggaggcaggagggaatgccttgcccaaagtcacccaccccatccctattctttctaccacattctccttgtttaaggaaatcaccaggccagtccacaatcagggccaagaaagatatggtcccttggcaaaattttaaaaaatatatactccaggcatggtggctcatgcttgtaatcccagcactttgggaagctgaggcaggcggatcacctgaggtctggagttcaagaccagcctggccaacatggtgaaaccccgtctctactaaaaatacaaaaattagccaggcgcggtggctcatgcctgtaatcccagcactttgggaggccgaggcaggtggatcatctgaggtcaggagttcaagaccagcctgaccaacattgagaaaccccttctctactaaaagtacaaaaattagccgggggtggtggtgcatacctgtaatcccagctactcaggagcctgaggcaggagaattgcttgaacccgggaggtggaggttgcagtgagccaagatcatgctattgcactccagcctgggtgacaagagcgaaactacatccccccaaaaaattgtgtgtgtgtgtgtgtgtgtgtgtatatatatatatatgtgtgtgtgtgtatgtatgtacatgtatatatatttgttgttgttgttgagacaggatcttgctttgttgcctaggctggtcctgattggcttcaagtgattctcctgccttggcctcccaaagagagcaaatacatgactttggggacccaagtctgaggaagcacagaaagaatgctactcctgtgacttttggagtgggaaacctgtcttaaaatccactggttccccagattcccatgcttttttgttttttgttttgttttgttttttgagatggagttttactcttgttgcccaggctggagtgcagtggcatgatttaggctcactacaacctctgtctcccgggttcaagtgattctcctgcctcagcctcccaagtagctgggattacaggcatgcgccaccatgcctgactaatttttgtatttttagtagagactgggtttcaccatgttggtcagggctggtctcaaactcctgacctcaggtgatctacctgtctcagcctcccaaagtgctgggattacaggcatgagccactgcgcctggcctgttgttgttgtttgagacaagatatccctctgtcgtgcaggctggagtgcagtggtgcaatcagggctcactgcagcttcaaactcctgggctcaagcgatcctcccacctcaggctccccagtagctgggaccacaggggctaccacaaaattattttttgtagagatgggggtctcactatgttacccaggctgctcttgaactcctgggctcaagtgatcctcctgccttggcctcccaaagtgctgggattacaggcatgagccactgtgtctggcccccatgctgcattttgacagcagattggagatgaagcccttctatatctgattgcttttccaagggatgtgaagtaggtgaggtgggtgaaagaggcagggtcacccagggcgggaggctgtacagacacggtggcctgatgaggccatctcccactcaacgggaacccccagcccacatcctgatctgagatccagcaccccaaaaccgaactcctctaggtcatccccaaggcctatttgtgcagcagtgcttgttccctggagttctggggtcccagacggagtgtggtgaaatgggcagagtggggcagtggcacctgaggcctccttagctccagcctccagcaagatgttcctgacagtgacacggctgtacttcagcgccgaggaggggggtgagcgctctgtctgcctcacctttgccttcctcttcctgctgctggccatgctggtgcaagtggtgcgggaggagaccctcgagctgggcctggagcctggtaagtgcagcccccaacgtggggccaccgcagctgtcactccctcatgtaatctgaccaagatggtttaactggctccgtgtccagcacgagtaggcaaaggagtgggctcctggggtgaaggcagtccccattagtgaccatctcagctcctgaaccttgttgggctttggggaagacaggacattgcctctctcactgtctctgatggacactcatggctatagctctttttttttcttttttttttgagatggagtttcacttttgtcacccaggcaggagttcagtggcatgatcttggctcactgcaacctctgcctcctgcattcaagtgattctcctgcctcagcctcccaagctgggattatgggtgtgcaccaccacgcctggctaatttttgtatttttagtaaagatggggtttcaccatgttggccaggctggtctcaaactcctgacctcaggtgatccacccacctcagcctccccaagtgctgggattacaggtatgagccactgtgtgtggcctcttttttcatttttttaaaaaattatttatttatttatttttattgaaacagggtctcactatgttgcccaggctggtctcacactcctgagctcaagcagtctgcccgcctcagcctcccaaattgttgttattacaggtgtgagccaccgtgcctggcctcttaaatgatccttttaacatataatttggacctcatcacttctctgcccggcaccacactcccccggtcttaggagaaagaccatagccctcaccatggcccacatgaccctgctgactgcttgagttttaccttctccaattctccctgcctttcagtttttaaaattatatatgtttgatatatacaaagaagatgtgtatgtcaattataaagcaaaataatcatatgagtacctgcaaacctacccctcaaataataagtaggtggggtagtgactgcaccaatctcccaagggggcggcagtaaggtttaaatgaatcaagatccatggatagggcttgatttttgccaacctagccctcgtcacatggaatgatgccctctgtggccttaacatgcatgtctctgattaccagggaagttgagcaccttttcctgtttattcatgattcatgtctcttctgtgaaatttttgtgaaatacctgttcacattgttgcccatctttgaatcttttttctctttgaattttttttcattgtggtaaaatagacaaaacataaaattcaccatcttaaccatttttaaatgtgcagctcagtggcattaagtatatttagatggccgagcatggtggctcatgcctgtaatcccagcactttgggaggctcaggcaagcagatcacctgaggtcgggagttcaagaccagcctgatcaacatggagaaaccctgtctctactaaaaatacaaaattagtcgggcgtggtgacacatgcctgtaatcccagctacttggatggctgaggcaggagaattgcttgaacccaggaagcggaggttgtggtgagccaagatcgagccattgtgctccagcctgagcaacaagagtgaaactccgtctcaaaaaaaaaaaaaaaaaaaaaatgtaggccaggtgtggtggctcacatgtgtaatcccagcactttgggaggccaaggcaggcggatcacaaggtcaggagatcaagaccatcctggctaacatggtgaaaccctgtctctactaaaaatacaaaaaattagctaggctaatggcacacgcctatagtcccagctacttgggaggctgaggcaggagaatggcgtgaacctggtaggcggagcttgcagtgagctgagatcgcgccactgcactccagcctgggcgacagagcaagagtccatctcaaaaaaaaaaaaaaaaaaaaagtctatttagatgtcgtgcaaccatcaccaccgtccatctccacaactctttgctcttgcaaaactgaaactccagcccatcaaacactaactccctgttcctccttcttgcagcccctgacacccaccattttacgtcctgtctctgtgaatgtgaccactctgggttcctcatataagtggcatcatacagtatttgtccttttgtgacgtgctcatttcagttagcacaatgtcctcaaggcatatccatgttgtagcaggtgttagaatttttttttctttttttgagacaggatctcactctgtcaccgaggctggagtgcagtggtgcaatcacaactcactgcagccttgatctccagggctcaagtgatcctcccacctcagccttccaagtagctgggaccacaggcacatgccaccacacctggctaatttttaatttttttttttttttctgtagagatggggtcttgctatgcttctcaggctggtctcaaactcctggcctcgagcagtcctctcacctccgcctcccaacgtgctgggatgacaggcgtgagccactgggcccagccagaattccatttttaagactgaacactgccaggcacggtggctcacgcctgtaatcccagcattttgggaggccaaggcgggcggatcacgaggtcaggagatcgagaccatcctggctaacatggtgaaactccgtctctactaaaaaaaatacaaaaaattagccgggtgtggtggcgggtacctgtagtcccagctactcgggaggctgagggaggagaatggtgtgaacccaggaggcggcgcttgcagtgagcttagatagtgccactgcactccggcctgggtgaaagagcaagactccatctcaaaaaaaaaaaaaaaaaaaaagactgaacactatttcattgtctgggtggaacacattttgtttattcatccacagatgaatgcttgggttgttcccaacttttggctttttgactaataccgctgtgaacctgagtgtacaggtatctctttgagaccccattttcagttttggagagtatatatccagaagtggaactgctggattatatgataattctacttttaattttttgagggactgccatactgttttatacagcagctgaaccattttattttatttttgagacagagtctcattctgttgccctggctggagtgcagtggtggcgtgatctccactcactgcaacctttgcctcccggattcaagtgattctcatgcctcaggctcccaagtagctgggactacaggctcccaccaccacacccagctaatttatttttttatttttatttttattttttgagacagtctccctctgtcacccaggctagagtacagtggcatgatcttggctcactgcaacctccaccttccaggctcaagtgattctcttgcctcagcctcccaagtagctgggattacaggtgtgcgccaccacacctggctaatttttgcatttttagtagagatggggttttgccatgttggccaggctggtctttaactcctgacctcaggtgatcctgcccatcttggcctcccaaagtgctgagattacaggtgtgagccaccacatctggctacacccagataatttttgtgtttttaatagagacagattttgccatgttgcccaggctagtcttgaactcttgaactcaagcaatcgccagcctcggccttccaaagtgctgggattacaggtgtgcaccactgtgctcagcccattttatattttatattcccagcagcagtgcacaagtgttccaaatttatccacttcattgccaatacttcttttgttttcatttgaccactatttgcattattttccgtctgcatacatgcatcacactttctttgctgagtcgtcaaatgtagttgtaagtgtcacctctagtgtcttgatgaatggaagttgattattttagttgatatttgtcttgaaaaatatccttccctaaaatcagaaagtcattctacattgtctttttttttttttttgagacagagtctcgctctttcccccaggctggagtgcagtgggcgatctctagtattttttactagagatggggtttcactatgctgaccaggctggtcttgaactccagacctcaggcaatccacccgcctcagcctcccaaagtgctgggattacaggcgcgagccaccgtgcccggcctactttttgtattttttactagagatggggtttcaccacgttgaccaggctggtcttgaactccagacctcaggcaatccacctgcctcagcctcccaaagtgctgggattacaggcgcttgccaccacgcctggctgaaatattttagaagaaaatatagaatgactggccaggggtggtggctcatgcctgtaatcccagcactttgggaggccgagatgggcacatcacgaggtcggcagatcgagaccatcctggctaacaccgtgaaaccccgtctctactaaaaatacaaaaaattagccaggcgtggtggcaggcgcctgtagtcccagctactggggaggctgaggcaggagaatggcgtgaacccgggaggtggagcttgcagtgagccaagatcgcgccactgcactccagcctgggcaacagagcgagactccgtctaaaaaaaaaaaaaaaaaaaaagctgggcaaggtggcatgcacctgtaatcccagctactcgggaggctgaggcaggagaatcacttgaaccccggaggcagaggttgcagtgagccgaaatcacgccattgcactctagcctgggcgacaagagcaagactccatcttaaaaatcaataaataaaatatttcaacttttacatttcatataagctcctaaactactcactgttgctgatggacagtgacattaatttttgtgttatcatataggggtcaaatttgagtgtctccacggactaaccttgctaaacaattatatttttattgaattgcagattctttttggttttcttttgttctgtctgatccttcccctttggtgtggctaggacctctggatttgagaacagtactggcgtacctccttttcttgtttccaatttctcagttagctacttggctcataaattttcaatcttttctaattttatagcatatatagcatttaatgctatatatattttaccaggtctcacttttgttcacctaagtttttttttgtttttgtttttgttttgagatggagttttgctcttgtcacccaggctggagtgcaactgtgcaatctcagctcactacaacctctgcctcctgggttcaagcaattcttctgcctcagcctcctgagtagctgggattacaggtgcacgccaccacgcctggctaatttttgtatttttagtagagacggggttttaccatgttggccaggctggtctcaaactcctaacctcaggtgatccacccacctcggcctctcaaagtgctgggattacaggtgtgagccatcacacctggcagtttacccaagttttgactgatattttttattattctgtttggggtgttttaacatttcccttctgatttctgtagagatggggtcttgctatgctttgacctatggattattaaatatttttaaatttttcaaacatagatctttaaaaaatacatatttatttctagctcaattgcacagatggtctatttgaaataatttctttaaaatttggtaagatttgccctatggcctggaatgtgatcacattttgtgactattccttgttttcttgaaggacatattctgtttttgttgttttgccttttttcacatgttctaattgaaggacatattccctggctctatgagtttaataaattcaaatctccatcttgcctaaccttttgtctgtgacttatcagtcagcagaagttaatctccctctgggacaagagagctctcaatttccctatcaattctgtcagtgttttctttatatattttgcagcctattcacaattcacagattagttctattcacagatttagaactgttacattttcctggtgaatcagccattttatcatgatgtatggaacccttctgtcttctaatactactttttttttttttgagacagagttttgctctcgttggccaggctggagtgcagtggcgcaatctcggctcactgcaacctccacctcctgggttcaagcgattctcctgcctcagcctcccaagtagctggtattacccgccaccatgcccagctattttttggatttttagtagagccagggtttcaccatgttggccaggctcgtctcgaactcctgactttgtgatctgcccgtcttggcctcccaaagtgctgagattacaggtgtgagccaccgcgcctggcctattctaatactacttcttagtctagtttggctggtagtagtatagcctttctagcttgctttcttttgattagtatttgctgtatctttttaacatccctttactttcagtcttccagtgactttatgtcaaggtatgtcatcctttaaaaaacatgtagctggatattttcaatgtagtctgacagtctttgtcatttaactttaaagtttagtctacttacatttattgtgattactgacatatttgactttgtttctaccatcttacttttttgctttctatttgttccttttctgttgttgcagttgacattggctgtcagcctaattgttgttcctttgtaggtgatctgtcttaactccctggctgctttgtaatttttttgtttttggtgttctgcagtttcactccattatgtctaggtatggatttctttttatttacatggtttgatatactttgtgtctgtctttcattctgcaaacttctcaaccattctcttccagtaattccttttattcttcattccttctcttccctccctctggggctctgatttgatttgcgttgggctctctgttctgtcttccttatctcttagcctctcttcatatttctcacctacttgtttttctgagttggaatctgagtgatttcttcagatctgtcttccagttcatcacttcctcctttggctgttcctaatgtgctgtttaacaacctattatttcaatacttacagttttcctttggaagagtttaatttggttcctttgcaactctacccagtcatctgaaggaattctcatgtcacttgttctgtgattacagctttcatttccttagtcatttgacacataattgacagcaccaatttctgaagtctttgaggcctaaacttgactgttgtttttctgttaactctcctttatggtgatttgtttccttatgcatttggtgattttgcctgtgagctcatatgaatttgctcctttttttttttttttttgacaaggtcttgctctgtgctggagtgcagtggcatgatctcagctcactgcaacttccacatcctgggctcaacccatccttcccacctcagccttcacagtagctgggactataggcgtgcaccaccacccctggttttgtattttttgtagagatgggggttttgccatgttgcccaggctggtctcaaacttgtgagctcaaacgatccacccgccttggcctcccaaagtgctgagacttacaggtgcaagccactgcacccagccctgctcttaatttttgaaaaatcttgggtcctgaattgaggattccttcctccaggaggactttggttttctcctgcaggagtccttcatccccctctagattccttctataacctagggagctcaggctcaacagatacccctgaatgttcccagcccaatcaggagtgtctgcctggtgcattctgtttcgttttctttgagactgagtttcactcttgtccccaaggctggagtgcaatggtgcggtctcagctcactgcaacctccgctccccatgttcaagcgattctcctgcctcagcctctcaagtagctgggattacaggcacctgccaccacacctggctaatttttgtatttttagtagagacgggggtttcactgcattggccaggctggtctgaaactcctgatctcagatgatccgcctgcctcagcctcccaaagtgctgggattacaggcgtgaaccaccactccaatcttgtttcttgtaaaaagtactgtgtaactagagcacaaaattgtccttgtgcctggctcagggcctggcagacccttgttcattcctacttgggaagcaaacggatgcctgagggatggggggttagggaacagagtggccttagagaccctaggaattcactctactcggtcctcttcttatcgtccccaggtctggccagcatgacccagaacttagagccacttctgaagaagcagggctgggactgggcgtgagtcctgggaatgggggagggaggcaagggcaggctgggaccctcccagggtcccccaggcaggctcgtgacctggtgttctcctaggcttcctgtggccaagctggctatccgcgtgggactggcagtggtgggctctgtgctgggtgccttcctcaccttcccaggcctgcggctggcccagacccaccgggacgcactgaccatgtcggaggacagacccatgctgcagttaagtgggtcgcttggtgggtggggggactagggagcttaagggagagactcgaggagagggggtacccaggcctcactccctcctgccctcaccccccaggttcctcctgcacaccagcttcctgtctcccctgttcatcctgtggctctggacaaagcccattgcacgggacttcctgcaccagccgccgtttggggagacgcgtttctccctgtgcgtattgggtggggctaggaggtagctggggctcccctgggtgccctagcctctgagattcagggaggagcctggggaagatcctggggggtcgggggcgaccttcttagtcccttgcccccggccctctccgcacaggctgtccgattctgccttcgactctgggcgcctctggttgctggtggtgctgtgcctgctgcggctggcggtgacccggccccacctgcaggcctacctgtgcctggccaaggcccgggtggagcagctgcgaagggaggctggccgcatcgaagcccgtgaaatccagcagagggtatggacgccccgatgacctaggccagagggaacctggggctcagggtggggttcctggtcctttgggcgtggagtcgtcccaaaccagaaggcctcctgctgcagccacccctgctacctgcccacaggtggtccgagtctactgctatgtgaccgtggtgagcttgcagtacctgacgccgctcatcctcaccctcaactgcacacttctgctcaagacgctgggtgagatgccgcggtgtgggggtggaggaggggcggagttggaagataaaacagagtggaggtggactctggcggggaccgcggtggggggggagaggcggggcctaggcagggggcggagactgtggtaaggcagggtctgagcaggaagcggagcctggagtggggcttgccttggacaggaagtggagcctggggatgggtgcaatctgagcaggaggcggggcctgggtagggggcggggactgtggtgaggcagggtctgagcaggaggtggagtttgggatggcgtttgccttaggaggtggagcctggggaggggttgcgtcttggcaggaggcggggcctggggagggggcagggcatgtattgaggcaggatctgagcaggaggtggggcctggggtagggtttgccttggacagggggcagcgcctgagggggtggagactgggctggagatggagtctgagacaggggtgggagtgtctggaggaatgggcctggccccccgtgccagccctgtccctcgccccctcccccatttttccactcatacctcgcttcatcctcttctcctaggaggctattcctggggcctgggcccagctcctctactatcccccgacccatcctcagccagcgctgcccccatcggctctggggaggacgaagtccagcagactgcagcgcggattgccggggctctgggtggcctgcttactcccctcttcctccgtggcgtcctggcctacctcatctggtggacggctgcctgccagctgctcgccagccttttcggcctctacttccaccagcacttggcaggctcctagctgcctgcagaccctcctggggccctgaggtctgttcctggggcagcgggacactagcctgccccctctgtttgcgcccccgtgtccccagctgcaaggtggggccggactccccggcgttcccttcaccacagtgcctgacccgcggccccccttggacgccgagtttctgcctcagaactgtctctcctgggcccagcagcatgagggtcccgaggccattgtctccgaagcgtatgtgccaggtttgagtggcaagggtgatgctggctgctcttctgaacaaataaaggagcatgccgatttttacaaacag

SEQ ID NO: 1476 - DNA, 529 bp, Homo sapiens
aggacgccgtaggagatgaaggcacaggctcccgggaatgaggagggaggctgcattgattttatcagggttcttgagttcgagaatcgtaaatccagtgaagggaaaagaaggagctgatggaagactccagaaaattcttgcagatgtctgcagagccctgaccctgagacaggaggctgggtggagggcagggccatcagaacatccctggacagacctctgggagccttaggtggagagatgcacccctccaccaccttttcccttggggggttttggggggtggtggggtcattgatgaagagcccaaaggtccaggaagacctctgagactccagtggttgggtgcagggagggctgaggagagagctgagctgtggggaggtggagggatggtctctagctatgcctgcagggtgcagaaccaagttgggggctgactgtgagactgggaagggcctgaaccacctggaagggtatgggatgatgggtgagtgctagggtctcccaggagagcctggaggag

SEQ ID NO: 1477 - DNA, 427 bp, Homo sapiens
gtaaggcattctgaagactctatctgcaagaggaatttttctgttgtttatagctatcctctgtagacctgatcctgaaacctatttcccaagtagtaacctttatttttacattattgagcctgaatgctgatcatagactttccttgcaggtggtgctaaatgagaatgttgacacatttattttggaagccactggggaatgccgtccagaattttagctgatcttactttcactgcactctttttattgaaaatatatttttggttgacattcaaaaaggagacaagaacaggcagatgtctggaataagactgccacatcaagtcttccttttcatttgcctatccatgacaagcaaagtagtgtttggagatgtgggaaaactttccaaattcatttgaattgtgaagacacaaaccccaa

SEQ ID NO: 1478 - DNA, 153 bp, Homo sapiens
ggggcattaatgtttaagctatttagctaaatgaaaattatttttatgaaaaggttaagcgatctatacacttgtatttaaggggatattttgcttttcctgtacagatttatcttcactttaaagttgaaacatgaaataagccatggaaat

SEQ ID NO: 1479 - DNA, 372 bp, Homo sapiens
gctcacggcaacgtctgtctcccgggttcaagcaattcttgtgcttcagcctcccgagtagctggattacaggcgtgtgccaccatgcccagctaatttgtatatcttttagtagagatggggttttgccatgttggccaggttggtctcaaactcctgacctcagattttatccttttcaaaaacctgagcttgttaattgtctcactaaatgagacttaagtttttatctttgtaaaacaaaacaaaaaacccttgctcaactcaactgggaatccacttgacttctggaggtctggaaacaaagggattgtgcccaagggccactctgggtgttcatgggccacaaaaaaacaaaaacaaaaacaaaac

SEQ ID NO: 1480 - DNA, 491 bp, Homo sapiens
gcatcctcccagagccggaacacaggagcctgccccgctccacctcttccaagctgcatggacttgaccaagcacctttacttccccatttcctcctatctaggatggagataataaaacctcctccctgcaaaccaccatctcagaaggctgtagtgagaatcaagcaagacaataatggagaaacttctttgaaaacagtgaggtgccagtcaaatctaagggcttctgagagggcagcagtaaataggtattgcacacggcagctcctggggcccactgggagccactcaccacgagcatggtgcacgtgcctgtgagcagggcagacagagtggctgcaacacaggcttcttccttcggtatttttataaagggaatcgggtgaaggaaatgtcttggaatagacaatcttcctaaactcccccaaaataacttcagtggaaacaattgtaacgtccactctgccggcattgtttcagtccactgta

SEQ ID NO: 1481 - DNA, 4646 bp, Homo sapiens
ccgccctcggcctcccaaactgctgggattacaggtgtgagccagtgtgctggatgaattttttcaaagaaggaaaaataaaattaatttggcccttcattaaaaaaattaaaaactctttaaaggaaacgtgggctaagttatttttctgagagactataagatttaggaagaaaaataatcatgatgaaacgttttgggaatatttttggtatttaaaattattgtagaaatttataaatgtgtcagattttggctgggcacagtggctcacacttgtaatccaagcactttgggaggccaaggtgggcagaccacctgaggtcaggagttcgagaccagcctagccaacatggtgaaaccctatctctaaaagaattttttaaaaaaattttaagtcagattttaagaaatattcttatggctgggtacaagtggctcataactgtcatcccagcactttgggaggcaaaggcaggcagatctcttgagctcaggaggtaagttacctgggcaacacagcaagactccatctctacaaaaaaaaaaagtagctgggcatggtggtgagcacctgtagctatttgaaggggttaaggcaggaggatcacttgagcctggcaggtcaaggctatagcaagccgtgtttatgtcactgcagtccaggcagggtgacaaagtgagactcttatctccaaataagaaagaaatcctcttggtcatagatatgatttctttacaccaaattttttcgtggatgccaatcacaatgggtttgtccctagggtaatatagtttgctttgatcatttccaagagtaagttgtactacaggatagcagaagagatgcgcttaaaaagtatggcaaaatgcatattgagaaatagtatgttggccagacacagagactcacgcttgtaatcccagcactttgggaggctgaggtgggtcacctgaggtcaggagttcaaggctagcctggccaacatggtgaaaccctgtctctaacaaaaatacaaaaaattagctgagcttggtggcacgtgcctttggtcctaggtacttgggaggctgaggtgggaggatcacttgagcctgggaggtgcagggtacactgagccgagattgtgccactgcactctaacctgggtgacagagtgagacccagtctcaaaaaaaaaaaaaaaaaaaaaaagatgcagtaaagaagccgaccaaaaccaagatggtgacgaaagtgacctctggtcgtcctcactgctcattaaaactttttaaaaaaaatatgaaaagaggctgggccctgtggctcacacctgtaatctcaggactttgggaggccaaggcaggtggatcgcctaaagtcaggagtttgagaccagcctggccaacgtggcacaaccaaaaatgcaaaaattagccagatgtggtggcacacacctgtaatcccagctacttgggaagctgaggcaagagaattgcttgaagccaggagacagaggttgcagtgagccgagatcatgccactgtactccagcctgggagacagagcaaggctccgtcaaaaaaaaaaaaaaaaaaaagccgggcctggtggtgcacatctgtagtcccagctactcgggaggctgaggtgggaggatcatgtgagcctgggaggtccaggctgcagggggccgtgatcctgcccctgccctgcagcctgggttatacagcgagacaaaagaaaaaagaaaaaagttagtggtaacaggataaactacatagccatatagtattccttcacattcatgaagcaggtcaatttgaagcttgaggacgacttccattcctctaggtgaatctaccaagaaatgccttggtagagctaggagtgccaatggtatcagcaaggccagcctgcttccctgtgattcatggtaattctcactatgactttgacatgatgttcctacactgtgcctatcaacacttgtagacacactgtataagcgtttgttacatttactttttcttttgtcattacgtcttttattacagaggccactgtgcactccacaatcacacacttacacagctccgccttgccaagcagtgtagaccctgccaagcagtgtagacagattctggataactatctttgcatccttccccataccatgtccccgatgttgaactgaagcagctccttccacgttccctacccgttaattagccaggccactgcccacattgtcacaaacattatattaactgaaaaactggcccatgccatattccattatgagaaattatttttaattcgattaaattccaatgtttattcagaaaacctggtagagattgaattgctctatgtacctttcttagttttcttcttcttagcatattttgaccatttatcttctacacctggctgacctgcatggtccgtgtagtgtaacttctacttggtgtttgcgctttgctttgttttcaaatttaaattgtgagatacatttttaaacctatctaagaaatagccctgatattgaaatggcttctgtggaataggtttgacagatgtaagtctttgattctttggctttggtttttgtgcctgttacagttttacacacattcattcagaggaagacattaccatcagtgtgtggtttattttttcaaattccagtatatttttaaagacccatatttcactaagcagtgtacttgttgaaacccatgtgagtgactttgtttccacatgtgatagagcatcagatactggagtttgccaggggtagaatggttggattcaggaatgtttagctgactcatagcaggaagttatcctgtaaaaaaatgaagcaaggcagggaagacagatttaagtaccatgcagctcaaaacgacaattacattgtcattttcgttgtgaatacttctaggttctatattggctgtgatctttgtactaactgctattatggagaatgtgttggcatcgcagaaaaggaggctaagaaaatggatgtgtacatctgtaatgattgtaaatgggcacaagagggcagcagtgaggaattgtactgtatctgcagaacacctgcagtcacagtgagttctaataagagcatcacatttaataatttaggaagccaaattgctctgactggttacttatttactttaaaataaaaagcagattttttctacatttgttatacacttacattacaaattccttttcattttttttctctttttccctttttacctacccttcaaaatttatcttgcttcatagtgaatgtttgagacacattggggaaaatgtggtttaatggtaaatttgattcttcaatatgtaacatagaaattaatgagattaaaatagcttgacttgtttggactttatcagtgtttgaaatggtgctttattataggttagaaaaacactaatttgggtataagctttgagactctgttattaccttataggattttgaactcccacatggtacagtactagttgaaagatttgtgacttgttttcagctttaaaatcaattgaatgtttcatatttatctttaaattggttctccaaaattacagtgttcttataaatttttttactgcttgttcataacatcaaaaatactaaattaatgtactggaatgtcaatcttgaaagtattaaaaccacaatactaaaactattttatatcccagggtttagcaaattttcaggtgcatgctttattataagtaacatcatcccatctgttttgaactcacatttccatttcggatcttgcagattttttattggccatgatcggtgtcagaattggtaccatgggtgctgcattggcatcttgcagagtgaggcagagctcattgatgagtatgtctgtccacagtgccagtcaacagaggatgtcatgacagtgctcacaccactaacagagaaggatgatgaggagttgaagagggtgctccgttccttacagatgagagcccctctgtgtgcagcatttgaaaatgaaatcagctggcataattttggaagcatttctaggatttcaagtttccaatgttaggatttcaagtttccaatcttagagtgattatttactgagtctcagctagtctagtgaagggcttgacaaacttcagtccttcacataccagtgtcatgagctttaccatatccccacaccacctcagcttatctaacactcagataatctaacgtgactcacttctttatacattttatttttaaagaaacttcctctcactcccatggattgagaaacagtatgattagattatagttattattttccttatgaaagacagaaaggtggctgggtacgggggctcacacctgtaatcccagcactttgggggggctgaggtgggcaaatcatgaggtcaggagtttgagaccagactggccaacatggtgaaaccccgtctctactaaaaatacaaaaaactagccggctgtggtggcgtgagcctgtaatcccagctactagggaggctgaggcaggagaatcgcttgaacacaggaagcagaggttgcagtgagccaagatcgagccatggcactccagctcgggtgacagtgtgagaatctgtctcaaaaaaaaaa

SEQ ID NO: 1482 - DNA, 4645 bp, Homo sapiens
ccgccctcggcctcccaaactgctgggattacaggtgtgagccagtgtgctggatgaattttttcaaagaaggaaaaataaaattaattcggcccttcattaaaaaaattaaaaactctttaaaggaaacgtgggctaagttatttttctgagagactataagatttaggaagaaaaataatcatgatgaaacgttttgggaatatttttggtatttaaaattattgtagaaatttataaatgtgtcagattttggctgggcacagtggctcacacttgtaatccaagcactttgggaggccaaggtgggcagaccacctgaggtcaggagttcgagaccagcctagccaacatggtgaaaccctatctctaaaagaattttttaaaaaaattttaagtcagattttaagaaatattcttatggctgggtacaagtggctcataactgtcatcccagcactttgggaggcaaaggcaggcagatcacttgagctcaggaggtaagttacctgggcaacacagcaagactccatctctacaaaaaaaaaagtagctgggcatggtggtgagcacctgtagctatttgaaggggttgaggcaggaggatcacttgagcctggcaggtcaaggctatagcaagccgtgtttatgtcactgcagtccaggcagggtgacaaagtgagactcttatctccaaataagaaagaaaccctcttggtcatagatatgatttctttacaccaaatttgttcgtggatgccaatcacaatgggtttgtccctagggtaatatagtttgctttgatcatttccaagagtaagttgtactacaggatagcagaagagatgcacttaaaaagtatggcaaaatgcatattgagacaatagtatgttggccagacacagagactcacgcttgtaatcccagcactttgggaggctgagatgggtcacctgaggtcaggagttcaaggctagcctggccaacatggtgaaaccctgtctctaacaaaaatacaaaaaattagctgagcttggtggcacgtgcctgtggtcctaggtacttgggaggctgaggtgggaggatcacttgagcctgggaggtgcagggtacactgagccgagattgtgccactgcactctaacctgggtgacagagtgagacccagtctcaaaaaaaaaaaaaaagaaaaaacaagatgcagtaaagaagccgaccaaaaccaagatggtgacgaaagtgacctctggtcgtcctcactgctcattaaaactttttttaaaaaatatgaaaagaggctgggccctgtggctcacacctgtaatctcaggactttgggaggccaaggcaggtggatcgcctgaagtcaggagtttgagaccagcctggccaacgtggcacaaccaaaaatgcaaaaattagccagatgtggtggcacacacctgtaatcccagctacttgggaagctgaggcaagagaattgcttgaagccaggagacagaggttgcagtgagccgagatcatgccactgtactccagcctgggagacagagcaaggctccgtcaaaaaaaaaaaaaaaaaaaaaaagccgggcctggtggtgcacatctgtagtcccagctactcgggaggctgaggtgggaggatcatgtgagcctgggaggtccaggctgcagggggccgtgatcctgcccctgccctgcagcctgggttatacagcgagacaaaagaaaaaagttagtggtaacaggataaactacatagccatgtattattccttcacattcatgaagcaggtcaatttgaagcttgaggacgacttccattcctctaggtgaatctaccaagaaatgccttggtagagctaggagtgccaatggtatcggcaaagccagcctgcttccctgtgattcatggtaattctcactatgactttgacatgatgttcctacactgtgcctatcaacacttgtagacacactgtataagcgtttgttacatttactttttcttttgtcattacgtcttttattacagaggccactgtgcactccacaatcacacacttacacagctccgccttgccaagcagtgtagaccctgccaagcagtgtagacagattctggataactatctttgcatccttccccataccatgtccccgatgttgaactgaagcagctccttccacgttccctacccgttaactagccaggccactgcccacattgtcacaaacattatattaactgaaaaagtggcccatgccatattccattatgagaaattatttttaattcgattaaattccaatgtttattcagaaaacctggtagagattgaattgctctatgtacctttcttagttttcttcttcttagcatattttgaccgtttatcttctacacctggctgacctgcatggtccttgtagtgtaacttctacttggtgtttgcgctttgctttgttttcaaatttaaattgtgagatacatttttaaacctatctaagaaatagccctgatattgaaatggcttctgtggaataggtttgacaggtgtaagtctttgattctttggctttggtttttgtgcctgttacagttttgcacacattcattcagaggaagacattaccatcagtgtgtggtttattttttcaaattccagtatgtttttaaagacccatatttcactaagcagtgtacttgttgaaacccatgtgagtgactttgtttgcacatgtgatagagcatcagatactggagtttgccaggggtagaatggttggattcaggaatgtttagctgactcatagcaggaagttatcctgtaaaaaaatgaagcaaggcagggaagacagatttaagtaccatgcagctcaaaacgacaattacattgtcattttcgttgtgaatacttctaggttctatattggctgtgatctttgtactaactgctattatggagaatgtgttggcatcgcagaaaaggaggctaagaaaatggatgtgtacatctgtaatgattgtaaatgggcacaagagggcagcagtgaggaattgtactgtatctgcagaacacctgcagtcacagtgagttctaataagagcatcacatttaataatttaggaagccaaattgctctgactggttacttatttactttaaaataaaaagcagattttttctacatttgttatacacttacattacaaattccttttcatttttttttctctttttccctttttacctacccttcaaaatttatcttgcttcatagtgaatgtttgagacacattggggaaaatgtggtttaatggtagatttgattcttcaatatgtaacatagaaattaatgagattaaactagcttgacttgtttggactttatcagtgtttgaaatggtgctttattataggttagaaaaacactaatttgggtataagctttgagactctgttattaccttataggattttgaactcccacatggtacagtactagttgaaagatttgtgacttgttttcagctttaaaatcaattgaatgtttcatatttatctttaaattggttctccaaaattacagtgttcttataaatttttttactgcttgttcttaacatcaaaaatactaaattaatgtactggaatgtcgatcttgaaagtattaaaaccacaatactaaaactattttatatcccagggtttagcaaattttcaggtgcatgctttattataagtaacatcatcccatctgttttgaactcacatttccatttcggatcttgcagattttttattggccatgatcggtgtcagaattggtaccatgggtgctgcattggcatcttgcagagtgaggcagagctcattgatgagtatgtctgtccacagtgccagtcaacagaggatgtcatgacagtgctcacaccactaacagagaaggatgatgaggagttgaagagggtgctccgttccttacagatgagagcccctctgtgtgcagcatttgaaaatgaaatcagctggcataattttggaagcatttctaggatttcaagtttccaatgttaggatttcaagtttccaatcttagagtgattatttactgactctcagctagtctagtgaagggcttgacaaacttcagtccttcacataccagtgtcatgagctttaccatatccccacaccacctcagcttatctaacactcagataatctaacgtgactcacttctttatacattttatttttaaagaaacttcctctcactcccatggattgagaaacagtatgattagattatagttattattttccttatgaaagacagaaaggtggctgggtacgggggctcacacctgtaatcccagcactttgtgggggctgaggtgggcaaatcatgaggtcaggagtttgagaccagactggccaacatggtgaaaccccgtctctactaaaaatacaaaaaactagtcgggtgtggtggcgtgagcctgtaatcccagctactagggaggctgaggcaggagaatcgcttgaacacaggaagcagaggttgcagtgagccaagatcgagccatggcactccagctcgggtgacagtgtgagactctgtctcaaaaaaaaaa

SEQ ID NO: 1483 - DNA, 573 bp, Homo sapiens
gaaattttggtctggggaatcaggttttcctgtgggttttttgtttgtttttggcttttcatagacatctatatgaagtctctgctttagaatctataaaactatagcttcagaggctgggcgcaatggctcatgcctataatcccagcactttgggaggctgaggtgaaaggatcacttgaggtcaggagttcgagaccagcctggctaacagggcgaaaccccgtctgtactaaaaatgcaaaaattagccaggcatgatggcaggcacctgtaatcccagctgcttgggaggctgagggaggagaatcacttgaacccagaaggcggaggttgcagtgagccgagatcatgccactgcacgacagagcgagactccatctcgaaacaaaaaactgtagcttcagagattcacttaaattatcatttataggccaagagagttgtggctcacagcctgtaatcccagcattctaaaaggctgaggtgggtggatcacttgaggccaggattttgagaccagcctgggcaacatggcaaaaccctgtttctacaaaaaggaatttgctgggt

SEQ ID NO: 1484 - DNA, 573 bp, Homo sapiens
gaaattttggcgtggggaatcaggttttcctgtgggttttttgtttgtttttggcttttcatagacatctatatgaagtctctgctttagaatctataaaactatagcttcagaggctgggcgcaatggctcatgcctataatcccagcactttgggaggctgaggtgaaacgatcacttgaggtcaggagttcgagaccagcctggctaacagggcgaaaccccgtctgtactaaaaatgcaaaaattagccaggcatggtggcaggcacctgtaatcccagctgcctgggaggctgagggaggagaatcacttgaacccagaaggcggaggttgcagtgagccgagatcatgccactgcacgacagagcgagactccatctcgaaacaaaaaactgtagcttcagagattcacttaaattatcatttataggccaagagagttgtggctcacagcctgtaatcccagcattctaaaaggctgaggtgggtggatcacttgaggccaggattttgagaccagcctgggcaacatggcaaaaccctgtttctacaaaaaggaatttgctgggt

SEQ ID NO: 1485 - DNA, 1043 bp, Homo sapiens
gaacccatcccacctgtttacagaagcagttgcaatgccagcatcactcagtgacagctcatcatgtagggcccagaatactgattttgtgacttctaagcttgtgttccaccccccacactgtggggaaaagaaagagagatcagattgttgctgtgtctgtgtagaaagaagtagacataggagactccattttgttctgtactaagaaaagttcttctgccttgagatgctgttaatttataaccttacccccaaccccgtgctctctgagacatgtgctgtgtcaactcagggttaaatgaattaagggctgtgcaagatgtgctttgttaaacagatgcttgaaggcagcatgctccttaagagtcatcaccactccctaatgtcaagtgcccagggacacaaacactgcggaaggccgcagggacctctgcctaggaaagccaggtattgtccaaggtttctccccatgtgatagtctgaaatatgacctcgtgggaagggaaagacctgaccgtcccccagcctgacacccttaaagggtctgtgctgaggaggattagtataagaggaaggaatgcctctttgcagttgagacaagaggaaggcatctgtctcctgcccgtccctgggcaatggaatgtctcggtataaaacccgattgtatgttccatctactgaggtagggaaaaaccgccttagggctggaggtgggacatgcgggcagcaatactgctttgtaaggcattgagatgtttatgtgtatgtgtatctaaagcacagcacttaattctttaccttgtctatgatgcagagacctttgttcatgtgtttatctgctgaccttctctccactattatcctatgaccctgacacatccccctctccgagaaacacccaagaatgatcaataaatatgaagggaactcagaggccggcagcatcctccatatgctgaacgcaggtaccctgggcccccttatttctttctctgtactttgtctctgtgtctttttcttttccaagtctctcgttccac

SEQ ID NO: 1486 - DNA, 922 bp, Homo sapiens
tgtggggaaaagaaagagagatcagattgttgctgtgtctgtgtagaaagaagtagacataggagactccattttgttctgtactaagaaaagttcttctgccttgagatgctgttaatttataaccttacccccaaccccgtgctctctgagacatgtgctgtgtcaactcagggttaaatgaattaagggctgtgcaagatgtgctttgttaaacagatgcttgaaggcagcatgctccttaagagtcatcaccactccctaatgtcaagtgcccagggacacaaacactgcggaaggccgcagggacctctgcctaggaaagccaggtattgtccaaggtttctccccatgtgatagtctgaaatatggcctcgtgggaagggaaagacctgaccgtcccccagcctgacacccttaaagggtctgtgctgaggaggattagtataagaggaaggaatgcctctttgcagttgagacaagaggaaggcatctgtctcctgcccgtccctgggcaatggaatgtctcggtataaaacccgattgtatgttccatctactgagatagggaaaaaccgccttagggctggaggtgggacacgcgggcagccatactgctttgtaaggcattgagatgtttatgtgtatgtgtatctaaagcacagcacttaattctttaccttgtctatgatgcagagacctttgttcatgtgtttatctgctgaccttctctccactattatcctatgaccctgacacatccccctctccgagaaacacccaagaatgatcaataaatatgaagggaactcagaggccggcagcatcctccatatgctgaacgcaggtaccctgggcccccttatttctttgtctgtactttgtctctgtgtctttttcttttccaagtctctcgttccac

SEQ ID NO: 1487 - DNA, 688 bp, Homo sapiens
aagggatctaggttgtgctccgtatgagcatctaatgtccagtgatctgaggtggaacagtttcatccagaaaccatgccccactcccacccccgcaacctgtttgtgggaaaactgtctttcaagaaaccagaccctggtgccaaaaaggttagggaccgctaccttagggcccaccaattccaatcctaggtatatgtctaacagaaatgcacatatatggataccaaaagatgtgtaaaagaatgttcattgcagcactattcacaatagctggaaatggaagcacagtgtccatcaatagaaggaatacatacagtgtggtatacatagttacaatacacagtattgtaaaggaatgaactacagcacgcaaaaaaacttggttcaatctcacaagcacaatgactaaaggaatttagacatgagcacatatggtatgatcctattcttataaaattcaaaaaaagataaaactcatctatgttatcagaaattaggatagtggttacctttgggaagaggaagggttacctttgggttacttttggggaggaggtagggactgactgattggagggacaaggtggtgctgctaatactctttatcctgctctgtatggcacgtacacagttgtgttcatgtagtgatgattcatagagctttaccttcatagcgtatttttct

SEQ ID NO: 1488 - DNA, 2494 bp, Homo sapiens
aaaacttaaaggagttgagagagtgaaccatgtagttacttgatgagagagtattccaggcaaaggggccagccaagtactaagtatgctgggcatgttcaaggaacagcaaggagactgatgtggctaaaagagagtgagtttgggagaatgtaataatgaggtcagagagatagcaggggctcagttcctatcggctttaccactgagggagatagaaagcctttttaatctcatcagcagcatgataataacttattcatttaataagcatttaacctactttgtatccagcatttgataattcagaagtgagtaagatacagtgtctgctctcaaagtcaaagtctgtgggggaaaaagatataacaatacagatgctccttgactcagggttacatcttgataaactcattgcaggttgaaaatatcataagtcaggcaaggcacagtggctcacacctgtaatcccagtgccctgggagaccaggagttcaagaacaacctgagcaacataatgagaccccatctcaacaaaaaaatttaaaaattggccaagtataggtggcactaggcacgcctgtggtcctagctacttgggaggatgaggcaggaggatcccttcaacccaggagttcaaggttgcagtgagctatgatcattccactgcactccagcctgggaaacagagtgataacctgtctctaaacaaaataaataacaaagaaaatattctacgtcaaaaatgcacttaacacatctaacgtactgaacatcacagcttagcctaccataaacgtgctcagaacgcttacattagcctacagttgagcaaaatcatctaacacaaagcctatttcataataaaatatttgaatatctcatgtaattcattgaatactgtactgaaagtgaaaaacagaatggctgtatgggtaccattttaaagttgaaaaatcgtaggttgaatcatcatcagttagggattgtaattcttacccagtgatttaaagtgttctagtggttgggcacgatggctcacgcctataatcccagcactttgggaggctgaggcaggcacatcacctgaggtcaggagttcaagaccagcctggccaatatgatgaaaccctgtctctgctaaaaatacaaaaaaattagctgggcattgtggcacatgcctataatcccagctacttgggaggctgaggcaggagaaacgattgaaccccagaggtagacgttgcaatgaactgaaattgcaccactgcactccagcctgggcaacagagtgaggctccatctcaaaaataaaaccttacatccagattatatataaaacttttaaaaatctataagaaaaagataactcatagaaaaattattgaaaaggtttcatcaggtacttcaaaaaatattaaaatggccaataaatataaagagactcatttcatttgttatcaaggaaaaacaaagtaaagccaccatgaaatactactatactatacatccacccaaatggctaaaatgatgtggaacttatatattcctgtgggactgcaaactaatacactattttggaaaacttttaagtacttacaaaagctaaataaatacatagttgcacttacaacttagggcaggggtcaccagtcccaaggctgtggactggccccagtccatggcctcttaggaactgggctgcacagcaggaggtgagcaagcaagcaagcattactgcctgagctccacctcctgtcacattcttacagaagtgtgaaccctactgtgaactgcacatgcaagggatctaggttgtgctccgtatgagcatctaatgtccagtgatctgaggtggaacagtttcatccagaaaccatgccccactcccacccccgcaacctgtttgtgggaaaactgtctttcaagaaaccagaccctggtgccaaaaaggttagggaccgctaccttagggcccaccaattccaatcctagatatatgtctaacagaaatgcacatatatggataccaaaaagatgtgtaaaagaatgttcattgcagcactattcacaatagctggaaatggaagcacagtgtccatcaatagaagggatacatacagtgtggtatacatagttacaatacacagtattgtaaaggaatgaactacagcacgccaaaaaaacttggtttcatctcacaagcacaatgactaaaggaatttagacatgagtacatatggtatgatcctattcttataaaattcaaaaaaaagataaaactcatctatgttatcagaaattaggatagtggttacctttggaaagaggaagggttacctttgggttacttttggggaggaggtagggactgactgattggagggacaaggtggtgctgctaatactctttatcctgctctgtatggcaggtacacagttgtgttcatgtagtgatgattcatagagctttaccttcatagcgtatttttct

SEQ ID NO: 1489 - DNA, 1408 bp, Homo sapiens
catacagtcattaattaaaattattaggccaggcatggtggctcacacctataatcgcagcactttgggaggccgaggcaggcagatcacgaggtcaggagattgagaccatcctggctaacatggtgaaaccccgtctctactaaaaatagaaaaaattagccgggcgtggtggcgggcgcctgtagtcccagctactcgggaggctgaggcaggagaatggcgtgaacccgcgaggcggagcttgcagtgagccgagatcgcgccactgcactccagcctgggcgacagagcaagactccatcttaaaaaaaaaaaaaaaaaaaaaaaattattaatgtaaactattgcctggtttttagacttcaattctgatttaatgtcaaaattgtatcaatcccctaatgccaaagattactacttggcactaacacatttctatttatttttccttcaacggtgccagtggactctggttcaatttaattttttgaaatttaacgtgctgcagaacttgggaacattttatggttctcatccatggcactggtacttcagtcaaggatttccagttatcttgggtactcacttacccttctttattcatggctgctatctagcaccaaagagataccggatacttttggtgactgtgctgtggacactgcttgtttataggtaagattttatttgttcaaaaggctaaaattttttatgttaccaagaaatcaaattaaattcttcaaaaagtaaactttatgttttggaggtgccattaacttttgttagtgggaattatcttagaagatacaagtagtagtaattatggaggcactagagtgaatactttagatatgtagtttgcttaataaggattacactcaatttttaagaacttggactaattttatttgctttaaaaaaaaaaaaaacagaccaggcacagttgctcatgcctgtaatttcaatactttgaaggccaaggtgggaggattgcttgaagcaaggagttcatgaccagcctgagcaacatagcaagaccctctctctgaaaaaaaatttaaaattaccagggcatgatggcatgtgcctgtagtcctagctattggggaagctgaggcagaaggactgcttgagcccaggaatttaaggttgcagtgagctatgattgtgctactgcactccagtctgggtgacaaaacaagaccctgtctcagtcaatcagtcaatcaatactaccaaaattttaaattgaaggaccacagaaatacattctaaaataaaaatgtatgtatccttattccaaatttgactaatttcacttacttggattgaaatagaaatcccgtttttagaatgtaactgtactttgtaatttcaaattgacatcatattttatgattagttt

SEQ ID NO: 1490 - DNA, 295 bp, Homo sapiens
aacaagtacatcattcaggtcttctgcaggtcatgctgttttccaaattgactgtcattaacagccccagttttccggatattttattcattcaacaaatgcataatgaatatgtgcaaatgaatacctactctgccaagctttcttcccctcaagtgctaaaaatagagcactgctagagatagtccctgctctcatggagtttatgttttcagtgttaattgagaaaataacactgggagggtctgagggagaactagcatatagagtaaccatatcgcatattgcggttgaa

SEQ ID NO: 1491 - DNA, 473 bp, Homo sapiens
ttcattaattcaagaagtatttattgcatgcttactatgtaaaatagtcatgcatattcattgcagtgatggaagtatatttttcttgatagaaaaggaatgctgttatgtagaacactgagtcaaggaaaaaaattgctttttcttcaagagttttgtgttatagtagattatccagtttcaggaattgaagcccatcatagtgtgtagtgtgcatttttcttcttgcctatgtcttggttctcctttacttacacttaaatttgtctgtaatgtgaatttgttttcttgatttctatgcttgcttaattcttcaacatcttcacttctgatattcatgttagttatctgctttaaatctaattcctcaggcactccaacaccacgtggaggcaacagtttgacagtttcaaatgtcactccttaagtggacatacagagtagttgggcacagacatgaatggaaggtggaa

SEQ ID NO: 1492 - DNA, 318 bp, Homo sapiens
  SITE (208): n equals a,t,g, or c
cttaaacctgctagaccaaaatgcaatttgatatagtagtagctatttttttctctttctcttgtttttctctctttttaaagaaaaaaaattgaatgattattctttaccttattataagataaatagcatctaatatagcaaatacaggaatgcatttgtaaagtctgattccacatcagttgtttacaacattatttgaacattntggctattgtctcatgacccatgttagaatgggtttggagtgtttcaaatctaatacacagtgagctcttctttaaactctaatgaagctgggctggtcacctatttggg

SEQ ID NO: 1493 - DNA, 317 bp, Homo sapiens
cttaaacctgctagaccaaaatgcaatttgatatagtagtagctatttttttctctttctcttgtttttctctctttttaaagaaaaaaaattgaatgattattctttaccttattataagataaatagcatctaatatagcaaatacaggaatgcatttgtaaagtctgattccacatcagttgtttacaacattatttgaacattttggctattgtctcatgacccatgttagaatgggttggagtgtttcaaatctaatacacagtgagctcttctttaaactctaatgaagctgggctggtcacctatttggg

SEQ ID NO: 1494 - DNA, 32183 bp, Homo sapiens
cgtagcacatggaagtaagtattttgaagggaaacacttgttttgattttatgaaacatttgtttcaattttatgaaattttatgacagacattttcttgcctgtgtaagctgaaactcagggtaaaatatgtttcttactgtgagaagcagatgaaggctgtttgaaagccactgtcctgaaagaaagcatagtcacccaggatggtttctcagcctcagcactactggcattctgggttcaatagctcttttctgtggggggccaccctgtgcctttgtagggcttttgacaggagcagccctccctccacctatgggtcaccaaaagagcatcccccttccacccagtcacaactgaaaatctctccagacattggcaaatgtcactagggcgatcagattgccccggcttgagaactgttggtacagggtgaagtcaggattctccttgccctcaaatattctgctaccaacttgcctatacttgaaattctgctcagcaaatgtgagcgactaccgattagatcctttcctgtcctgattgtaaggaaccaatgtgaaattgccagaaggcattggtaccaaacgggagaaagggccaacggccatcgataaacgttgccagtgatggacccaggtggggcctgctccctggccctcaggagagggcagatgggcaccacaggggccgtgcctctgggatcccaggggggtttcttccggagaaatacctgacagcagggtgccctcctctggtggctgaggcagaagagaaacctttggacctttgtctttgtacaacccgccaccagcttcccctgataacctacgttgcatttgaacatttagtcaaccgcggcaacttgcggatcatcttaaacttagtgcaagactcaggagttagtaaatgcctaatggaatgggaatgaaagatttaatttatgattaaaaataccatgctttttcaagcatccccttgatggagtttgttccattttgagaatttccttctgggacaaatagggaagttaccactgcccactaatgtccaaatcctccctctctggaaatatcatttgcagacaggggacaccggtggagccctgtgatttcatggccacctgcttgctttggagcctcacatctatgcctaaatccaggctgtttccaaggcaccttcaccctttattttaatcatctgtatctatcaaagcccagtgactcatgccatagtttaaaatgcttaatttactgtgaaaccttcattaatccaaaaaactaaataactggtgtccatgctagccctggaaccttgccatctcttaggaagaactccattaactactcacaaatcatatttggcattttaccggttactcagggccagtgctttgtcacaggcaccaggctgcagagttgaggggacaagctcaggtcagaagacttgagaaaaatgtcatttatccgtggggagccttgcttttcctcctttgtaaaatgaaaacaatgaaagttacccacctatggggcttgtggtgagattgaaaagatataataggtatgaggaagctttgcaaacgcttgaaaagggttgagcagataatattcttactaaatgcattggcagtatctgttaagtcttcacttacgctattggtttgataaaaatactgactttgcaaatcaatttgcttctctgtgctttggggattttcagggagagcctggagttggtctaccgggactcaaaggtttgccaggtcttcccggcattcctggcacacccggggagaaggggagcattggggtaccaggcgttcctggagaacatggagcgatcggaccccctgggcttcaggggatcagaggtaacttcatgcagatcagtctggagggtttcgaggacaggatgtgcttatttttgcattcccagagcccctaccgagtatatttgatatgtatttgttgaacgaacgatgcaaatcttagaggcctagagctcgtggctttccgttgctggggccattcgtgtgcatgggtctcctaggccgggagacgtgccactgctcctgtacagcttactctcaatttttcttctccaggtgaaccgggacctcctggattgccaggctccgtggggtctccaggagttccaggaataggcccccctggagctaggggtccccctggaggacagggaccaccggggttgtcaggtgagtgacatgcttctagaattatctgttcccaaaagcatgcttttctgaagcatgggggatgaggccggggtccctataaagtgaagcttagcacaatgtatgagataaaaagagaaaaaaataaaactcgagtttgtgaaaataggtttgattgtttgcttaaatgtagtcccagattcttctcccacccactgagatgatgtgccaaacaaagagacctttcctttattgtgtactccgtcacgtttcacattttattctaactgatgtctctatattatctttccataggacggttaattagtggtggataatttcaactaattgagtccatgtctagaacctagctttgcctttgatcataataatcatagaattaaggtggtgcatggaaattagagcaaaactagccctagtcctaagtactgcgacaaggcagtggtggtgcttagggtggccttgctgactctcaatgacaggaaaggggagtgcttttcttttagaacaagagccatttgattatcctgatgaccccaaacaccaacacctaacagatgatccattcaagttcccagtgtgggcgtgctcacgggctttctgcagaaagtcatagttaaacagagcactgtacattgtagatcattctgtaaattctgctaaaagttatttgtgtttcacccaactgcaggccctcctggaataaaaggagagaagggtttccccggattccctggactggacatgccgggccctaaaggagataaaggggctcaaggactccctggcataacgggacagtcggggctccctggccttcctggacagcagggggctcctgggattcctgggtttccaggtaagtgatttttgaacttctgcctggatccatcatgaagacatgggcctcaccttattctttttatgactcagcatttactgtcagcattcagagcaagaaaatgttcacagtcctttcctttggccacaggttccaagggagaaatgggcgtcatggggacccccgggcagccgggctcaccaggaccagtgggtgctcctggattaccgggtgaaaaaggtaggggagctgataaccctagaagctcattttgtgtctatttctcgatgccacttgggaaattctcaagttgtcatagatcatatttccctttaagacgcctacaaaagaagttaggaacatcaagcagaaggctgggagacccccttcttccagtaggattcctggtgctcaatgcacatggggttgaaactgtgcttggccaagcaaatcagaaagaagctgggctttccttcttggcacagatgagattcttcttgtgagaaatggtggaatcttcagccatgccaagatacagggaccgagtccttaggctcagattaacaacctgcgcaagtttacaaggcttcgtctttatttcttatcgttatttgaagttgttccaaaataatgtcttttacaaagaaatactgtaaatatgacacatgaaaaggtcatttgttttgtagaatgataaaattcctgttctattattttgtatagaactgaggggcactatgaataagagtgataaagatatgtaggaaggagagaaatgtaagttatctaaacctgaaagccaagtcacatgcagtagagttattagcgaataatgaattgtagaaaatggctttttactgctcatttacctggggttggattcttctgtgtctcagacactggccattaatgccattttggacaagttatgagtgctttgtagcctttttgccagctgctgtccctgtcaacaagaacgtgagccttttgagcacctctgtgacactggcccaggctcaccagtgccttctctttcctctgcaggggaccatggctttccgggctcctcaggacccaggggagaccctggcttgaaaggtgataagggggatgtcggtctccctggcaagcctggctccatggataaggtggacatgggcagcatgaagggccagaaaggagaccaaggagagaaaggcaagtccaggaggcttctcatggccaagctcggaaccacaatgtgcctttcctgggttatcgggtcctccataaataataaccaaaccaacctgcgtttctgcagcaacttgcttgcaagcaaatgcgggtcattgctattttcttctctgatgtgtaggacaaattggaccaattggtgagaagggatcccgaggagaccctgggaccccaggagtgcctggaaaggacgggcaggcaggacagcctgggcagccaggtacagtgtggagctccggtccccagtgtggcaagggctcaggatgaggcctgtgttccccagctctttctgtagatgtcaacctgtcagactgctttctttatggttctaggacctaaaggtgatccaggtataagtggaaccccaggtgctccaggacttccgggaccaaaaggatctgttggtggaatgggcttgccaggtaaactggatttagaagaggattctttagcatgtgtgcgtgtgatactggtagggcatgtctgcagaatgagatcctcttcagctgagacggacagaatccaggcacgtgtgtctttcacatgaattcacatccccagctctgaatggtctcctgctcagggatggatgacatttggctgacagaatggccattgctaagaaaactcaccatctaatggaataaaacatgggctgtatacagtcaacttttgatgatctccaagtgaccatccccttgtctaggatctccctaagagacgacggcttctccatccaggcttgtcagcctgagtagcttatggctccagagccctttgtgttagttcagaagaattctccggactcctctgctccaatcccggactagccttaatgctttgccatcagtgtctattgtagtgagagcagccgggaagaggaggagagtgcgggaagggctgggtggtgatggtcctcagagctcactcagaaagggggagagttcagatgggaagcccatctttccatctcctcttgagtcttgaccaggtgctgttatcactttaattaaaatataagcatctagattgctggtcatgcctatgtgtgaataagcctggctaccagcatgcatcacagaaccgagtgtgcacagactccggcctgcccgcctcatagtccctgtgacgtctggctgatgagagctggctgtataataaagaacataagatccatttttattctgttgagaaagtaaatattctaggtagttaatgtatttcttccctgtcttataacatgatggtcttaaaggacgggagagacatttcctagcgtggctctgatgtgatctgggtgactgacgtgttctgggtcatgagccgattgatacatgagggatgtgcattcttgtatctcaatcttggctggttgtgggggattcacgttcttgtatctcattcttggctggctgtggaggcactttttcatttgtaataccagcactagctaagcccaaatcaagtttcaattgtttgtgtttataggaacacctggagagaaaggtgtgcctggcatccctggcccacaaggttcacctggcttacctggagacaaaggtgcaaaaggagagaaagggcaggcaggcccacctggcataggcatcccagggctgcgaggtgaaaaggtaaccagcgctctgcgtggaaaggtccccttctcccagctcagtggagatgctgcctgagaaatgctcagcaaatatctcagcacactcaatgagccataacacacagggagtcccataaggcagcacaagtcgcctctccttccccttgtattcactacctctcccccaaggaagaatctagagactggtgagaggctaaggtgggagacagctgtcagtgggataaaacagagaggatggaggacgaagaggaatggcaggtagaaaccagatggttggctctactgctcttaagttttcctctccattcagaagtggactttgattctttgatgagaaatctggaaatggagttttgcaatgcaatattcattgcaccaaaatgtataccattatctataacatgcctacagatgcatgcccatggacaaatgtaaagttaatatgcctgacttttacttgcagggagatcaagggatagcgggtttcccaggaagccctggagagaagggagaaaaaggaagcattgggatcccaggaatgccagggtccccaggccttaaagggtctcccgggagtgttggctatccaggtaggtgaggggggcttctcttggacttggggaatctaagaaatcaaagaaaagcccaaacttatggatgttctggtgttttgtttttttctttaggaagtcctgggctacctggagaaaaaggtgacaaaggcctcccaggattggatggcatccctggtgtcaaaggagaagcaggtagagggccctctttgggacacagcccgggcacatagagaacagtggccaggggatgggaggccccaaggagttcccatcacagacggggagcagggaggccagctgtcctgtctcccatcttcagatgggcaaactgagtctagtgcaggttacaggatctttctgaggtcttgtcactagcaggatctaggacctaaatctccaaactgtttttgtggccatcatggagtttttgtcaccagcttttgagggtcagggtttggtggtgttgctgaaagcacgcagggtcctttctgaagggaagtcagaactgacctcaggaaaaccaggtgtgcttgggagggaacagctcccttaaaggatgtcagcaaagggccattttgtatggcagctagggtgctgtgagaggttatgcgggtgtctgatgtgacttttctctttgaggtcttcctgggactcctggccccacaggcccagctggccagaaaggggagccaggcagtgatggaatcccggggtcagcaggagagaagggtgaaccaggtatggcccaacgccccattccctatcagaatcagcagtgtccactcccagagacctgcagactgcctgtgttcagtgaataaagctgggcacagaatggcccctagactgcacatccctgcaactacttaaacactgatgtggatgtgtggagtagagtgggatgagtggaggggaagaagggaaggggtatttattatcccataaatactgagggcatcttcccctgaaataacctgagctctcagtggtgagtcagagacacataaaatacctgctgttagaacactttccatttcccttgtggttgctatgacaaaacaaagcaaagcaaaacaaaactcttttctttgcccagcatttccccatttgaggggaaatggttggaaatattggttggcccctgagtctgctcctgtcactggtgggctttaacttggccataacttggacaaaagtgcaggtgtgatgatgacaatcacatacacagtaatatttgtatttaatgcaagagagagataaacacaccatttgaagcaggttacccctgacttggggggacactgggaggaccaccaagagcatccacagctattggtgctggctttcttttcatttttttcattccataactttatattctatacatttgtttttctatacaaacaattcataaaaatacccctgcactcctttcccccgatttgaatcttccctcaagccctttgctgacgtttgtcatctccccagcatctgctgccccaaatctctttggctttccccacctccctgagaatagcaattagtggatggttgtctgagaatcccatttgcttatctccagacggcagcaggaaacaaatactcatttgcacagatcatttgtgctaaatgccgtggtggttctgagctgaaaggtacttaggaaaaagtactaaattaggaacattcagtcaagggtatcttataactgtaggaatatcattttattacaagggtgcaattaactaatatctatgtactccacaatatacgtagtattattgcagagttgatagtgctttgtgttgtacctgcagatggattgtttaagtaaagagaaacgtggcattttaccctcatcttataggtctaccaggaagaggattcccagggtttccaggggccaaaggagacaaaggtaatctttgctcactgtgctcttccttttcaaccaaccgctgctgcctgattagcagaacaaggggcagtgtcttcaggatgaagccccatgcctgttggccaggcagcaacgggatggaggatgggtgctgagcccagagggcaatgcctgcaagacacatgtggttcccttctaattaatggatcaaaatggcgtgcagtacactcatgatcagaattatcttttacttggactaattttgtaaaaatccagcagagaggcgagacccctgtcatttttatgcctagaaggtcatcagaatattgaaattctgactttctagaactggttatacttatgtgaatgcaggacagtatgtagcacacaccacgagacaaaaacatgccctgcgcagccacgatgtgctcagtactaagtgcagctgagagttggccaggagcttgggaaggcagtctcttctctcagagagctgagcatttcatgggaaagcaaaggggacacagaaaatacaaggcatgtgagctgcacgacactgaagagaagccacaggtggccgcagccaggagctcacacacagcatccatgggcatgcttatggcccgtggctgggctggctgagtgatcccactcagtgggaggattcagaaagccctggaaggccttggacttcagctgagaaggagcaggggcacggaggtgttgtttctcccaccccctggttctccccgagaccagcccagagtgtttccttggcaggcatgtagtctgacactgggaacccctgggttgagaaggatggcctggtgccgggtgggctgccttgggaatggacacttccctctcccttaactcacagaatccctcaaacacagagccccttgcaaatgcacctgctcaaggggtcgctgtgggctgttcctgccctgcctttcctaccttgccatgtgatcccgcacactcctttggacatgctgcactgcccttgcacaaactctacgcagcaccttgcgttttccactcattgctgtgtgaaatagcagggagaatccccaggagaagagaatcccaaatgaccactttaggtcttgaccctatttcattcccttttcctttgttttggaaataaccttagaattttggcatttttattggtaagatttggatactatgtttaaaactaaacatagaatttctttttcctacaagctgttactttttaattttttaaacctgctctattgaagtttcactgacaggtcataaactacaaatatttaaagtggacaatttgataaggctgacataggtctacaccatgaaaacatccccacattctagatagcaggcaaagccttcccccaaaagtctcctccgtggcttcataatccccccctcctgccctctccccattccccaagcaaccgtccatctgccttctggtcctctaggttagtttgcattttccagcagtttacaaaaataaaaccatacacttcgtagtcttttcagcctgactactctcccacgacataattcgtttgagatccagcccagtggttgctcacttctttctatggctgagtagtgtcccactgcatggatataacatgattggcttgtccagcccattcatgtgctgatggagtgaggctttcgtttagcagtgcagttgctgcagatgtctttaaacacaattcagatgcctttgccatagaacacgtctcgtgagaagtatgaaaacgatagctgggttcctagcattctgagctctttttccagccaggccatggtcggattctagtgtgttattaaagagaaggagggatcggagcccttgctgcagtttcctgtggtgtccctggaagctccctctgagcggtacctacaggatgaggcacgcctcatcccatctctgccgtccacgctggagattactgttctgctgctgcgtttcccatcacctcaaactgtttttcttgttcaggttcaaagggtgaggtgggtttcccaggattagccgggagcccaggaattcctggatccaaaggagagcaaggattcatgggtcctccggggccccagggacagccggggttaccgggatccccaggccatgccacggaggggcccaaaggagaccgcggacctcagggccagcctggcctgccaggtaagggcatctcgccaggggccagggctgaggactgggacagaattcacaaaaggaaatagcgtaaaagaaatagttaaattctcaattgggcttttttatttagaagtctgcagcatttattacagcttgaaattgtgtttggcccccatcgagtcaaagcttttcttgtatcctttctgtcaaggaatttaagtaattagggagatgcaagaaaggaaatgattggacaagcctggactcgtgccccgtcggtggcgttggacttaaaccagcgcagcacttgggcccacttgtgggttctggtgaagacccccgtagtggtagcacagatgcccgggcaccactgaccgcaggccattttggacacggagacagtggcatttctatgtctgtccttccttccttccttccttccttccttccttccttctttcctcccttcctctctccctccctccttcccctcccctcccctcctccctcccctccttcctccctccttccctcccttccttccttcccagaccttcctcaatttctgtctcaagggttcacattgtcggtccagtgttttatcagagatagtagtgtttctattccctccctccctccctccttccttccttcctggacctgcctcgatttctgtctcaagggttgtcactgttggtccagtgttgtatcagtgaggggccgtgggtggcagtattgatagccccacagcccagggacacttgtgcatatttaaccccaaatgtgtggctttcttctcttccattaggacttccgggacccatggggcctccagggcttcctgggattgatggagttaaaggtgacaaaggaaatccaggctggccaggagcacccggtgtcccagggcccaagggagaccctggattccagggcatgcctgtgagttattgatttgtagatttttatttttaaaggagtcttttctggccagaagtattcatatgtgtctatgtgtgtatgtattttgtgtatgtatatatatgtgtgtgtgtgtgtgtgtgtgtgtgtgttacactcccacatccccactaaatcagttctttctttctttcttgccagtaacccacatctttattggcatcagagtaggaaactattgtaacatttttttacaatccagttttccaagaaccataaaagggaaatgttatactgctggaaattatggctcaatgcctaaatttaagacctatttacaaactcaatgtaaaaagcaagccaatgttgttttgcagagaacaattctgtaaaactagcccagccatctcttaggactggcaggaggacagggaattgcagttgaacagttcaagtcataaaagataaccagcaatattccatctttctttactgacctgatccagatacagagtctaagtggtgacttagacaagccttcagaagagcacatctcagggtgcaataagtgaccagcagccttgtgtatttctgtgtgtgtgtgtgtgactttggctctttgctgcacctgaatatatagcccttcttagtggtggtcatggatctttggtttgatttttagcttaaccatgtccatggctaaaggattgtgtttacgtggctcgctcattcaaatagctggattagcagagctttattctctgtgtctgtctctctgtttcctctatctgtctccatctgtctgtctctctgtctctctctaacacacgttaggagaaagagagagtatatcaggggagatcatgaataggagggatttgagacagacctctgcagttatgttggagcaagcggggttcttctgtaagtcaacacatgttctcccttaaagggaaagctttgaactgctcatcagcagcagagacatatcttagagtcatcagactactttctcaaggatggatacagaatagctaagcttgctgggtgcaaaacaatacgtggtgctgatttacttctgaatcagtaagttatgaaatgcttataaataattatgcagaactggctataaggagtagcaacagtcatgtttacccattccttgtcctcaaagctgtgtatatctccacagtatagcaaatgtgtatgtgaatgtatttttgggcccctattgctatattgcagttttccagtaatgtaagcctaggtaatttgtcaaatatttatgtattctcatttttattcctcagtaacatagaaatataccccattcccggctgggcctggtagctcacgcctgtaatcctagcactttgggaggccgaggtgggcagatcacctgaggtggggagttcgagaccagcctggccaacatggcaaaaccctgtctctactaaaaatgcacaagttagcatggtggctcatgcctgtaatcccagccacttggaaggctgaagcaggagaattgcttgaacctaggaggcagagattgaagtgagccgagatggtgccactgcactccagcctggatgacagagcgagactctgtctcaaaaaaaaaagaggaagaaaaagaaatacaccccattcctggtgccagtcagtgtctgtctgtctctgtatacatacttatgtataaatatgtgtttgtatatatgtttatatacatatatatttgttcatgttattttggtttgacacttttaaaataaggctaagaaacaaatctacgtaagaaataaaacaacttgttacatgttgctgtccacgacttgagaaaggaacgacttgttgaaatggaaagaaaatgagcccctattttaaaatacacgaatattgccacagtataaaggaaaatactcgttccttagcatttcttaattttctttgcatatttaaaatcagttttcagataagacatgaaactaattctaaagaaaactgattgcacttgaggattaaggggaaagttttcagaaaagctcgttggctggtgctggatggctatgttgccgtcacaggtgttgagggggccctggctctgtctatggcatcgtgctgtgagctggaggtggcaagggcaggacatttgcctgctcctcaggcgcttcccctgtggatggacaagcagaggagatacatgggagggaaacaaatgcttctactttccagcttcccgattgaggcacatgcaaaggtgttgttattctgtcatttaagaaaccacaaggcaccatttgttcacaaatgtgctttccagaacattgaggggctgtttccattttccaactagcaggttactggagagacttaacctacatatcctgagcaattcccaacctcctctttgcgtgtctagggtattggtggctctccaggaatcacaggctctaagggtgatatggggcctccaggagttccaggatttcaaggtaagacagcacagaccttgctgcacagcctttgcagcagcagacgctgtgtgaagagcttgctaacctcgggcaccttagcactgatagcaccgctgccattatagcacgagatactgttctcttcaaattaaaaatggcatttctgtgtggcagcccaatttgtataatcttatggatgccagtgtaaagacattctgattttcttattaagaatcagtggatcattaatatctcaataagaagtcatggatttgggctattcattaatttattcatatattaaacacacatttttgggctgcttaccagctccccaggcactgcagtttttactgctgagtcagatacacgtgaaaggtgaataaaacaggtcgcagcctcaaggtgtcttgtggtccaactggggacatgtgtgaatcagatcgggaccaaaaacagtgccctatgcccctccactagttggatcattttacagttggctgcatgcttataaaaatgtagcttctgggttctagaaaaaagagtttcattaaaagttttacacacgtgaccagaaataatgctgttttcttccttgaagataaattggaaatttgttcactgtctatgtgtgcatatatgtgtatatatgcatatatgtgtgtatatgtatgtgtatatgtatgcatgcataagcaggtgtatgaatgtgtatatatgggtatgcatatatgagtatatgtgtgtgtatatgcatttatctatacatttgtgtacatgtatgtgtgtgcactagagagagatatatacacacacatatttgtatatcattgggaattctgtgcaagacagtgctttccctctgcttttaggtccaaaaggtcttcctggcctccagggaattaaaggtgatcaaggcgatcaaggcgtcccgggagctaaaggtaggagagtttgttgatctgtggacaccttactggtgctttgtgaaaatgtaaaagccaggaatgcacagaattggggtgtttggtttttcatatgtgaaatgactcaaaaatcattaaaaacaattgatagggaattctttgcagcaagtcaagattcctgtagttgacattttaaccagcgacttgtctgaaagtagaatctgataaatccaggactgagggaactccaggggaggggtggccgaggttctcactgacaggctcagaattcagaaacttcccaaggctctcaagttagcctgaaatcaaccactgaaagttataataggaaagaaaatcaatcttgcacttagagacggagtgcattcctgctgcacagtaaagaattcttcctgggaaaggtgctgttggcttctccaccggtgggagcctacagcatgaaagtcgccgaaaaccacatcatctcaaaagggaatggtttaagcacagtattcatcctgcttcctctttacagcagaccatacttctagggcatcatttaattttccaaaccatgttttgggagagagaatgagaaaccacatgccctgagaagtggaacccaaggaaggagaggggagggagggtgtgtggaaggtgagggagggtgtgtggaaggggagggagggtatgtggaaggggagggagagttgagggtattgggctgaaaacggggaggctgaggggaactcgcactttgtgtggttcttaccacatgccaagacttgccatgcagaagaaggattaagttcattcgtcactcaaagatcaggaccagtgtgatactatacagtaaggcaggtttcagatgagtgtgggaaaaatgtcctaatcgcagagtggcactctccacgtcagaagcgggggctgcttgggaagaacaagcttctctccctgctgggagggctggcatgaggctgcagggcagttgtcaggggtcccagagcccagaatgcagtgggaagttacgctgatgccccaatgcctttgcccgagagttcaggatttcaggttaaataataaagatgtgcagattggacatgttttgtgaagatctgattacctgggttttgataatgactttacctttgagaagtacgttccatttggatagcttcacccgggattctccttctaaagttgtttccgccccagtatgtggacagtgaaattgatcaatgccttccctattcccacaggtctcccgggtcctcctggccccccaggtccttacgacatcatcaaaggggagcccgggctccctggtcctgagggccccccagggctgaaagggcttcagggactgccaggcccgaaaggccagcaaggtgagaaggcttggcctgtgcagggcggtatggggagcccagaggggcagtggtcagagttcctcctcacccatgtatctaaaataagtttctgggtaatgattatacacacacatatgaatatgagtttcttacctcccttcaatgcatatcaaaacctatgacatttttaaagggacctaaaaaaaatccagaagaaaacccaggaaaagctagaggaacacataacaacacatctgtgttcagttagaaaaacatgggctcaaagaaccagatcattacctttccccctcctgcctcccgctccagatgggggtggcatgtagcaatctggaatggtaaaaatcggtgctctccatccatgcccccaggagcgctgcctgattggcactgtctgtacaattctctgttatttcctgaaaccctaacatagtcttctgcttatttgagtgaaacatctcctatttgaagagctactgataaggagtgggtgggaagtaaaggagaatgaaaacattttaaagttgaaagcatcaaagaaaatttaatgatacttaagaataagctagccaggctcactgggtcacacctatgtaatgccggctttttgggaggctgaggtgggaggatcacttgagcccaggagttcaagaccagcctgggcaacatagggagagtctgtctctacaaaataataatgataaaattagccaggtgtggtagtgcatacctgtagtcccagctactcgagaggctgaggtaggagaatcgcttgagcccgggaggtcgaggctgcagtgagcggtggtcacaccactgcactccagcctgggtgacagagcgagaccctgtctcaaaaaaaaaaaaaaaaaaaaaagagagagagaaagaaagaagaagaacaagctatgtacatgaaaacaaaaaaactatccatgttggtatatctgttgcctaaaaattgagaccccagtatatggctgagagggaaagttatccagtctctcattccctccacatcacctgccttttccaaaccaatctgccaaacagcaagaaaccagggagaactcagaacgaggtgcccaaacacacacccccttatgaatatccagctgcttctgcaaagtctgtactcgactttgtgggaagcaactcctggctgtccgagaaaacgttctcatctgcagtgagactttatgcttggctccttgaacactgaaaaggacatttaagaagggaagaaagagatacagcttactgccatacaggatcataaattatttttcctctgcctcaggtgttacaggattggtgggtatacctggacctccaggtattcctgggtttgacggtgcccctggccagaaaggagagatgggacctgccgggcctactggtaggttgcgaaacttccaacgtaattacccttgaccaggatctttgggatagaaggagcagaaccaggcatggggaaacagcagaatgaagttggatatatcacttgacagatttccgaagaagtctgtttcttagaagaaatagaatcaaatagaagagctgaagaagtgttcttttttctgtgtagagacagatattgatcaaagtgtacgtttcccagatgttgttgaaaggcagccaatagtggtggcccatgtggtttcctaagtgggatgtgagctgcagctgtgaaaattctatttcagcaaaggacaagggaagtagaaatgaaaataatgccagcattggcccaaaggcatgggatgaacttgatctgcttccttaggagaaggcacactcgagtgtccggtgaaggctatgatgcaaaaggctgaggccactgactaattgaacaaagagctcagcccagcagacctgggcacagtttggcacgtggcacagttagagaggggacagaagcaggccttgcctgcgaggtcccttactgctccatttccatacgcaggctttgggctgctatggaggaagaaacaccttaagatgaggttgtttaataattctatgatagtcctccccaacaggagccccacgattccgtgtgaatgacatgcacagagtcacgtcattcatttattttcatttattcatatatccattttcatatgtgtcatatattcattgaactaaattgttcaagcatctgctctgcaccgagaactgtgcttataaaaatatcttgaggtggcaggtaaaaagaaaaagttaagacaccatgaaggaggtaggctgctgtatttagttagccatgcattctttttagacttttttggtaacatgaataggtaggatactttgtggaaatataaaatattaaaaactctttggagaaaatgattttgaaagcctttaggggagcgtgtttgtaattagggaaactaatttgtctcctatcttccaggtccaagaggatttccaggtccaccaggccccgatgggttgccaggatccatggggcccccaggcaccccatctgttgatcacggcttccttgtgaccaggcatagtcaaacaatagatgacccacagtgtccttctgggaccaaaattctttaccacgggtactctttgctctacgtgcaaggcaatgaacgggcccatggccaggacttgggtaagaagcctgcagatccatgcattcattcagtgtaggtgtgttgagtgccttcggtgtgcagtgctggactcgcctctgctgctgcagtgagggcagtagcgagtgaaacactgcgccatgagggcggtagccagtgaaaaagcagcccggccccatttccctccattgattacaaataatcggttcaacagctgctgtattactaatggcaagccaagaaatgtggagactgaatcttcgaaaatctttaaattaataaaactttagatctcatcttcaaattatcaagtaggatcaagattcctggagtgcacttaacaatttgcattgatgcggcttaaccattgctctttgtaaaaaaaaaggtccatgttatcctgtctgaaattctctacagctgctgagctctgctcctctagtttagatcagcagaaagctacatatctgtcctcattatcttaatctgacccagatatcctccaccaaactgtgttttaattttctctgcctttaacttttatcagggttagaatcagcaagctgctatagaaagagcatctgcattttctgcaaaactgttgtgaaagacattgcccaatttgttactatccatcgtataacgaaccatgtgttaagttccttctagaattcagctttaggaaaaggtttctttgtgctggtaaactggttttgtttcctttcatcaaaaatgtcctacataatcctttatacatttccatttcagtgattatgttgattatatgtttttgcttgttgtccagctgaaatccactttacatagagatagattgtgaattataaaggaaacatctcacattgtcttcttccttgtctaggcacggccggcagctgcctgcgcaagttcagcacaatgcccttcctgttctgcaatattaacaacgtgtgcaactttgcatcacgaaatgactactcgtactggctgtccacccctgagcccatgcccatgtcaatggcacccatcacgggggaaaacataagaccatttattagtaggtgagtcgagcatctgtaggaacaaatgcaaaattgaagaggaaaagtctctagtctggacaagcatatgttttctatttttctccaaaacgttgaatccattgccatttagcttattatttgtgatattcgagttttgtaatggaaatctaccataaaaattatttgacataaaagtcagttggctgggcacagtggctcatgcccgtaatcccaacactttgggaagccgaggcgagagggttgcttgagctcaggagttcaagaccagcctgggcaagatgacgagacttcatctccacaaaaaatacaaaagttagctgggcgtggtggtgtgagcctgtggtcccagctacgagggaggctgaggtgggaggatcacttaagcctgggatgttgaggctgtagtgaactgagaccacaccactgcactcctgcctgagcaacagagtgagaacctgtctcaaaaagaaaaaagagtcagctattctcttttaaaattgtggtgcaaaaccatggtgagataatgccaggcttgcagagataatttatattttgcctgactcactgtggtggttgcctttcctcctgtgagcaaggtgatgccactcgattcttcagcaagcgttggaacagtgttgctcaatctttctttttaaaaagtaacagcttccccaaggagccttttaagacattgttttctgaatcatccctgcccctatgaatttttttttttttttttgagacggagtctcgctctgtcacccaggccggactgcggactgcagtggcgcaatctcggctcactgcaagctccgcttcccggggttcacgccattctcctgcctcagcctcccgagtagctgggactacaggcgcccgccaccgcgcccggctaattttttgtatttttagtagagacggggtttcaccttgttagccaggatggtctcgatctcctgacctcatgatccacccgcctcggcctcccaaagtgctgggattacaggcgtgagccaccgcgcccggccccctatgaatttttttaaaagttatttttaattttggtaaaatggacataacataacatttaccatcttaataatttttcagtgcacagtgtagtggcattaagtacatttgcagtgttgttttaccatcaccgccatccgtctcctgaacttttttattttcccaaactcaaactctgtccctgttaaacactgactccacatccctcctgccagcctctggtgaccccccattctactttctgtccctgtgaatttgacccccgtagacacctcatgtaagtggaatcatacagtatttttccttttgtcactggcctgtttcactcagcataatgtcctcagggttcatctatattatagcatgtgataggatttctttcctacttagggccaaataatatttcattgtgcataggtgccacgttttgtttctccattcctctgtcactggacacttaggttttgtccacacctcagctattgtgaacaatgctgctatgaacatgggtgtgaaaatatttctttgagagcctgcttttaattgttctggaggtacacccagaagtagaattgtgggatcatgtggtaattctatttttagttatttgagaaacctccatgctgttttccacagtggccacaccctttacattcctgccacagcgcacagggtcccagttgctccacgtcctcaccagcatgcgttgttttctgcgtttttgatagtagccatcccaatgggtgtgagggggcccctatgaaatcgtaataccgcagacatactgtgtatctcctctgtttgtgtattgtatgtatatctgtgctttatacataaaattatacagatttatacataaaaagttatacaataatacacacactccccagttccaccagtttttgctcccttgggtgatattgtacccatcgaaaatgcatgtgttggactgagcgatctcccttgagtgtttatccgcactaatatctgaagtacgttttcaggccccaggagcctccctgataggaagtaagatggaaaactgaaattattaccactgaaaataacatgactgtcctctctttgcctctttccttctaattaaaagtttattgctggccaggcacagtggctcacgcctgtaatcccagcactttgggaggccaaggcaggtgaatcacctgaggtcaggagttcgagaccagcctggccagcatggcgaaatcccatctctactaaaaatacaaaaattagctgggtgtggtgttacatgcctgtaatcccagctactcaggaggctgaggcaggagaattgcttgaacccagcaggcggaggttgcagtgagccaggatcgcaccattgcactccagcctaggcgacaagagcaaaactctgtctcaaaaaaaaaaaaaaaaaaaagtttatttcttagaaatattcagaaataataggaaagtggccagtgaacaaattcatttgactaagaagctattccgtaattttactttttacatattaagataatgataaaaaaagatacaaagttttttatattccctttaaagaaatcagcagtctttgaatatgaagaaagatgtagcagtatcaggtaggaagtgccctacattcaacagaaaagggaaaagggaagcaaatgcttggagtcacccctggagctcctgcccagctgccccaggctgtgcctttagcccaactcctttcattagatgaacatgccctgtttgggggaagaccagggttacgtgccaggcaattcctggcagatgacaatttagtgagagagctatgccacgtgggaccatggaccagagggctggaaggtgcctcctatgtaggaaaatcttagatctttgatccccttacattaaaatatctactgacagttttctttgattttttttgagctataagaaaacttattttataggtcttaaaatggagaatatcattcattacacttccagaatggcacttttcagaatgcaggcaatacttcacctgtgtgagtggctgccagatattgactgttttgagacttttcttgctcagaaccatgcctgataactagaaggaaaagtaacaacttttgtgggtttctttttttagcttcttttacacaacaggtagaaaaagactattcattgataggtttcctgtttactttcttggcaatgttgacatttgaccttgattcagagctccttgacaggagctctggcatgccctggtggtagtccaaaaacaggtctcagagaagctgtgtgtctgagaccagcatttctgtgtgatgcattcctctcagtaaaacacccctggtctttgagcaccaagagtctaagtctctgtatgttttgatcctgagatgagcttctaaagccaacggggaggtgctaaaccttagagtctaagcaatggggcacagcatttcccacttaacatgtcattggaccagaaagtcctgaaatgtcccaggactttacatttccagatttttatgtcttcctgttagttgacacatcgaagctcagcatgaagggaccttcccaggcatgtacttgaagctgctgcttttgcatcaagtctgcctctacttccctctcgtagagaggctgcccctttgtccctgtctctgagcaagcaggtttccacggttactgaacttagtggtttccacgacttctcaggacttacaggttccttctcagctcttccctttagggaggtccgaaagctaaattttagaaacagcaaatgacacaaaagccttcgttttgagcagaaaaggtggcagttttccagctttcatccgatagtagggcacaattttctaagtactttctagctttctgcagacaagactcacgaaataaatactgattgctaattgctctgacgaaaagaccgctggattgagagcaaggagaactgcattttcgttctgtcttggacacaactaaccctggccttagtttcttcatatgcaatatggagaatttggccatgtgaattttaaggaatcacacagctctttaagcctgcaatggggcaggacccttgaatccctcagcccagagacagtctgaaaaagacaaaacccttccctccaggctgtatttctaggtctcgtgtctagcaaacagatggtggcagatgtataaggccaatttcagtcactgttgtttaactgaaccttttaattcatctgcatttgggtgaataaaatagaaaattgcacacaccacacatacacacacacacagacagacacacacacaagtccatggaaaatcaaatgactcattcagccctattcccccttctgatccacgttcatgcaaatgtcccagtataactaggtgtaattattgacaccatttatagtcatttatcagcattgttaacactctgttcattttgtgacttgaatgtaattattcactgttgacgtttaatttttttttaaacaaagcattatcccaccatcaagggttcccttcattgagagggtcttagtcagaacactgtgctgttttaatgtgtttctggtgcagtcccaaggctgagctgaatcagcctggcttgggaggcatcctgtccttgggagggtcctctggaggtcacttcagcggcagtggatgctgacagccttggaccttggacatctgagccaagagggcagaccaaaaagacaagtttcccgcaggaggcccatgtggacattcagccttaagttcattaaagcatgcattatttgtcttagttactcaactcactaagtgcatttcttatactaaagattattagtagcttcaaactgttgcattccagaaggagtagctcttggatttcaccagcattttttctgaagcatttattgtgcttgtggaaatacgtatgcattgttgaaagattggaaaacactcaaatgcccaaagaagaaaagttgcctgtaaccccagcccctccaggagagccactgttagagctttgccttcctattttccccttctacaagacagacagttaaataactcgtgttggatctattttttaaacaatattttaggggcaggtctcgctatgttgcccaggccgtagagcagtggcccacaggcaggccgagcatagctccctgcagccttgaactcctggcctcaggcagtcctgcctcagcctccccagtagccaggactacaggcctgtgtcctgctctaattttttttttgagacggagtttcactcttgttgcccaggctggagtgcattgacacaatctcggctcactgcaacctccgcctcccaggttcaagtgattctcctgcctcagcctcccgagtagctgggattacaggcatgtgccaccacacccagctaattttttgtatttttagtagagacagcgtttctccatgttggtcaggctggacttgaactcctgacctcaggtgatccacccgcctcggcctcccaaagtgctgggattatagacatgagccaccgcccccagccatcctgctctatttttgaattgaatgttttaatactgagacaggcttataaaaccaacggggaggtactaaacctcagagtctaagcaatgggcacaatgttttctacttaatatgtaattggaccagaaagactgagtgaggatgttgagtgtaggtaacggggcagtgcatggagggcggcctctgccctgcaccccggctgtgctgagtgtctctgctccacttccaggtgtgctgtgtgtgaggcgcctgccatggtgatggccgtgcacagccagaccattcagatcccaccgtgccccagcgggtggtcctcgctgtggatcggctactcttttgtgatggtaagtgtctggggagacgccatatttcccgggaagagccccactcacgccccatagtcgcctctgtctggtgcctccacaccttggagttctctgcatctcgctgcttaagcccctccttcttcctccaaccatccccttccaaagcatgcctcaaagcctggcctgccctgcctggtgacagcaggggtctccagcaccagccagaaccctcccctgctcacagccaaggtagctgggatgagcatcttcctggaaatgcaggcccaggcctctgcttccctgtggctgctccactcaggtgctctacgggtctgttccagcaccagcaatatgaacagcttctctatacaaccagcttctccatacaaccagcttccctatatgagcagcttcttcatatgaccagcttctccatatgactagcttctctgtatgaccagcttgttcatatgaccagtttctctatatgaccagcttccatctttgagcagcttctctatatgaccagcttctccatatgactagcttctctgtatgaccagcttctccatatgactagcttctctgtatgaccagcttctccatatgactagcttctctgtatgaccagcttctctctatgagcagcttctgtatatgaccggtttctctatatgagcagcttctccatgtgaccaacttctctatatgaccagcctctttacatggagtggaggcctctttcagggaaaggaggaagagagcctccacgtggggagtacacattctactacaacatgcacgagcttgaaagcagaagcttgagttagggagagaacacccgagggctggccgtggcctccacgaaggccctcctggggcagtgccgcctgggacccttcccagagggcaaggactgctctcctagccccagggcttccctttcccacaaaagccaactgaaacagaaaacaaggcccctgtttgatacactcattgtagcttattttattctattaccccagttggcagtattgattgaatatatacaagccgtgaacttgtaagatcagagttatcccggaatttgccaattcccagtaaatgaccctacacatacatctgcaccatcattggaagtcctagtcccatcttcacactgtcaggaatgggcaagttgtacatttgacccacagatgaacattatttattatctgattgacaggcttcatagctattttcttctgtaaattattccaattgtagaaaaaattggcgggaaagcatttttttaatgtttgagtgaggacgctgagggtagataacaaggtaactcacggatggtgtggcgtctgccctgcgccccagccgtgtggagggtctctgttccaccttccagacgtgctgtgtgcgaggcgcccaccattgccatttccttctactggttttttcttgtgcttttctacacatttttccaagtgtagaaaaagttggcaggaaagcaatttttaaaatgttcgtgcacgtgtacaagtttgattgtatgatttgctgggttgattgtactgcagctacactcttcatgttgcaaccaccagattaacaggttgttgcaataattcgaagtgctgcattgtaactactttatcgagagagccagaaaggttgaaaatgctgtatagagaaatcaggacactaacaatgatgtaagcttgccatgttcattaaaaggtagattggattcgccactccataatcataagaaatactgagtggaatctctgtgtgtcagagaaagcccacagttgcattgaggacccacaggaaagctgttgtcaccaccaacccttgtccgggtgtcaaaaggcctgaaacagtgattgcccataatttgtctaaatcaggagcaaacgaaaatagtgacgttctagagaacagtgtcttccagcacctcctctgagttctcaggacggtggctctgatctggaggtctggagaccccgtccttgcctctgctccgccttgaagctatgtgatcctggtcagatccgagaatgtcctcagctgggaatcagtggagttagccttgtcctcaaaggtcccttgtgtctccaaaattctagagttcacatttcctatatctgaaataatagtcacggggctctgttgtaatgtcttagtcaagtttgtatgtcattcattttaaggtcttgatttctgagtacaggaaggtcctacttaaacctgctagaccaaaatgcaatttgatatagtagtagctatttttttctctttctcttgtttttctctctttttaaagaaaaaaaattgaatgattattctttaccttattataagataaatagcatctaatatagcaaatacaggaatgcatttgtaaagtctgattccacatcagttgtttacaacattatttgaacattttggctattgtctcatgacccatgttagaatgggttggagtgtttcaaatctaatacacagtgagctcttctttaaactctaatgaagctgggctggtcacctatttgggaagcagccattagacgatccctggggccatgctgagcaccatggggccccagccatgcaggcactggcttgcgggccagcccgataatttgggcacagagtgtgtcctgtggtgaccacatgaggctgcagtgtgtggctttccagagggaacaccctggcgccttcctgggaaggatcgatctctttcctggtgtttggggagggaacctctgactcacggctcgcatctgttctgcagcacaccagcgctggtgcagaaggctctggccaagccctggcgtcccccggctcctgcctggaggagtttagaagtgcgccattcatcgagtgtcacggccgtgggacctgcaattactacgcaaacgcttacagcttttggctcgccaccatagagaggagcgagatgttcaagtaagtgggagcactgcttttttgcaggctgctggcccctttgtgactttattttttaatcatccgcgatccgtaacaccttccaatgcaaagtctcaaagatggttagcaatgaatatttgatgctgttcgacatgggcagatgaccgagacgattttcaaaggcagaccttcagtcacaggtttaattttttcatttaccgaagaaccatgaaagaaaaaggtcattttccattttttctaggtgagtgtactaaaatgtaattaaagcaactgaaatctccaaacagagcatgtttgaaatacagtatatttaacaatcccggggagaagaagtgagcagcgttcattttcatgccattcataacactgatcgtaatgtacactttgtgtaagttctgagtgacttcacaaggtatttttttagacctgtgcaaataaaaattaatttcagcacaaattcagctgaaactgagagggaagacccttccttccttttccattaccaaaatctcacctttaaaatgactggcccaagtggctactaaccttgctggagttgactgggagccgggccggtccccgaaggccaggaacgcataatgaaccctctatcccgagccccagctgcagccccgctggagccaatgcaggaggctgacggagctggcacagctgcttactgttcatttccaaaacaagcgcttctcacccctggagatgagcctttccatcttcacctttttggagagaattatatggaaccctgctatgatcctgtctctttccagcttagatagtaagaggcagaacaacatacacgcttctctaattcgttactcatccaaaaagtgccgcgtgcctaactggtggtttattggagcctttcaaggaactggaaacttgacatccatgctgcagatagagtttaaccattcactaccaaaatgagcgcactttgttcatgcctcagcccttgcggtgtcctcttataaggttgataggtaatgatgggttttttttttttaaccagcagcctgatacaataaactaaaatgttttcccaaagcaaattaggtaagatcccattaatttaaataataaacttgagggtactagaatttgcaccaaaagttaataaaataagcagcctcaattttaggatgaggcactctcataaatggctattttaatttagtttaattaatttatttattttaatagaattttctcagtaacaattttagttcagattttaccttttcaacaatcaaaataatgtagagtttctaagcttgagaaacacttgggacattgaatgtctttccctctttttggtctcaaagcagaccatctgcatagaaatccttcaaaagttataaaagtatttcgaggtctagggaattactccagatttattactcatcacatcattccacaaatatttaatgaatacttactgtgtgtgtaaagtgttgcagagaagaataatatcttcttcttaccctggaggagtttatgatctagtggaggagaatggaaaaaaagtgaaattgtagtacgaggaggcagggtggcacagaggggaatggccaaggcttcggagccagactgatgtggcgggacttcagctgtgccctatggggctgtgggcactggggcaggtgccagggcctgggtgtgcagctggtaacctgcagtgttctgtgtgcgtgggaccgtgtgtgcactgcacccagcacctgcctgctcactgggtggtaccaggttgaggcctgatgccaggggctgggctgatcccttagagatttccgagcagggcaggagtgccatgtttctgacgtgctgtgagatgatggccaatggtctgtctctgtgtcgtgttttaggaagcctacgccgtccaccttgaaggcaggggagctgcgcacgcacgtcagccgctgccaagtctgtatgagaagaacataatgaagcctgactcagctaatgtcacaacatggtgctacttcttcttctttttgttaacagcaacgaaccctagaaatatatcctgtgtacctcactgtccaatatgaaaaccgtaaagtgccttataggaatttgcgtaactaacacaccctgcttcattgacctctacttgctgaaggagaaaaagacagcgataagctttcaatagtggcataccaaatggcacttttgatgaaataaaatatcaatattttctgcaatccaatgcactgatgtgtgaagtgagaactccatcagaaaaccaaagggtgctaggaggtgtgggtgccttccatactgtttgcccattttcattcttgtattataattaattttctacccccagagataaatgtttgtttatatcactgtctagctgtttcaaaatttaggtcccttggtctgtacaaataatagcaatgtaaaaatggttttttgaacctccaaatggaattacagactcagtagccatatcttccaaccccccagtataaatttctgtctttctgctatgtgtggtactttgcagctgcttttgcagaaatcacaattttcctgtggaataaagatggtccaaaaatagtcaaaaattaaatatatatatatattagtaatttatatagatgtcagcaattaggcagatcaaggtttagtttaacttccactgttaaaataaagcttacatagttttcttcctttgaaagactgtgctgtcctttaacataggtttttaaagactaggatattgaatgtgaaacatccgttttcattgttcacttctaaaccaaaaattatgtgttgccaaaaccaaacccaggttcatgaatatggtgtctattatagtgaaacatgtactttgagcttattgtttttattctgtattaaatattttcagggttttaaacactaatcacaaactgaatgacttgacttcaaaagcaacaaccttaaaggccgtcatttcattagtattcctcattctgcatcctggcttgaaaaacagctctgttgaatcacagtatcagtattttcacacgtaagcacattcgggccatttccgtggtttctcatgagctgtgttcacagacctcagcagggcatcgcatggaccgcaggagggcagattcggaccactaggcctgaaatgacatttcactaaaagtctccaaaacatttctaagactactaaggccttttatgtaatttctttaaatgtgtatttcttaagaattcaaatttgtaataaaactatttgtataaaaattaagcttttattaatttgttgctagtattgccacagacgcattaaaagaaacttactgcacaagctgctaataaatttgtaagctttgcataccttagatta

SEQ ID NO: 1495 - DNA, 3561 bp, Homo sapiens
tctgttctgcagcacaccagcgctggtgcagaaggctctggccaagccctggcgtcccccggctcctgcctggaggagtttagaagtgcgccattcatcgagtgtcacggccgtgggacctgcaattactacgcaaacgcttacagcttttggctcgccaccatagagaggagcgagatgttcaagtaagtgggagcactgcttttttgcaggctgctggcccctttgtgactttattttttaatcatccgcgatccgtaacaccttccaatgcaaagtctcaaagatggttagcaatgaatatttgatgctgttcgacatgggcagatgaccgagacgattttcaaaggcagaccttcagtcacaggtttaattttttcatttaccgaagaaccatgaaagaaaaaggtcattttccattttttctaggtgagtgtactaaaatgtaattaaagcaactgaaatctccaaacagagcatgtttgaaatacagtatatttaacaatcccggggagaagaagtgagcagcgttcattttcatgccattcataacactgatcgtaatgtacactttgtgtaagttctgagtgacttcacaaggtatttttttagacctgtgcaaataaaaattaatttcagcacaaattcagctgaaactgagagggaagacccttccttccttttccattaccaaaatctcacctttaaaatgactggcccaagtggctactaaccttgctggagttgactgggagccgggccggtccccgaaggccaggaacgcataatgaaccctctatcccgagccccagctgcagccccgctggagccaatgcaggaggctgacggagctggcacagctgcttactgttcatttccaaaacaagcgcttctcacccctggagatgagcctttccatcttcacctttttggagagaattatatggaaccctgctatgatcctgtctctttccagcttagatagtaagaggcagaacaacatacacgcttctctaattcgttactcatccaaaaagtgccgcgtgcctaactggtggtttattggagcctttcaaggaactggaaacttgacatccatgctgcagatagagtttaaccattcactaccaaaatgagcgcactttgttcatgcctcagcccttgcggtgtcctcttataaggttgataggtaatgatgggttttttttttttaaccagcagcctgatacaataaactaaaatgttttcccaaagcaaattaggtaagatcccattaatttaaataataaacttgagggtactagaatttgcaccaaaagttaataaaataagcagcctcaattttaggatgaggcactctcataaatggctattttaatttagtttaattaatttatttattttaatagaattttctcagtaacaattttagttcagattttaccttttcaacaatcaaaataatgtagagtttctaagcttgagaaacacttgggacattgaatgtctttccctctttttggtctcaaagcagaccatctgcatagaaatccttcaaaagttataaaagtatttcgaggtctagggaattactccagatttattactcatcacatcattccacaaatatttaatgaatacttactgtgtgtgtaaagtgttgcagagaagaataatatcttcttcttaccctggaggagtttatgatctagtggaggagaatggaaaaaaagtgaaattgtagtacgaggaggcagggtggcacagaggggaatggccaaggcttcggagccagactgatgtggcgggacttcagctgtgccctatggggctgtgggcactggggcaggtgccagggcctgggtgtgcagctggtaacctgcagtgttctgtgtgcgtgggaccgtgtgtgcactgcacccagcacctgcctgctcactgggtggtaccaggttgaggcctgatgccaggggctgggctgatcccttagagatttccgagcagggcaggagtgccatgtttctgacgtgctgtgagatgatggccaatggtctgtctctgtgtcgtgttttaggaagcctacgccgtccaccttgaaggcaggggagctgcgcacgcacgtcagccgctgccaagtctgtatgagaagaacataatgaagcctgactcagctaatgtcacaacatggtgctacttcttcttctttttgttaacagcaacgaaccctagaaatatatcctgtgtacctcactgtccaatatgaaaaccgtaaagtgccttataggaatttgcgtaactaacacaccctgcttcattgacctctacttgctgaaggagaaaaagacagcgataagctttcaatagtggcataccaaatggcacttttgatgaaataaaatatcaatattttctgcaatccaatgcactgatgtgtgaagtgagaactccatcagaaaaccaaagggtgctaggaggtgtgggtgccttccatactgtttgcccattttcattcttgtattataattaattttctacccccagagataaatgtttgtttatatcactgtctagctgtttcaaaatttaggtcccttggtctgtacaaataatagcaatgtaaaaatggttttttgaacctccaaatggaattacagactcagtagccatatcttccaaccccccagtataaatttctgtctttctgctatgtgtggtactttgcagctgcttttgcagaaatcacaattttcctgtggaataaagatggtccaaaaatagtcaaaaattaaatatatatatatattagtaatttatatagatgtcagcaattaggcagatcaaggtttagtttaacttccactgttaaaataaagcttacatagttttcttcctttgaaagactgtgctgtcctttaacataggtttttaaagactaggatattgaatgtgaaacatccgttttcattgttcacttctaaaccaaaaattatgtgttgccaaaaccaaacccaggttcatgaatatggtgtctattatagtgaaacatgtactttgagcttattgtttttattctgtattaaatattttcagggttttaaacactaatcacaaactgaatgacttgacttcaaaagcaacaaccttaaaggccgtcatttcattagtattcctcattctgcatcctggcttgaaaaacagctctgttgaatcacagtatcagtattttcacacgtaagcacattcgggccatttccgtggtttctcatgagctgtgttcacagacctcagcagggcatcgcatggaccgcaggagggcagattcggaccactaggcctgaaatgacatttcactaaaagtctccaaaacatttctaagactactaaggccttttatgtaatttctttaaatgtgtatttcttaagaattcaaatttgtaataaaactatttgtataaaaattaagcttttattaatttgttgctagtattgccacagacgcattaaaagaaacttactgcacaagctgctaataaatttgtaagctttgcataccttagatta

SEQ ID NO: 1496 - DNA, 311 bp, Homo sapiens
agtgctctgtgagagtcatgaactaatttacccttagatgaagtgaccttctctgcaggtcaccatccccacgcccaccagcaaggtgtagggttgactcagattgaagagtgcagagccgttgcacccctgcagtgcgggcccctggctccaccccgacctcaggctctgaccctaaggagaggcaggggtgacctctggtgtccttcacagatgcaggatccttacttccccgcacttagaccctgtggaaaggagaagccagatttcacaagatgtgggggcctaaccacgggaagcaccagcatgca

SEQ ID NO: 1497 - DNA, 1671 bp, Homo sapiens
ctcttcctcagtttctacagatgacttcattcccctatttcacagagaagataaagccaagggatgcaggaactgggtaacttcctgttacacccacagacgaagttatgtcaacgtagctttcctttacttttcagtctccagatcctgttctcttccagtttttccagaggctttactccactattatcttctttcaggtgttcaacctctgcccctctccctttcctcttaccctgtaaacttactgaaacctcatccctaaattcaaccctcatcctctagattaccagtctaacctctttctttcccttcgcagccaaggtccttgaaaatgtagttgtccatcactgtctctgcctcttcatctttcatttattcacagtccactgtgcagtcatttctacatataccatataccatacagcccaaactgctctgacaaatacatgacctgttattaactagcagttaagtaccaaatccagtgggcacatttcagtccttacgatttatgttgcatgtactaatagtttgttcttgttcattgtattaatatatcacaactttaaaaccctcttcacctgttgatggacatttaggttgtttgcagtttttggttattacaaataaaattggaatgaatattcatttacaatatttctgtggacataggctttcatttctcttgggtaaatacctaggagtggaatgactggttcaaattatatgttcaagcttaaaagaaactaccaaactgttttccaaagcaatcgcaatttgcattcccaccaacaaggtataaaagttccagttgcttgtgagcatttggtgatatccaattttttcttcctaattttagccattttaataggtatgtaatactgtttatagtggttttgcatttccctaataactcaagatgttgagcatcttttcaagtgcttattagctgtctctgtatccttttttgtaaagtatctattcaagcctttgcccatattttaattgggtggctttcttaatagtaggttttgaatgatctttacatattccggatataaatcctctttcagatacgtgatttgcaaatattttctcccagtctgtagttcctttttaaaaaaattctcctgagtgtcttttgcaatacaaacattttaattttggtgaagtccagttgatccactttttcttttcagatcataacttttggtgttaaatctagaaactctttgcctgacccaggtcatgaagaattctgcgttttcttctaaaagttgtatagtttaatggtttacactgaagtctgtatttcatgtttgggttagtttttgtactagatgtgaagtttaggtagacctttatttttatttttatgttttttacaaaaagaacatctattcatttattgaagttttaacaatttttatgtacatggacaatgcttgcacacaaagtcagcattctaatgcactttcatggagtcaaatttgcaaaacatgcataaaacaaattagaactctctaacagtctctatgcaatttatatctccagtattggaaatgatgtgaagattaaatacatggcacagagaattgtttaaaaaaaaaaaaaggctgacaattaaaagtagtggaaaaaaatttttaaaagaaaaaactaaaaaaa

SEQ ID NO: 1498 - DNA, 117 bp, Homo sapiens
ctgggcatggtggctcacacctataatcccagcactttgggaggccatggcaggtgaatcacctgaggtcaagagtttgagaccagcctggccaacatggtgaaaccccacctctac

SEQ ID NO: 1499 - DNA, 677 bp, Homo sapiens
gtctcactgtcttgaactcctggactcaagtaatcttcccatcttggtctcatgagtaactagggctatgggcatgtaacaccaagcctggctaatttttttattttaaaatattttgtgtagagacgagatctctctgtattgcccaggctgctctcagacttctggcctcaagtgatcctcctgcctcttttcccaaagtgttgggattatataggcttgagccactgcacctggtagttagcagactatttattgaaggcctgtatactaggctttgagtcctgagggtagactgggaacaaaattaatatcatatgaagcaggtaagacagacatttaacacattattttttaaaaaaagtttttcagggatggggtctcattatgttgcctaggctgtccttgaactcctaggctcaagcagtcctcttgactcagcctcccaagtagctgggactacaggtatatgccactgggcctggcttaaacaaatcattttaaatgtgcagtcttttaagatagtctacctagattcacattctgctgttttttattggccatgtgcctttcggcaaattgctttactgctttgtgtctcagctttctcttctataacataggggttataatggtacctatcttaggttcttatgaaaattaaatgtgataatgtg

SEQ ID NO: 1500 - DNA, 331 bp, Homo sapiens
ttacaaactcagtgaatctagcttcatcagggtcctcccacacatcccctttccaagttgcagggtcccatttttttccaatcagtgccttcactttaacagtagacacctggtgaggctgtgcatgcaccttttgttgcagatcagccactcaaatgataagagtttgtctctgtgtttccacaattttagctctttctctataggagataagaccctcactcagggcaatcttagcagttttgaggctcagtatctgcttctgggagatggaatccctgagttcatcattttctttcatcaccttgttcactgaacttaggagcaacca

SEQ ID NO: 1501 - DNA, 661 bp, Homo sapiens
ttttaacatttttaatgtactggtattgccatttgtagcagatgctgattttaagttaaacaatacatgtcatgctataggtcaaatattggggctctgggtgtgtaaactggctcaagtctggaaattgattgaggggccgtgattctgttttaataattcaaattagtattttgtccatttgacctagaagttttctgcttgtataaattaagtgggaatgcagtaggcttcctatcagtttcacttccaggaacaccataattaattagccaatgcccaagttctacacaagtcagactattctgattgctgctttgcttctgctgtccattacagtagctacgcccaccttacctttgatagttgagtgccgtcacttggcccctgctacctccggatccagttattcccattttgtatttaaattttgtagttgagtgactgaggttcccactgttagatctgacatacagagaagtgcaattatagggttcttcaaagatgtagctgctgcccttgtaaatctgttttgcaaggcatcagtcaagggtatatcttctggaccctcccagctgggatgagtaggtctaaagtgactaatccactccaccttctgaatctccctaagcctttggatcccttcctctacattaaacca

SEQ ID NO: 1502 - DNA, 442 bp, Homo sapiens
aggaaacaagcctgttatgccttcaccaaggcagggcagagctggataagggtgaacagaaagggacaaattattgatgagagttctgtgagtagaaactcctttctcttctttagaatttctgcctccagtttgttaatgccacttccaaaatacactgctctgagctgaagataatactgcatgcagatagagtgccatgaaggcattggtttgcagtgatctataaaggactaatgtgccaggctctgtgttaagtgcttgactttcaccaccttgtttacccctacaacaacaatttttaaattgccctattaagatatagagcattctatcattctaaaatgtttcctgtgattcagtatatatttatttactttttggttgatttattgagtgaagaactgaaaatcactttatgggtagtatatttccttttttg

SEQ ID NO: 1503 - DNA, 1050 bp, Homo sapiens
ccactgcaacctaagcctcccaagttctagccattctcctgcctcagcctcctgagtagctgggactacaggcgcccgccaccacgcctggctaattttttgtatttttagtagagacagggtttcaccgtgttagccaggatggtctcaatctcctgacctcaggtgatccgccagcctcggcctctcaaagtgctgtgattacaagcgtgagccactgcacccagccaaaggcagtcttttagaaggactgagacttacaagaggctaaaaaggaaatctcaaaattttcgactcatcattcatatatatatatatatagatagatagatagatagatagatagatacacatataaataatgagtttctaggtcccttggttcacctccattgtaagtgaatttagttttcttttggctgcagtattaagctgtgtatgttgtacatatgtggtcatgtttttgcacctacagggagaactttggagtcaaatctgtgttatataaggaaggagaagtgactactggccaaacaggaaaccataggagagcacagatgaggcttgcagattcagattcatgaggatgagtgctaccctgatgtttcagtgcctgaggcagggtgttgaagcagctccacttcaaaaagatatatttgaggagtaaaagttacttggggtatataggaattcacatatgtgctccattatgatttaatggaattggttttgtttttctgtgtagttttggattcctcagaaacttgaatcagaccaggaccctgttggcctcttgatccctttggggctctgcttgtgagtagcagcctccctgtacctccctcattgtggcagtcagagttcaagccctcattacaggaatgatcataataattatactactgaagataatagcaagaataatatatatgtcaggcagttctaaaagtttgacaaatattatctaatatccttaccgtagccttttgccgtgggtgctgttattgtctcctccctaccaaaaattactttattaaatcctcatctcca

SEQ ID NO: 1504 - DNA, 627 bp, Homo sapiens
agtattaagctgtgtatgttgtacatatgtggtcatgtttttgcacctacagggagaactttggagtcaaatctgtgttatataaggaaggagaagtgactactggccaaacaggaaaccataggagagcacagatgaggcttgcagattcagattcatgaggatgagtgctaccctgatgtttcagtgcctgaggcagggtgttgaagcagctccacttcaaaaagatatatttgaggagtaaaagttacttggggtatataggaattcacatatgtgctccattatgatttaatggaattggttttgtttttctgtgtagttttggattcctcagaaacttgaatcagaccaggaccctgttggcctcttgatccctttggggctctgcttgtgagtagcagcctccctgtacctccctcattgtggcagtcagagttcaagccctcattacaggaatgatcataataattatactactgaagataatagcaagaataatatatatgtcaggcagttctaaaagtttgacaaatattatctaatatccttaccgtagccttttgccgtgggtgctgttattgtctcctccctaccaaaaattactttattaaatcctcatctcca

SEQ ID NO: 1505 - DNA, 151 bp, Homo sapiens
ggttcaagcaagtctcctgccttagcctcctgagtagctgggattacagacgcatgccaccacgcctggctaatttttgtatttttggtagagacagggtttcaccatgttggtcaggctggtctcgaactcctgacctcgtgatctgccc

SEQ ID NO: 1506 - DNA, 151 bp, Homo sapiens; identical to SEQ ID NO: 1505

SEQ ID NO: 1507 - DNA, 198 bp, Homo sapiens
gccattctcctgcctcagcctcctgagtagctgggactacaggcgcccgccaccacgcctggctaattttttgtatttttagtagagacagggtttcaccgtgttagccaggatggtctcaatctcctgacctcaggtgatccgccagcctcggcctctcaaagtgctgtgattacaagcgtgagccactgcacccag

SEQ ID NO: 1508 - DNA, 389 bp, Homo sapiens
gcttgttttaccagttaaactaattttctgagtttcgatattttatctgcacaatcatttcttatagaaagttcagtttgattaagaactgttttgagctaaatttgagctaaaaatactttcgcaatttcttgttgctgacaactctgttgaggtaggtaacgtactggttttaaaggagagtaaattaaaggtagagattattttgtccaaggtcacggccagcagagctgctgttgaaaatccagaatatctgagaccattgctcaatttactctatttgagctgttttctcctcatcttttcagtaagatactatagttttacaattttgtttgttttgtttagttttgaggtggagtctcactctgttgcccaggctggaatcc

SEQ ID NO: 1509 - DNA, 389 bp, Homo sapiens; identical to SEQ ID NO: 1508

SEQ ID NO: 1510 - DNA, 341 bp, Homo sapiens
gtaccaccattgacttaggtttttaaaccagaaacctaggatttagcttcaattcctcactttttctgaattttcacatccagtccatcagcaaaggcctttccattccagctacaaaaggtatcttctatccttctatttctctccatctccactatcatacctcagtctaggctaccagcatttctcagctgagatagacaaatcagctccaaggccttgtgtgatctgctgcctgcctcttttcagtctcaccatgtatcattctcccctcgttcactagacttcagccacaatgaccgtctttcagttctttgaatagacccagctctgtccctcta

SEQ ID NO: 1511 - DNA, 341 bp, Homo sapiens; identical to SEQ ID NO: 1510

SEQ ID NO: 1512 - DNA, 532 bp, Homo sapiens
gtagttaacaactattattctctctttgcttcatgtttgtttccttcttggcacttgtgtgcagtcatttcatgtgtctttctgagttttgtctctctcccctactacagtatatactctatgagggcacaagccatttcttgttcactatgttatgcctgccatagagcttggcatatagaagttcctcaagcaatgcttattattgacaagcaggagaaacaagatgaacaaaagcccaaagccagggtatatttaggtatgttcaaagactacataatagtctggtttggcagaagctaagaggagtatggttgcagctctgcatgaagaagtgatgtgtatataaaatactgaaaaagaagagaggcagagggagaaatacaagttagcatgttataatagtactttaaataggaagaagtgataaaaaatgaagttatagctatcagagatactacttttgcaagaatagtttacatggttagaaaacaaattactcagatccttatttactttccagaagtccccc

SEQ ID NO: 1513 - DNA, 220 bp, Homo sapiens
aagaaaaaagaaaatccaattgggcaaacagaaagtatctattgttttgatttgcatttctttggcctgccgctttgaacgtttttcttaaatgcctgacagatatcaacacttaactttatactaatgtctcccacattcgtattactagcccagacccctcctgaccttcagacccatacttgcaacacccttccttcatgggtgtttcacagacatg

SEQ ID NO: 1514 - DNA, 532 bp, Homo sapiens; identical to SEQ ID NO: 1512

SEQ ID NO: 1515 - DNA, 220 bp, Homo sapiens; identical to SEQ ID NO: 1513

SEQ ID NO: 1516 - DNA, 1524 bp, Homo sapiens
ctcaaattccccgaacttgagcactagagtcttcttgttctgatggaatatgttctggaatgtttaagggagaggagaaggatgtctgcaactgaatttcaaatggttcagggaaagataatagagtagaatagactatatagatggagaaagtaaatgtggcaaataacaattggtgaaggtgggtgaaggtcatgaaagttctttgccttacaattaattcttctataagtctgaaattatttgaaaataagagaaatgctttcagctgtgaataacagaaagcctgactacttgtggcttttgcaataaagacatttagttatgtaacataacaggatttaagaggaagaaggcaaggacttgaaaaggctcagtgatgtagctgaggccccagattccttttatcattttgtccaaaggctccaccttcctgaatattactgctttatacccttggagcttcatgatcacaggatggctgttatagctccagccatcatgaccaagttcagactccaggaacaagatggaggaagctatgtcaaggggggcttttcttgatgtgtctctcgcctttaaccagtgaagaaaatcttcttagaaggacacagcagacttctccttatgtctcattatccagaagtggaccacaggacagtccctactgtaaactctttcaagtatcaggcaaaaaggaacaaaaggccccagcctggcttaaaccaaccttgagtcatcacctgacactggacactttgtttatccaagcaaaatcaggattttctgttagcaagcaaaggaactgctcatgggtaagaaattaacagtgtgtgccataattcatatttgtcgccaagcatcttctcaggctgacactgtgccaaacaagggattatagagatgaagatgcagcttccatccctgaaagctcacagtccattctctcagggcaatcccggtaacctcctcatcacaatcatccatccagatcatggaagtccctttactccccaaataagaaggagtagcaggaaaaagtgacctcatcaagctgactcgagtttttccaaaagcaaataaataaataaataactttttaacctgcacagccaaatatcaaataaatacatgtgtgttttttgggggggttggggggtgtttttttttctgagcttcctgtggtattgaaactatctcccacttcctcctttttgtctcaaaagatcttaagcattgggccagacacagtggctcctgcctgtaatcccagtactttgggaggccgaggtgggcagattgctttagcccaggtgttcgagacgagtctgggcaacgtaaaaatagcccatctctaaaaaaataaaataaaataaaatacaaaaattagccaggcatagaggtggatgcatgtagttccagctacctgggaggctgaggtgggaggatcacttgagccccaggggttgaggctgcagtgaaccatgatcatcacatctgggcaacagagcaagaccctgtctc

SEQ ID NO: 1517 - DNA, 1116 bp, Homo sapiens
ctcaaattccctgaacttcagcactagactcttcttgttctaagggaatatgttctgaaatgtttaagggagaggagaaggatgcctgcaactgaatttcaaatggttcagggaaagataatagagtagaatagactctatagatggagaaagtaaatgtggcaaataacaattggtgaatgtgggtgaagggcatgaaagttctttgccttacaattaattcttctataagtctgaaattatttgaaaataagggaaatgctttcagctgtgaataacagaaagcctgactacttgtggcttttgcaataaagacatttagttatctaacataacaggatttaagaggaagaaggcaagggcttggaaaggctcagtgatgtagctgaggccccagattccttttatctttttgtccaaaggctccaccttcctgaatattactgctttatacccttggagactcatggtcacaggatggctgttatagctccagccatcatgaccaagttcagactccaggagcaagatggaggaagctatgtcaagggggcttttcttgatgtgtctctcatctttaaccagtgaagaaaatcttcttagtaggacacagcagacttctccttatgtctcattatccaaaagtggaccacaggacagtccctactgtaaactctttcaaatatcaggcaaaaaggaacaaaaggccccagcctggcttaaaccaaccatgagtcatcacctgacactggacattttgtttctccgggcaaaatcaggattttctgttagcaagcaaaggaactgctcctgggtaagaaattaacagtgtgtgccataattcatatttgccaccaagcatctcctcaggctgacgctgtgccaaacaagggattatagagatgaagacgcagcttccatccccgaaatctcacagtccattctctcagggcaatcccggtaacctcctcatcacaattatccatccagaccatggaagtccctttactccccaaacaggaacgagtggcaggaaaaagtgacctcatcaagctgacttgagtttttccaaaagcaaataaataaataaataactttttaacctgcacagccaaa

SEQ ID NO: 1518 - DNA, 2330 bp, Homo sapiens
ctcaaattccccgaacttgagcactagagtcttcttgttctgatggaatatgttctgaaatgtttaagggagaggagaaggatgcctgcaactgaatttcaaatggttcagggaaagataatagagtagaatagactatatagatggagaaagtaaatgtggcaaataacaattggtgaaggtgggtgaagggcatgaaagttctttgccttacaattaattcttctataagtctgaaattatttgaaaataagagaaatgctttcagctgtgaataacagaaagcctgactacttgtggcttttgcaataaagacatttagttatgtaacataacaggatttaagaggaagaaggcaaggacttgaaaaggctcagtgatgtagctgaggccccagattccttttatcattttgtccaaaggctccaccttcctgaatattactgctttatacccttggagcttcatgatcacaggatggctgttatagctccagccgtcatgaccaagttcagactccaggaacaagatggaggaagctatgtcaaagggggcttttcttgatgtgtctctcgcctttaaccagtgaagaaaatcttcttagaaggacacagcagacttctccttatgtctcattatccagaagtggaccacaggacagtccctactgtaaactctttcaagtatcaggcaaaaaggaacaaaaggccccagcctggcttaaaccaaccttgagtcatcaactgacactggacactttgtttatccaagcaaaatcaggattttctgttagcaagcaaaggaactgctcatggataagaaattaacagtgtgtgccataattcatatttgccgccaagcatcttctcaggctgacactgtgccaaacaagggattatagagatgaagatgcagcttccatccctgaaagctcacagtccattctctcagggcaatcccggtaacctcctcatcacaatcatccatccagatcatggaagtccctttactccccaaataagaaggagtagcaggaaaaagtgacctcatcaagctgactcgagtttttccaaaagcaaataaataaataaataaataactttttaacctgcacagccaaatatcaaataaatacatgtatgttttttgggggggttggggggtgttttttttttctgagcttcctgtggtattgaaactatctcccacttcctcctttttgtctcaaaagatcttaagcattgggccagatacagtggctcctgcctgtaatcccagtactttgggaggccgaggtgggcagattgctttagcccaggtgttcgagacgagtctgggcaacgtaaaaatagcccatctctaaaaaaataaaataaaataaaatacaaaaattagccaggcatagaggtggatgcatgtagttccagctacctgggaggctgaggtgggaggatcacttgagccccaggggttgaggctgcagtgaaccatgatcatcacatctgggcaacagagcaagaccctgtctcaaaaaaaaaaaatctaagcatccattcattttagttcatttgaggataattattgacctcctcttctaccaccactagggatacagaggaggagcaaacagacattattccttcctcttgaggctcacagttaattggtaaagagggaccactattcagaaagtcccacacatcattgtatgatcaaaagctatgacagatgcaaggaaggaaagctggatggtgttgtgaggcttcatggcagggacaccagacctggtctagaggtgagggaagacttccctgaggcactggcttgaatggagagctgaaggaggaataggaattcactagaagaaagaagaggaagcagcaagtgcaaggccctcctgcagcaggagggagcatagcacattcaaggaaaagaagccagcagtgtggattacagaggaagagtgcagcacgagggcagtggcttgagatgaggccagagaggagggcacgcaggaccaaggggaccaaggcaaggattttggtgtccatcaaattggagagtgctgagcaggggaggggtaaccgtgtaattgcctttctcaaatgcccgttttaccatagcaaggacagactggtagaagcaagggatgaactggagagatgagtgaggaagctgctccagaagacccatcaggagatgacggtgacagggaattgagtggtagcaatgacaatgggaagagatgagcagaatccaggtatttgtgggtagaagtggcaggtgtggctacttattggagatggggctgtagggctgtgaaggtgtga

SEQ ID NO: 1519 - DNA, 2332 bp, Homo sapiens
ctcaaattccccgaacttgagcactagagtcttcttgttctgatggaatatgttctgaaatgtttaagggagaggagaaggatgcctgcaactgaatttcaaatggttcagggaaagataatagagtagaatagactatatagatggagaaagtaaatgtggcaaataacaattggtgaaggtgggtgaaggtcatgaaagttctttgccttacaattaattcttctataagtctgaaattatttgaaaataagagaaatgctttcagctgtgaataacagaaagcctgactacttgtggcttttgcaataaagacatttagttatgtaacataacaggatttaagaggaagaaggcaaggacttgaaaaggctcagtgatgtagctgaggccccagattccttttatcattttgtccaaaggctccaccttcctgaatattactgctttatacccttggagcttcatgatcacaggatggctgttatagctccagccatcatgaccaagttcagactccaggaacaagatggaggaagctatgtcaaggggggcttttcttgatgtgtctctcgcctttaaccagtgaagaaaatcttcttagaaggacacagcagacttctccttatgtctcattatgcagaagtggaccacaggacagtccctactgtaaactctttcaagtatcaggcaaaaaggaacaaaaggccccagcctggcttaaaccaaccttgagtcatcacctgacactggacactttgtttatccaagcaaaatcaggattttctgttagcaagcaaaggaactgctcatgggtaagaaattaacagtgtgtgccataattcatatttgtcgccaagcatcttctcaggctgacactgtgccaaacaagggattatagagatgaagatgcagcttccatccctgaaagctcacagtccattctctcagggcaatcccggtaacctcctcatcacaatcatccatccagatcatggaagtccctttactccccaaataagaaggagtagcaggaaaaagtgacctcatcaagctgactcgagtttttccaaaagcaaataaataaataaataactttttaacctgcacagccaaatatcaaataaatacatgtgtgttttttgggggggttggggggtgtttttttttctgagcttcctgtggtattgaaactatctcccacttcctcctttttgtctcaaaagatcttaagcattgggccagacacagtggctcctgcctgtaatcccagtactttgggaggccgaggtgggcagattgctttagcccaggtgttcgagacgagtctgggcaacgtaaaaatagcccatctctaaaaaaataaaataaaataaaatacaaaaattagccaggcatagaggtggatgcatgtagttccagctacctgggaggctgaggtgggaggatcacttgagccccaggggttgaggctgcagtgaaccatgatcatcacatctgggcaacagagcaagaccctgtctcaaaaaaaaaaaaaaaaaaatctaagcatccattcattttagttcatttgaggataattattgatctcctcttctaccaccactagggatacagaggaggagcaaacagacattattcctttctcttgaggctcacagttaattggtaaagagggaccactattcagaaagtcccacacatcattgtatgatcaaaagctatgacagatgcaaggaaggaaagctggatggtgttgtgaggcttcatggcagggacaccagacctggtctagaggtgagggaagacttccctgaggcactggcttgaatggagagctgaaggaggaataggaattcactagaagaaagaagaggaagcagcaagtgcaaggccctcctgcagcaggagggagcatagcacattcaaggaaaagaagccagcagtgtggattacagaggaagagtgcagcacgagggcagtggcttgagatgaggccagagaggagggcacgcaggaccaaggggaccaaggcaaggattttggtgtccatcaaattggagagtgctgagcagggaaggggtaaccgtgtaattgcctttctcaaatgcccgttttaccgtagcaaggatagactggtagaagcaagggatgaactggagagatgagtgaggaagctgctccagaagacccatcaggagatgatggtgacagggaattgagtggtaggaatgacaatgggaagagatgagcggaatccaggtatttgtgggtagaagtggcaggtgtggctacttattggagatggggctgtagagctgtgaaggtgtga

SEQ ID NO: 1520 - DNA, 1431 bp, Homo sapiens
tcctaattcaggtccttgatgctttttgcttgcatggctgccagagctgttgggcaggtctctcagtgctgatgtcttcacccccactcctatctcctccatccaacattctaccaccaaggcaatcctcctaaaacacaaccacagtgttcttcatactccctatgattccctgcaacccacattattaatcattaatccaattaataaaaattaatgcactaattcccagctcctcagtgtggcccttcacaatctgcttgtccagcctcatctcttgcttccccagctttccccagcagacccctcttccacccattccaacgctgtcctcttctcccagcctagttctttcaggccctgtgcctttgcacttgcccctgtctgaaatgtccttcccacttcttcttgaagggggtgagtgcccactcacatttcaaaccccacaccaatgcacaccaggatctcctcaagactccagggtagtagccaccctctgtatttctgcagcacgctgcacctgcctctagcacagctcaacagcccactgaagtgaatgatctgttcgctcggtgctgacttacctttctttcccagctgcaaaccactcaaggtgaagtcatcttagcctcttggagtcagcctgactgggatgaacccattgatatgtgttgcatagatgaacatatcatgacaatagtgatgagggatctccagctatctgtgcactctctatgcttcccagactctttggcagttgtgttgggtactggctgagttctggaaaacaggaatgtgagcagagtgctgcagatctccttgtcaggagcacctaagaactggcatgactctacaccctctctccttctgcagtgacctcatgtcaagaaggcagacctgcagaaatgaatgtgcctggatacctgagtcaccaggtgaaggaaactcccattgacctgcatcacactccagatatgaaacccttctttttctgcactgtcactgaggttagggattattactcactgcagcttagcctagcattaagttgcttgactaatataagtttcaataaatgttgctccatttcccatggcttctgactgaatgctttgcaatatccacaaaccatccagattgtggtttataaacaccacccttcactaaaaggactcagagctccttggagaagtggctgatgctaacgctgggggagggaagtacaaggtgagcccagagtgctgtgtggttccagaaagcaaggaagcatttaaaaaatggcagggacatgtcaaaggacacatcaatcaacttgaaggggcttccattggccaaatctgggatgatgtgagcatccaaattaataatgataatggtagattatagtctattgaataaaatgagaacctatagctatagaaagaaagaaaa

SEQ ID NO: 1521 - DNA, 129 bp, Homo sapiens
tgccaagtgtttcttgatgtgatacactgagaacacagcattgcttctgtagcattccggtccctggaggaaacatcagacaaacacagatggagggaccttcaaggactgacctgaactgttcttcgg

SEQ ID NO: 1522 - DNA, 940 bp, Homo sapiens
ccaggcatagaggcgaatgcatgtagtcctagctacctgggaggctgaggtgggaggatcacttgagccccagaggtcgaggctgcagtgaactgtgatcatcacatctgggcaacagagcaagaccctgtctaaaaaaaaaaaaaaatctaagcatcctttctttttagttcatttgaggataatgattgagctccccttctaccatcactagggatacagagggggagcaaacagacgttgttccttcctcttgaggctcacagttaattggtaaagagggaccactattcagaaagtcccacacatcattgtatgatcaaaagctatgacagatgcaaggaaggaaagctagatggtgttgtgaggcttcatggcagggacactaaacctggtctagaggtgagggaagacttccctgaggcactggcttgaatggagagctgaaggaggagtaagaattcactagaagaaagaagaggaagcagcaagtgcaaggtcctgctgcagcaggagggagcatggcatgttcaagaaacacaagaagccggcaatgtggattacagaggaagagtgcagcacgagggcagtggcttgagatgaggccagagaggagggcatgcaggaccaaggggaccaaggcaaggattttggtgtccatcaaattggagggtgctgagcaggggaggggtaaccatgtaattgcctttctcaaatgcccctcttgccatagcaaggacagactggtagaagcaagggatgaactggagagatgagtgaggaagctgctccagaagacccatcaagagatgatggtgacagagaattgagtggtaggaatgatgatgggaagagatgagtggaatccaagtatttgtgggtagaagtggcaggtgtggctactgaagggagatggggctgtagggctgtgaaggtgtga

SEQ ID NO: 1523 - DNA, 174 bp, Homo sapiens
ggagggataactggcgatgccgggagccttgagttcagtgttggacacattgagtgtaaagtgcctttgagacacccaagtaggctgttggaaataaccagcctggagctgagaggtcaggttgaaaagcagtgtctggacggcaggtaggcccttggccatgaattagaccac

SEQ ID NO: 1524 - DNA, 129 bp, Homo sapiens
tgccaagtgtctcttgatgtgatacactgagaacacagcattgcttctgtagcattccggtccctggaggaaacatcagacaaacacagatggagggaccttcaaggactgacctgaactgttcttcgg

SEQ ID NO: 1525 - DNA, 182 bp, Homo sapiens
atgtggagggataactgaatggcgatgccgggagccttgagttcagtgttggacacattgagtgtaaagtgcctttgagacacccaagtaggctgttggaaataaccagcctggagctgagaggtcaggttgaaaagcagtgtctggacggcaggtgggcccttggccatgaattagaccac

SEQ ID NO: 1526 - DNA, 129 bp, Homo sapiens; identical to SEQ ID NO: 1521

SEQ ID NO: 1527 - DNA, 171 bp, Homo sapiens
gggcctggaaaaagcactatccgactggccaaaaggcatcaaggaagttctctgggttggagactctacccagaactggcagcccggcctccaggcttcaggccatccctggcttgtaggattacaggcgtgagccaccgcgcctggtttatttaatgtttttaaataaac

SEQ ID NO: 1528 - DNA, 337 bp, Homo sapiens
catgagttaatagtgctgctgttcgtgatctcaatattaatgaatcaacaagatagccaggcatggtgtctcatgcctgtaatcccagcactttgggaggctgagacgggtggatcacctgaggtcaggagtttgagaccagcctggccaacatggtgaagacctgtctctactaaaaatacaaaaaattagctgggcgtggtggtgcatgcctgtaatcccagcttgggaggctgaggcaggagaatcatttgaacctgggaggcggaggttgcagtgagccaagattgtgccattgcactccagcctgggcaacaagagtgaaactccatctaag

SEQ ID NO: 1529 - DNA, 322 bp, Homo sapiens
ttatttaatccatgaagtagataatccattaatatttagaagttccctgacttatgaaaactcccaacttaaagaacttttctgtgctcaggagactgaggcaggaggattgcctgagcccaggagttggaggctgctgtgcactatggttacacctgtgaatatccactgcactccagtctgggcaatgtagggagactgtctctaaaaaatatttaagaaaaaaaaaacttttctaggtagcctagaacaaaagcaagtcaactctgtccacaattaatagatgacatctaatattgacttaatattactttggacttgg

SEQ ID NO: 1530 - DNA, 412 bp, Homo sapiens
cgagtttctgctttttatgggagactgcacccccaaaaacccaggaagtagatttctggctacttctcagcgatgacaaagtttttctagggtcctcaccctcctccacactgttgttgtgttgtaaactttcacttattgctgtagctttctttcctcctatctagcgcctcgatgtatttcccctcttttctttgaagctctactgtatgttttttctatttttatttaaagtatttctacttagcatttagattatttttagtagaagagggaggtattctccgtaagctcagtctcactgtgttgccggaaccagaaagtcatgtttctgtgaatctattttaaggttgtgagtcacacatttcttaagtactccatactgaaagtgaatgcagtgtgttttaatctg

SEQ ID NO: 1531 - DNA, 412 bp, Homo sapiens; identical to SEQ ID NO: 1530

SEQ ID NO: 1532 - DNA, 95 bp, Homo sapiens
acaccatggcatactatgcagccataaaaaaggatgagttcatgtccttcgtagggacatggatgaagctggaaaccatcattctcagcaaacta

SEQ ID NO: 1533 - DNA, 173 bp, Homo sapiens
ctcggccattatcccagaataacatctcatcttcattctttctgttctctcctgaaatagctgttggctattaccttagaccttctctttctattcgcatcttataatttttccactttttttgtcttattctttattctgtattctgagtaatttattcaaatatgcctttt

SEQ ID NO: 1534 - DNA, 209 bp, Homo sapiens
tcacgcctgtaatcccagcactttggaaggccaagatgggcggatcacaggtcaggagttcgagaccagcatgaccaacatggtgaaaccccatctctactaaaatacaaaaattagccgggtatggtgtcgcgcacgtgtaatcccagctacttgggaggctgaggcgggagaatcgcttgaacccgggaggtggaggttgcagtgag

SEQ ID NO: 1535 - DNA, 2003 bp, Homo sapiens
atacgatggagtagaccggaaaattaccatttttgaagtgctggagagcaaaggggataatgagggagaaagaaacatgctggtcttggtgtctggggagatatatggaaccaacagtgagtgggagacttttgatgtcacagatgccatcagacgttggcaaaagtcaggctcatccacccaccagctggaggtccacattgagagcaaacacgatgaagctgaggatgccagcagtggacggctagaaatagataccagtgcccagaataagcataaccctttgctcatcgtgttttctgatgaccaaagcagtgacaaggagaggaaggaggaactgaatgaaatgatttcccatgagcaacttccagagctggacaacttgggcctggatagcttttccagtggacctggggaagaggctttgttgcagatgagatcaaacatcatctatgactccactgcccgaatcagaaggaacgccaaaggaaactactgtaagaggaccccgctctacatcgacttcaaggagattgggtgggactcctggatcatcgctccgcctggatacgaagcctatgaatgccgtggtgtttgtaactaccccctggcagagcatctcacacccacaaagcatgcaattatccaggccttggtccacctcaagaattcccagaaagcttccaaagcctgctgtgtgcccacaaagctagagcccatctccatcctctatttagacaaaggcgtcgtcacctacaagtttaaatacgaaggcatggccgtctccgaatgtggctgtagatagaagaagagtcctatggcttatttaataactgtaaatgtgtatatttggtgttcctatttaatgagattatttaataagggtgtacagtaatagaggcttgctgccttcaggaaatggacaggtcagtttgttgtaggaaatgcatattttcctctccagttaagtccctttcaatctgttttctctttggacttgccatttcctggcaatgccacctccctgttgatttgaaaacaacccctaggcaaaatacagtgtcaaaagacacacacttgtgtatgtatatttgtacatacatgaacttacaaaaatcttttggttctatgcaggcaggttatactcatctacatgcatgactcactcaaatgtatgcatattaaaggccaatggtatgttctctgttacctcttctctgagtaggatttaagtcaagataattgacatcagggttttaatcatcctaggaagtattacccttcctaaatactctggaaatgtaagtgtagcttttgtcagttgagtttctgtagttgctcagagaggaggggcctggcaaaggatgcttgaagggaagggttaattgatacagaaaccaaatggacttaagaggtcttagaggtacaacaggaaaaaatgaacccatggaggaccaatgtgctccagagggcaactcctggtcaaggcaggaaaacagaagaaaccagcatgaaatctgttcctgagacaataggaaagcaaggccatgagtactggccattgctgctgcagagagtagaggggttgggagggtacttgaaggggagaaagggagaaagggaagaggatattgatgttatcctcagaggctatcctcagatgtgtctgtaaaaccaaaagtggttctgtttaaagaattaaatcttttggacaaaatagaagtatcaaagactaagaggaggaaaatcagaaggggtctgtctgttggaagaaaggatgttaatatctttcttcacctgttaacactgttcccttgtctcagcacccctgctttcctctgctccatcttcttccttccctctttcttcttggccctagtgcctctcaccttcctcccatccctgtgtccctgctcttccctggccttcatgatgcatgctgtgaactggaaagggacacctaagtgcctttgctctcagggtgaaaggagttagtgttctaa

SEQ ID NO: 1536 - DNA, 338 bp, Homo sapiens
ctggcacaccgctgacatttagtatcccactgacattagcacaccgctgacattagcaccctgatactagaatgttaaggatgtgccagccctgctttccactgtgtgcgctgctggctccgggcttctggagaaatcttgtctcgagcacttatagtcactcttctgttaaagagatatgaaaatataggctgttggcgatcaggctgcatagcccagttgtttctttctgcccatccagatgtaaacctgcatttctatgattttctgcttccctgtggaaagggagtgcagagagcaacatattgttattcaaatgttgctagttgtattttttt

SEQ ID NO: 1537 - DNA, 1968 bp, Homo sapiens
tcagttctcagggaatgctaaattagagtaataagttttatatccttcattctgggagaggaaatcaacataaggtgttgactaattgattatcctggaacattttgaatattggggaaggaagatgatacttctttctcaagaaaagaaaattggattattaggaatacatcttgacccttttccactcaatagaccagggaaaggggttacagagagcctcctcagatctgtttgtgcctttcaaaagtactgggggcagattctcaaaactcttagattggtgttgcatccctgccacttcacatgacccttccatgttaaagctgacttttcttgccagaaagttttccttgtgacaagaaatttgcaagcttttcaatctcaggaatactggattctatagccaagaactcatgaaagtaagtgtaaactatcctaggtaatttcaggtactttctcttatgcaattaattttattaactgatttctggtctatctccagagataaaataccattccttcacaactgtattgtctggaagccccatgagatggtaattataggccttctactagccagcagttctctctggatactggcatcagcaggtctcctttttcttgtgctgcttggacaggtacctactgctggcctcttcagtggccacaatcctcagtcctcacctgctggtttggagactcatgagcaccccaggcagctcaagctgaataaatagctgcagacatggccaacaacatggggctcaggtctgtcacttaacttagagtctttacatgaaatatcagaatgggaaagagaatgttcctggtaaaactctgttttcattaatttgttatttttcaaaaaccgagccacacctttggaagtaatgatttggccattccagagattctggggctaaagtttgtttttccagggctgctgatccttttccagatagctccagagtatgatgaccccagccccatcccaatctctagcgaaagggttatgcaaatctcagggtgttgcctctaaagaatctaaagaatagacatgctttgggcttactcagtgtaccagattctctagtgggccattctcatttgatgttccctagaacctccctgtcttccaactgcaggatgtgtttacttctcttctgggcttcccctggtttctgtcctagttcccaccccaagtttaagaagacttagattcatttattgctatctgaggccactagtgagatttcagatctctcttttgcaacattttacccatttcccttccccaaaccatgtgcttattagatggttccactcaggaagcaaggaagctaaaactcaagttaatggtctgtggatcccacgaaagtgtgtgtaaactactgactgtttctccactagaggcatttaattgagccaaagatgatggaagaagaaactctcaaagccatgtactttgttaggtgtctggatttttggcctgtttgcagcctctcctagccacagacagacactgtctcctctcagagaaaggccagtgtttcggtccaggccactggtgagtgtcggcacccttgaggtgggcatggagtgagcagaagaagcctggagaagagagaactatttaaaagtgttgccagttattcagcttccaggcggctttgcacctccaaaggtgcaaaaaggaaaaagaaagcagaaaggattcagcatttaagcagaaagaaaagggaaattctactctaccagatgagccactggttccactggagcttatcagtgaagtaacactgcaggagccctggtatccttccctcagagatatcatcaggggccctcaaaccccattgtttatgccagcactgaccgcactttaagcacacacttaccaatcagaggtcgtgtaattggcctaaatctaggcccagttattactacaaatcttagtcaccatac

SEQ ID NO: 1538 - DNA, 5508 bp, Homo sapiens
tcagttctcagggaatgctaaattagagtaataagttttatatccttcattctgggagaggaaatcaacataaggtgttgactaattgattatcctggaacattttgaatattggggaaggaagatgatacttctttctcaagaaaagaaaattggattattaggaatacatcttgacccttttccactcaatagaccagggaaaggggttacagagagcctcctcagatctgtttgtgcctttcaaaagtactgggggcagattctcaaaactcttagattggtgttgcatccctgccacttcacatgacccttccatgttaaagctgacttttcttgccagaaagttttccttgtgacaagaaatttgcaagcttttcaatctcaggaatactggattctatagccaagaactcatgaaagtaagtgtaaactatcctaggtaatttcaggtactttctcttatgcaattaattttattaactgatttctggtctatctccagagataaaataccattccttcacaactgtattgtctggaagccccatgagatggtaattataggccttctactagccagcagttctctctggatactggcatcagcaggtctcctttttcttgtgctgcttggacaggtacctactgctggcctcttcagtggccacaatcctcagtcctcacctgctggtttggagactcatgagcaccccaggcagctcaagctgaataaatagctgcagacatggccaacaacatggggctcaggtctgtcacttaacttagagtctttacatgaaatatcagaatgggaaagagaatgttcctggtaaaactctgttttcattaatttgttatttttcaaaaaccgagccacacctttggaagtaatgatttggccattccagagattctggggctaaagtttgtttttccagggctgctgatccttttccagatagctccagagtatgatgaccccagccccatcccaatctctagcgaaagggttatgcaaatctcagggtgttgcctctaaagaatctaaagaatagacatgctttgggcttactcagtgtaccagattctctagtgggccattctcatttgatgttccctagaacctccctgtcttccaactgcaggatgtgtttacttctcttctgggcttcccctggtttctgtcctagttcccaccccaagtttaagaagacttagattcatttattgctatctgaggccactagtgagatttcagatctctcttttgcaacattttacccatttcccttccccaaaccatgtgcttattagatggttccactcaggaagcaaggaagctaaaactcaagttaatggtctgtggatcccacgaaagtgtgtgtaaactactgactgtttctccactagaggcatttaattgagccaaagatgatggaagaagaaactctcaaagccatgtactttgttaggtgtctggatttttggcctgtttgcagcctctcctagccacagacagacactgtctcctctcagagaaaggccagtgtttcggtccaggccactggtgagtgtcggcacccttgaggtgggcatggagtgagcagaagaagcctggagaagagagaactatttaaaagtgttgccagttattcagcttccaggcggctttgcacctccaaaggtgcaaaaaggaaaaagaaagcagaaaggattcagcatttaagcagaaagaaaagggaaattctactctaccagatgagccactggttccactggagcttatcagtgaagtaacactgcaggagccctggtatccttccctcagagatatcatcaggggccctcaaaccccattgtttatgccagcactgaccgcactttaagcacacacttaccaatcagaggtcgtgtaattggcctaaatctaggcccagttattactacaaatcttagtcaccatactctctcgcccaggctggagtgcagtggtgtgatctcagctcactgcaacctccacctcccaggctcaagggatcctctcacctcagctcccgagcagctaggactgcaggtgtgcaccaccatgcccagctaatttttgaatttttttgtagagatggggttttgccatgttgcccaggctggtctgaagctgctgggctcaagcaatccacctggctgggcctcccaaagcgataggattacaggcgtaagggcccacgcccagcctaccatactgattttcaaggcagggtctaacccttcataagatgtgagttcttccaacccaataagcaggcagctttgaggacaaaaaggcaacattaaaagataagaccctagaagtcagaacatctgtattccaaggccaccccttctccttttagtcatgtgactttgggcaggtcaccctccctgtctgtaaaatgaggttggactggataatctttatgtgccctttccttttggcttaaaattctgtgatttattcattcttaggaagatcagcatatttattgggatttctgcttcaaaaattctttctaacctcaaaaatccaagtccagaattttttgttttcttctggatttaaactgtttaatatgagcacatcaaggttgacttctcatcctttttgggaagtgaatttaatattgagggtaattgaatgatgttgcaatggctttccctcctgctggcttggtaagaatattaaagcctgcagaggtggaaattggagctcatggagaaatggatagaaagcaatttgttgcaggcagcctttggacaagttgttttaataggaaatagacctgctgcttcataggtttcctcaaccacctttcctcagctttcttaaaatgggatctacattggctcttcacacccaaatagcagactaatcgtttttctgcttagcaccgtctggttcattgtcttgaactctgccttacagcagcaagaaaattttcctcgacaagaacctcaatctttagttccattgagctccccctctggattttggacttaccagaagtaggaggttctgataccattcaagatggtctttccttcaaagcaggtctgaagaggagactaccaaagcagtgtttacaaacccagagtccacacaaccatattgcatagaacagcacttggctttcacaagcctcctacaggacctggtgtaattggagtgaaagggcagagaccctggaagtggaggtggctgtgtgctgcgatgggaagaaggcagaaggcccaggggctttggacatagagcagggtggaagctgcaagtactgggaaggaagagagtttcacagaaacaaagctttgtcacacagaaatgagttctgtctcactggtgacttcatccctcaggctccagctgagcagagattttaatcagcttccttaatgggtattgacactgctcaggaagcagtagaccctgtcagggacagctattgatcttttgtgttctgattagattggaaaatagatcaacttcattgtagtccaggaactgttggtcacagctactaggaatgaggtgatttctgagggctgagaaaaaacacagaatcttggccagcagccagcagctgcatggtgaaagatgcattcacttctcctttgagagttggggttgagggcaaacatagaacccaggtttggcttacaacccagtgtcccggaagccctccttcgggagaactgtaagtaagaggtgggtgtgtctaaagacaataccattaatgaatgttctggccttacctaaaaaggtttagcaatttggggataactcttggatctagcttatgtgcgttcacatgcacatttgctagcccagagcttttaaaatgaggtctggcatatacttgattacaaatgaaaactcagaaaccaattttatttattaaatcatatcttttgtttttccccctcccttctaatcccccaaaggacctatttgagctgttccccaattcatctgcttattttggaccatgaatctgccagagtgatattttctgttatttctcctccaaatttttccctgatgtttccaataaagatttacttgggtggccccttaaggtgacatcaggatgctcttatgtccttccagaataagcatacacttcactcctctccctttcatctccctctgcattcttaattccttgcttttctcacttggagccgagggtgctttagagaggtggttttccatgaatcagccaagattcctgtagaagttgggtataccaaccaccaccaccaccgccccctattccagtttcaaagctcctcggctatgctaatgtcccctcagagatgaggtttgacttttaggcccgtatgactcctccatagcctggccaaggagaccatgagtagccatgtctggtttactctttatcctgagactgtttatagcttaaaacagaagtgtgtcttcccagcacaaacctaatcaatcagtgtatcagtgcatctggtggcaacagctcagcccattcaaagagcaaggattcaggaaaggcacactgatggtggggagcctcttaagagcctctaatgttctcccaaaaccagagttgagagtcggagtgccagtcgtcggggcccactattcctgaataagggacatgcaagggccagaagtagcttgactctcgcctaaatatctgtgcctttgcctgtcctttctcccactctactgaaacccggaacagattcccgcttgccttctgatgaagagaggttaggtaaagagagtttggaggaaaaaagacaccaggaggcaggctgcggggtaggagagggttctgagaggaggcagcaatccagaatacctccttttctagccagcatcccttgaacttttgaaaggttgtgcctaccactggctggcacaccagggcaatgatttccctgcagaaggaaggaaagaatgtttcacccttgcatccttcttggagaagctacagcctgtgctcagttgagtggttcacactcagactttggctttatggttttccttcctccttgtctttgccctgaccttgatcaacaggggtgaaaagaaccaccctgaggtttccatgcctctcccattttagtggtagcattttgtgtctttactccacccttcaccctagttccaccaaggttcacacaccagatgtaactgtttttcagctgagttgtatggattaacttcagtccactgtaaatacacctgggatggggtggggttggggttgtttagggagaagcagccagacttgctttgtgaactgaatgtatttttatgcaattttgagtggcctttcaaccctaagatgaatggttttgttttactggttgttgttatatagttttgagtattctgtgtttgaaagtttgggaataataatattcacttctatatgatgcctgtaaacacaacagtatttataaatgagtaaataaaactgtgttttaactttg

SEQ ID NO: 1539 - DNA, 5508 bp, Homo sapiens; identical to SEQ ID NO: 1538

SEQ ID NO: 1540 - DNA, 5508 bp, Homo sapiens
tcagttctcagggaatgctaaattagagtaataagttttatatccttcattctgggagaggaaatcaacataaggtgttgactaattgattatcctggaacattttgaatatcggggaaggaagatgatacttctttctcaagaaaagaaaattggattattaggaatacatcttgacccttttccactcaatagaccagggaaaggggttacagagagcctcctcagatctgtttgtgcctttcaaaagtactgggggcagattctcaaaactcttagattggtgttgcatccctgccacttcacatgacccttccatgttaaagctgacttttcttgccagaaagttttccttgtgacaagaaatttgcaagcttttcaatctcaggaatactggattctatagccaagaactcatgaaagtaagtgtaaactatcctaggtaatttcaggtactttctcttatgcaattaattttattaactgatttctggtctatctccagagataaaataccattccttcacaactgtattgtctggaagccccatgagatggtaattataggccttctactagccagcagttctctctggatactggcatcagcaggtctcctttttcttgtgctgcttggacaggtacctactgctggcctcttcagtggccacaatcctcagtcctcacctgctggtttggagactcatgagcaccccaggcagctcaagctgaataaatagctgcagacatggccaacaacatggggctcaggtctgtcacttaacttagagtctttacatgaaatatcagaatgggaaagagaatgttcctggtaaaactctgttttcattaatttgttatttttcaaaaaccgagccacacctttggaagtaatgatttggccattccagagattctggggctaaagtttgtttttccagggctgctgatccttttccagatagctccagagtatgatgaccccagccccatcccaatctctagcgaaagggttatgcaaatctcagggtgttgcctctaaagaatctaaagaatagacatgctttgggcttactcagtgtaccagattctctagtgggccattctcatttgatgttccctagaacctccctgtcttccaactgcaggatgtgtttacttctcttctgggcttcccctggtttctgtcctagttcccaccccaagtttaagaagacttagattcatttattgctatctgaggccactagtgagatttcagatctctcttttgcaacattttacccatttcccttccccaaaccatgtgcttattagatggttccactcaggaagcaaggaagctaaaactcaagttaatggtctgtggatcccacgaaagtgtgtgtaaactactgactgtttctccactagaggcatttaattgagccaaagatgatggaagaagaaactctcaaagccatgtactttgttaggtgtctggatttttggcctgtttgcagcctctcctagccacagacagacactgtctcctctcagagaaaggccagtgtttcggtccaggccactggtgagtgtcggcacccttgaggtgggcatggagtgagcagaagaagcctggagaagagagaactatttaaaagtgttgccagttattcagcttccaggcggctttgcacctccaaaggtgcaaaaaggaaaaagaaagcagaaaggattcagcatttaagcagaaagaaaagggaaattctactctaccagatgagccactggttccactggagcttatcagtgaagtaacactgcaggagccctggtatccttccctcagagatatcatcaggggccctcaaaccccattgtttatgccagcactgaccgcactttaagcacacacttaccaatcagaggtcgtgtaattggcctaaatctaggcccagttattactacaaatcttagtcaccatactctctcgcccaggctggagtgcagtggtgtgatctcagctcactgcaacctccacctcccaggctcaagggatcctctcacctcagctcccgagcagctaggactgcaggtgtgcaccaccatgcccagctaatttttgaatttttttgtagagatggggttttgccatgttgcccaggctggtctgaagctgctgggctcaagcaatccacctggctgggcctcccaaagcgataggattacaggcgtaagggcccacgcccagcctaccatactgattttcaaggcagggtctaacccttcataagatgtgagttcttccaacccaataagcaggcagctttgaggacaaaaaggcaacattaaaagataagaccctagaagtcagaacatctgtattccaaggccaccccttctccttttagtcatgtgactttgggcaggtcaccctccctgtctgtaaaatgaggttggactggataatctttatgtgccctttccttttggcttaaaattctgtgatttattcattcttaggaagatcagcatatttattgggatttctgcttcaaaaattctttctaacctcaaaaatccaagtccagaattttttgttttcttctggatttaaactgtttaatatgagcacatcaaggttgacttctcatcctttttgggaagtgaatttaatattgagggtaattgaatgatgttgcaatggctttccctcctgctggcttggtaagaatattaaagcctgcagaggtggaaattggagctcatggagaaatggatagaaagcaatttgttgcaggcagcctttggacaagttgttttaataggaaatagacctgctgcttcataggtttcctcaaccacctttcctcagctttcttaaaatgggatctacattggctcttcacacccaaatagcagactaatcgtttttctgcttagcaccgtctggttcattgtcttgaactctgccttacagcagcaagaaaattttcctcgacaagaacctcaatctttagttccattgagctccccctctggattttggacttaccagaagtaggaggttctgataccattcaagatggtctttccttcaaagcaggtctgaagaggagactaccaaagcagtgtttacaaacccagagtccacacaaccatattgcatagaacagcacttggctttcacaagcctcctacaggacctggtgtaattggagtgaaagggcagagaccctggaagtggaggtggctgtgtgctgcgatgggaagaaggcagaaggcccaggggctttggacatagagcagggtggaagctgcaagtactgggaaggaagagagtttcacagaaacaaagctttgtcacacagaaatgagttctgtctcactggtgacttcatccctcaggctccagctgagcagagattttaatcagcttccttaatgggtattgacactgctcaggaagcagtagaccctgtcagggacagctattgatcttttgtgttctgattagattggaaaatagatcaacttcattgtagtccaggaactgttggtcacagctactaggaatgaggtgatttctgagggctgagaaaaaacacagaatcttggccagcagccagcagctgcatggtgaaagatgcattcacttctcctttgagagttggggttgagggcaaacatagaacccaggtttggcttacaacccagtgtcccggaagccctccttcgggagaactgtaagtaagaggtgggtgtgtctaaagacaataccattaatgaatgttctggccttacctaaaaaggtttagcaatttggggataactcttggatctagcttatgtgcgttcacatgcacatttgctagcccagagcttttaaaatgaggtctggcatatacttgattacaaatgaaaactcagaaaccaattttatttattaaatcatatcttttgtttttccccctcccttctaatcccccaaaggacctatttgagctgttccccaattcatctgcttattttggaccatgaatctgccagagtgatattttctgttatttctcctccaaatttttccctgatgtttccaataaagatttacttgggtggccccttaaggtgacatcaggatgctcttatgtccttccagaataagcatacacttcactcctctccctttcatctccctctgcattcttaattccttgcttttctcacttggagccgagggtgctttagagaggtggttttccatgaatcagccaagattcctgtagaagttgggtataccaaccaccaccaccaccgccccctattccagtttcaaagctcctcggctatgctaatgtcccctcagagatgaggtttgacttttaggcccgtatgactcctccatagcctggccaaggagaccatgagtagccatgtctggtttactctttatcctgagactgtttatagcttaaaacagaagtgtgtcttcccagcacaaacctaatcaatcagtgtatcagtgcatctggtggcaacagctcagcccattcaaagagcaaggattcaggaaaggcacactgatggtggggagcctcttaagagcctctaatgttctcccaaaaccagagttgagagtcggagtgccagtcgtcggggcccactattcctgaataagggacatgcaagggccagaagtagcttgactctcgcctaaatatctgtgcctttgcctgtcctttctcccactctactgaaacccggaacagattcccgcttgccttctgatgaagagaggttaggtaaagagagtttggaggaaaaaagacaccaggaggcaggctgcggggtaggagagggttctgagaggaggcagcaatccagaatacctccttttctagccagcatcccttgaacttttgaaaggttgtgcctaccactggctggcacaccagggcaatgatttccctgcagaaggaaggaaagaatgtttcacccttgcatccttcttggagaagctacagcctgtgctcagttgagtggttcacactcagactttggctttatggttttccttcctccttgtctttgccctgaccttgatcaacaggggtgaaaagaaccaccctgaggtttccatgcctctcccattttagtggtagcattttgtgtctttactccacccttcaccctagttccaccaaggttcacacaccagatgtaactgtttttcagctgagttgtatggattaacttcagtccactgtaaatacacctgggatggggtggggttggggttgtttagggagaagcagccagacttgctttgtgaactgaatgtatttttatgcaattttgagtggcctttcaaccctaagatgaatggttttgttttactggttgttgttatatagttttgagtattctgtgtttgaaagtttgggaataataatattcacttctatatgatgcctgtaaacacaacagtatttataaatgagtaaataaaactgtgttttaactttg

SEQ ID NO: 1541 - DNA, 1594 bp, Homo sapiens
acagagcacctgacctcagttgtctttggccattgtgggaagtcattattctggagacaagaaaatcatcactctggtgccttggtggcagcaccactgcctgctccctggaaggtagactatggcataagtgtcagctcattgttttcgtctcccacttatcttcccccttcaaagtgattttctttataagaaaatttgggctctgaatactccattctgcctcacttccttgaccttgttttcctctcttcgccctgacacctgcttctaatgagaaatgaagtcagtgcaaggaggaatgagaggtggggaggggagattgttgagagatggactaggaagtggaagcaggctggaaagacacatatggcgaaagtcaagtatctgaggccacttgcaacattgtgacaaagaagatggaagatagcagcctactgggctgtgagaatagtggtgaatttgattatttccagtggttagatttagcagagagatttactttcttagaaattaataggggaaatggcacttaatagaggtttaatggaatgaagtactttcaacccattgatgagagtcatggaagtttagagtggcaagacccagaggtcattaggtccagctttctattattgtgtcacagggacccctgctaccacagctttcacccatgggcatggtcaggtagcctctggtggctatgcatttattactcaaaagttgggcaactctaataacgagagagtttttcctcatatcagctgaagtctgcctgtggattctccttgtagtccagatctactatctgcaactctttaacggcacttgagatatgtgcagtgggtggtctccccctcagtcttactttgagctgctgttactctagtcctttaagtcattcctcatatggcatgcttttcttacctgtcacatcttggccatcctcctctagacaaaaccagcctttaaaatatcatgtccaggcctggaaagaatacaaatccagtgcaaaattaaaccattagttcttgatgataacctagcattaatacttacagtattttctttttgtaggagttttatcccttggttcacttgagtgtgcaagtcattaaatcctcatcattttagggttgccagtgatattcagtgtttagagtggttcattcccttaatatatactacctctgtctgttaattctttcctaacatgacatgtagctctccatggtcctccctctgaaacaccacatgctgtttaaactagaagctgtaattcaagatcccaattccaccaggtgcagtggctcatgcctgtaatcccagcacttcaggaggccgaggtggacagatcacgaggtcaggagttcgagaccatcctggctaacacggtgaaacccaatctctactaaaaatacaaaaaattagccaggcgtggtggcaggcgcctgtagtcccagctactcaggaggctgaggcaggagaatggcgtgaacccgggaggcggagcttgcagtgagccttgatcacgccactgcactccagcctgggtgacagagcaagactccatctcaaaaaaaataataataat

SEQ ID NO: 1542 - DNA, 332 bp, Homo sapiens
ccctgcttgcattcactgcccccatgcctttggacctgatggacaagcacacatctagccaacggtgttcctggaggacaggtgctggtgtaaactgacaaaaatggtagctgctggtctatcctcaaggagaggagacaggtggaagtgggaaccgaagaaggagttttactcttccctggtctttgggggcaatgctgtcccactctccctttccctaaaaattctgacgccctatccctggtccctaacatctttgcttcagaagttaaagacatttcaagttatttgcaaagagtcaactgaggactttgtagaaattgttacttttc

SEQ ID NO: 1543 - DNA, 2319 bp, Homo sapiens
aagaaagggacagcatttgctgcccccacccctcttttccagtccttgccttccaaccaaaagaaatggatgttttggtggaaggacacttctttctatcaccctcttcagtcacctctatacactctacattttctctgcactttcaatgccctgttcttccaaacccctatcccaagttttatgacagttttaattgaagcatgattgtggtaattcgagccatctggagaatgctctggggagtacaccaggctcagctgtggacccctcaacttcctgctgctcagctactttgtccacattggatttggtccaaacatgtaagacttctaccctaatcagtatccttcagctttttacattaacccagtgtcctctgatataggtgagtcttgtggtagccactccaggatcctgattggggtgccaagagaaacagcaggatgttgaattgatcatcagatgccctctggaatggttagcatccaaggtgacagtgactgcattgaggcgctctattcttcttcacctctcaggaactgacttttattttttctgtcaacacccagtaatctccctaactagttttaacccttattcctccctcatacctagccatttctccaaggcgcaaatggccctggcttcatttattcctttcctttctatccttttatatttttcccttccccaccccctcactcaatggtataaaagctaggacagagcacctgacctcagttgtctttggccattgtgggaagtcattattctggagacaagaaaatcatcactctggtgccttggtggcagcaccactgcctgctccctggaaggtagactatggcataagtgtcagctcattgttttcgtctcccacttatcttcccccttcaaagtgattttctttataagaaaatttgggctctgaatactccattctgcctcacttccttgaccttgttttcctctcttcgccctgacacctgcttctaatgagaaatgaagtcagtgcaaggaggaatgagaggtggggaggggagattgttgagagatggactaggaagtggaagcaggctggaaagacacatatggcgaaagtcaagtatctgaggccacttgcaacattgtgacaaagaagatggaagatagcagcctactgggctgtgagaatagtggtgaatttgattatttccagtggttagatttagcagagagatttactttcttagaaattaataggggaaatggcacttaatagaggtttaatggaatgaagtactttcaacccattgatgagagtcatggaagtttagagtggcaagacccagaggtcattaggtccagctttctattattgtgtcacagggacccctgctaccacagctttcacccatgggcatggtcaggtagcctctggtggctatgcatttattactcaaaagttgggcaactctaataacgagagagtttttcctcatatcagctgaagtctgcctgtggattctccttgtagtccagatctactatctgcaactctttaacggcacttgagatatgtgcagtgggtggtctccccctcagtcttactttgagctgctgttactctagtcctttaagtcattcctcatatggcatgcttttcttacctgtcacatcttggccatcctcctctagacaaaaccagcctttaaaatatcatgtccaggcctggaaagaatacaaatccagtgcaaaattaaaccattagttcttgatgataacctagcattaatacttacagtattttctttttgtaggagttttatcccttggttcacttgagtgtgcaagtcattaaatcctcatcattttagggttgccagtgatattcagtgtttagagtggttcattcccttaatatatactacctctgtctgttaattctttcctaacatgacatgtagctctccatggtcctccctctgaaacaccacatgctgtttaaactagaagctgtaattcaagatcccaattccaccaggtgcagtggctcatgcctgtaatcccagcacttcaggaggccgaggtggacagatcacgaggtcaggagttcgagaccatcctggctaacacggtgaaacccaatctctactaaaaatacaaaaaattagccaggcgtggtggcaggcgcctgtagtcccagctactcaggaggctgaggcaggagaatggcgtgaacccgggaggcggagcttgcagtgagccttgatcacgccactgcactccagcctgggtgacagagcaagactccatctcaaaaaaaataataataat

SEQ ID NO: 1544 - DNA, 2319 bp, Homo sapiens; identical to SEQ ID NO: 1543

SEQ ID NO: 1545 - DNA, 332 bp, Homo sapiens; identical to SEQ ID NO: 1542

SEQ ID NO: 1546 - DNA, 2318 bp, Homo sapiens
aagaaagggacagcatttgctgcccccacccctcttttccagtccttgccttccaaccaaaagaaatggatgttttggtggaaggacacttctttctatcaccctcttcagtcacctctatacactctacattttctctgcactttcaatgccctgttcttccaaacccctatcccaagttttatgacagttttaattgaagcatgattgtggtaattcgagccatctggagaatgctctggggagtacaccaggctcagctgtggacccctcaacttcctgctgctcagctactttgtccacattggatttggtccaaacatgtaagacttctaccctaatcagtatccttcagctttttacattaacccagtgtcctctgatataggtgagtcttgtggtagccactccaggatcctgattggggtgccaagagaaacagcaggatgttgaattgatcatcagatgccctctggaatggttagcatccaaggtgacagtgactgcattgaggcgctctattcttcttcacctctcaggaactgacttttattttttctgtcaacacccagtaatctccctaactagttttaacccttattcctccctcatacctagccatttctccaaggcgcaaatggccctggcttcatttattcctttcctttctatccttttatatttttcccttccccaccccctcactcaatggtataaaagctaggacagagcacctgacctcagttgtctttggccattgtgggaagtcattattctggagacaagaaaatcatcactctggtgccttggtggcagcaccactgcctgctccctggaaggtagactatggcataagtgtcagctcattgttttcgtctcccacttatcttcccccttcaaagtgattttctttataagaaaatttgggctctgaatactccattctgcctcacttccttgacttgttttcctctcttcgccctgacacctgcttctaatgagaaatgaagtcagtgcaaggaggaatgagaggtggggaggggagattgttgagagatggactaggaagtggaagcaggctggaaagacacatatggcgaaagtcaagtatctgaggccacttgcaacattgtgacaaagaagatggaagatagcagcctactgggctgtgagaatagtggtgaatttgattatttccagtggttagatttagcagagagatttactttcttagaaattaataggggaaatggcacttaatagaggtttaatggaatgaagtactttcaacccattgatgagagtcatggaagtttagagtggcaagacccagaggtcattaggtccagctttctattattgtgtcacagggacccctgctaccacagctttcacccatgggcatggtcaggtagcctctggtggctatgcatttattactcaaaagttgggcaactctaataacgagagagtttttcctcatatcagctgaagtctgcctgtggattctccttgtagtccagatctactatctgcaactctttaacggcacttgagatatgtgcagtgggtggtctccccctcagtcttactttgagctgctgttactctagtcctttaagtcattcctcatatggcatgcttttcttacctgtcacatcttggccatcctcctctagacaaaaccagcctttaaaatatcatgtccaggcctggaaagaatacaaatccagtgcaaaattaaaccattagttcttgatgataacctagcattaatacttacagtattttctttttgtaggagttttatcccttggttcacttgagtgtgcaagtcattaaatcctcatcattttagggttgccagtgatattcagtgtttagagtggttcattcccttaatatatactacctctgtctgttaattctttcctaacatgacatgtagctctccatggtcctccctctgaaacaccacatgctgtttaaactagaagctgtaattcaagatcccaattccaccaggtgcagtggctcatgcctgtaatcccagcacttcaggaggccgaggtggacagatcacgaggtcaggagttcgagaccatcctggctaacacggtgaaacccaatctctactaaaaatacaaaaaattagccaggcgtggtggcaggcgcctgtagtcccagctactcaggaggctgaggcaggagaatggcgtgaacccgggaggcggagcttgcagtgagccttgatcacgccactgcactccagcctgggtgacagagcaagactccatctcaaaaaaaataataataat

SEQ ID NO: 1547 - DNA, 332 bp, Homo sapiens; identical to SEQ ID NO: 1542

SEQ ID NO: 1548 - DNA, 112 bp, Homo sapiens
ggatttcagagactaggcccttaacccgttacatttgatcttacttagcatttatcatctgtatcacaacttttagcttgtatactgatgttgtctctgactgattaggagt

SEQ ID NO: 1549 - DNA, 1671 bp, Homo sapiens
tacatacacttacgtagtcaactttgaattttttacatattaatgaattatttatcccaaactgcctgccctctgccaccagccagctttcatattagacattataatattgctctcaatccatgaagtgggaattttttttcatatttcattaaatgtagagataatgtctactttacagtagagagaaaagtctattttacagagaaaaatgctttccaaagtcaagtgtcagtaatacttggatgaccactgcagtatgtttttcctctgacattgctaaccttatatcacttctgttggctaatagcatagcacccttaggcactcagtaaatcattattaatgacatgctcttgagtttaagagtccattttttaggaataggaggaagagcaaagtgccttggcaacctttgacttcaaatgccttttacatggctgatatcttacctcttttaaaaaaaaaaaaaaaagttcttgctctaaccacaaacctttaatttctggctattatagtgttttattgctctcctagctatttacttaatggtaacagtagtaataatggctatcttttaatggtaatgggagcgcttagtttttgaccacttactgagtgctaagctctgttgttgagctcttcactgacactattttatcctcactatactgtgcaaagtaggtactattatcccatttaacatatgggaaactgaacttttgagtggtaaaataacttggtgacagtcacacagccagcaagaagttaagtctggatttcagagactaggcccttaacccgttacatttgatcttacttagcatttatcatctgtatcacaacttttagcttgtatactgatgttgtctctgactgattaggagtgagggtggaaaggaggaaggtgtattttacctctctgacaagttctgagcaccttgggacaagagagtcccttgtaggcaatccttatttggaatccgcgcccccccaccccaacctcatattatttcgcaaagcataaagcacgtaaatactcaggttacgcatgttgagctgaatgagcttctcctttgtgcaggtgggaaagcagtgccactctccgcttcacagatgccccctgccaagatgtcagtgatgctgccgtcagtgaacctcgaggactgctctcagtctctgagtctcagcacaatgcaggaggacatggagtcttcgggggcagataccttctgaacgggaagagacagccagcacagtgtttatgccactggttttaaagtcattttaccttggcttaaaaccctctctcagactgtttggtttttgagcatattctgaaaaaaaaattccaatattttaaaataaaacaaaaagcataatttgggtatttaaagtttttaaataaaataagtataagtcattataagtctgattgtgagttgtttcttagaatcctgagatagcatagagtagtgaaagggcatggcttttgacatctaggcatttaatctataggtgtaattatctgtatgtatttataaaattatgtagctcaaggttattcattctaacatttttataacagcaaatagaaaaaatcaaatgtctatcaataatagactggttttaaagtgatggtacatcagtacaatggaatactatgtatta

SEQ ID NO: 1550 - DNA, 1671 bp, Homo sapiens; identical to SEQ ID NO: 1549

SEQ ID NO: 1551 - DNA, 203 bp, Homo sapiens
tgatatcttacctcttttaaaaaaaaaaaaaaaagttcttgctctaaccacaaacctttaatttctggctattatagtgttttattgctctcctagctatttacttaatggtaacagtagtaataatggctatcttttaatggtaatgggagcgcttagtttttgaccacttactgagtgctaagctctgttgttgagctctt

SEQ ID NO: 1552 - DNA, 355 bp, Homo sapiens
tcctatttgaaatattctatttaaattcacataaaacttgttttctttttaaatactatggtattatattatagtttgtgatattgctgtaatgataccaaatcttatcttcctctctctttttataaaaaaatgaaatagtaacaaaaaggagtgatacagtatttaaaatagtctttattaaatttccttatatgaaaggaattttccttttacaagtattctgagcttggacagctatgattgagacatcattaaaatctccagaactgtctaattatactgtggcccctataaaaatttaatgaaaaattctatgttattactgtagaaactacttgaaaaacataaaggg

SEQ ID NO: 1553 - DNA, 290 bp, Homo sapiens
actatgcagttgttgaaattatttaaaatggggtggggaggaattcaaatgtatggtatgtcacatattcttacatgtatttgcttgtaaatatattatataaacaagaaactgctaagtttgtctccagggagtagaattgttggctgggtgataggagaggctaagtgataggaatcaaggataatcgtggttactatgtatttgaacttcagttgtgatagaaaaaaatcatcagtgagattaatttttatatgccttatgtataccatataaacctttataaacct

SEQ ID NO: 1554 - DNA, 290 bp, Homo sapiens; identical to SEQ ID NO: 1553

SEQ ID NO: 1555 - DNA, 355 bp, Homo sapiens; identical to SEQ ID NO: 1552

SEQ ID NO: 1556 - DNA, 26048 bp, Homo sapiens
ccctttccgcgaccgccccgcccactcccaggaaggcccgggtgcccagagctcgcggtggactccgacccggcgcaacatggccgcagcctcgcctctgcgcgactgccaggtacacggaggctgcccccaaccaggtccccctcgggccccgggtcctgggggtggcccggtgctggcggaataacgggagacatggcccgggcgcggggcgtggggtgagccctgggcgcacgggcgcgtccgcggcaacgcctggaagggacccgaggcccttcttgtagagtccccaccgagggaaataagggacgcctgtcagggtactcgggagaccccaagacctcctaaaaaacgtagctcactgggcatggctggggacgcagggaagcccgcaaaggtaaggggctccttggaaccggcccaggactgggagcctgagcccattttacagatgaggaaggtggaggtcagaggggccaggagacgtgtgtgtgttgaagtttgaagggctcctggagagaaggcactgctattcccttcttgccgtctgtaggcctggaaggatgcgaggctcccgctctccaccacaagcaacgaagcctgcaagctgttcgatgccacgctgacccaggtatgcctgccgagagaggccgcggccccttctgtggaggtctaggggaaggttttttaattggggaaagctgtttttttgttttgttttgttttgttttgttttgtttttgaggcggagtctcgctctgtcgcccaggctggagtgcagtggcgctatttcggctcactgcaagctttgcctcccgggttcacgccattctcgtccctcagcctcccgagtagctgggactacaggcgcccgccactgccctcgactaattttttttgtattttttagtagagacggggtttcaccgtgttagccaggatggtctcgatctcctgacctcgtgatccgcccgcctcggcctcccaaagtgctgggattacaggcgtgagccaccgcgcccggccatggggaaagctttttaaattgcgccatgaccttagcaatagatggcagcacatctgtgcactttgtactggaggacgtgggagggtggggacatatctctgccccccccccacagcgtcctaaaagggcctctgcactctcccttcttccccaggactctgagtggtgggtggacagcggtgggtgcagtggggatgttttttgaggatgctggcctccccgggcctcccattgtggcctgctgagggtctgatgcagggctcggctgcttaggacgtgggatcctgtcctgggatgaatctgtgagtatactgccttcacctaggctgtgccaagaccttctgccacattaccagtcatttctctaccaatgaagggtcctatagttttagaactaggagaagtctcagaagtaagatccaactagcttccttgacaagtggggaaactgaggctcagagttgaacctacttgacttgaaggttgtccatgaattacaggcagaaccaggatgaacctgggcctaactgcactgatagaaacctaagctgaccttggcgtgggtggtgaggcccctgcatactgacttcatccacataacaggaggactcaggtagctcttagaagcctacgggctgaacaagagaggactgatggaatgctgtgagctgcgccatgggtgcctctcctgttcccagcctgccctgccaagggactctgctgtgggcatctgagttgtttgtttattttgtgtttgacctggctcacttgcccttcctgtatctcgccggcctctgtagagtactcgatttgttttttgtttgagacggagtcttgccctgtcacccaggctggagtgcaatggcgcagtcttgactcactgcaaactctgcctctcgggttcaagcgattgccctgcctcagcctccgaagtagctgggattataggcacgcaccatcatacccagctgattttttgtatctttagtagagacggggtttcaccatgttggtcaggatggtcacaaactcctgaccttgtgattcccctgccttggcctctcaaagtgctgggattacaggcgtgagccactgtgcccggcccctagtactcagtttgttacacaccacatccccaatcagtggcagctcatcctcccagcctgggtatattttgtcccgtgtattggtgtctctgtgctgtcctgtgttagaacttggcttctttaaatctctgtgccaaccctcctgtatcttgtcaaaatgcttgcgtagcttatagtctcagctatttgggaggctgaggcagggggattgcttgagcctgggcggttgagactgaagtgagctgtgattgtgccactgtactccatcctgggcaacagagcaaaccctgtcttaaaaaaaaaatacacgtactaattctgtgtagatgtaggttagacagctgaaagggcatattttaaaatctaatgtgtgattataggtctaggactttttttaaaacaggcatttgagtaaaggaccaggtacaaatacagcaaattgttaaaaatgatgatgcgctgggcgcggtgactcacgcctgtaatcccagcactttgggaggctgaggcaggtggatcatctgaggtcaggagttcaacaccagcctggccaacatggtgaaaccctgtctctactaaaaatataaaaaaattagccgggcatggtggcatgggcctgtaatcccagctactcgggaggctgaggcagaggaattcttgaaccagggaggtggaggttgtagtgagctgagatagtgccactgccttccagcctgggtgacagggcaagactccatctcaaaaaagaaaaaaaaaaaattagccgggcgcagtggtgcacacctgtaatcccagctactaaggagggattctcctaccaaggcaggagaattgcttgaaacctggaggcagaggttgcagtgagccaagatcgtgccattgcactccagcctgggtgacagggcaagattctgtctcaattaaaaaaaaaatgataaaatgagctttgggtaagttttatctttcagcttttgtgtctttctaactctctaaaataaatgttttctgtgaatatttttaaaacgaatgaataagaagcaggaatattcctatcgtgaccaacttcagggctcctcttagggcagaagaagccgatgtggagcaggtcacctgtcaggaggaacctgccttttctttcttttcttttttcttttttttcttttttgagacagagtctcactctgtcgcccaggctggagtgcagtggcgcctgggttcacgccattctcctgcctcagcctcccgagtagctgggattacaggcgcccaccaccacacccggctgattttttgtatctttagtagagacgggggtttcaccgtgttagccaggatggtctcgatctcctgacctcatgatccgcccacctcggcctcccaaagtgctgggcttacaggcatgagccaccacacctggcctttttttttccttttctctgtcacccaggctggggtgcagtggcacgatctcagctcactgcaacctctacctcccaggttcaggcgattctcctgtctcagccacccaagtctcagccgcccaagttgctaggactacagacatgtgccaccacgcctgactaatttttgtattatttgtagagacagagttttgccatgttggccaggctggtctcaaactcctgccctcaagtgatccacccgcctcagtcttccaaagtactgggattacaggcgtgagccatcgcgcccagccagaacctgccttttgatgtttcttttttggaaatgcagcatccctagccctagaaagtgtgccttgggtgatgtgtatttcatttcttcgtatgaagaaagttatcagccaggttatgccttctttgggttagagtccagaaaatactcagtgttctacaaagaaaaacaaatctggatttatttttattttttgttttttgagacagtctctctctgccatccaggctggagtgcagtggcacaatcttggctcattgcaacctcagcccccgggttcaagtgattctcatgcctctgcctaccaagtggctgggactacaggcatgcaccaccacgccccactaatttttctatttttagtagagatggggttttaccgtgttggtcaggctggtctcgaactcctgacctcagatgttctgcccgcctcggcctcccaaagtgtaaacctggatttagagccacctttgttagaatgatccaagggctccgtgaggacttgttttgcttttcccatttcagtatgtaaaatggaccaatgacaagagtctcggtggcatcgagggctgcctgtcaaagctcaaagcagcagatccaacctttggtgagtaacgccttccctgggtggaggagccccgcttcacacatccagcccctctctttcctttaccacagggacacagttgggatggggaaggcaggttgggtggcagcaaccagggtggcatttgcacagagggagagaagatgacagctgcctttgtgtctggaaaaacagtcactcccataaagatgccaggttctatcagaaggcatttttctcatcttttctttaattaccatcaattcgggaatgaagatgctgatctcatttctcagatgaggaaactgagggttggcaagagtaagactgtacttaaagccacccagctggtggttgacccctgggattagataaagcttcctgaatccaaggcccagacccctggaacatgagaggtggctgctgcagcctccgtcaggggaccagtgaggcctcatccagagtggccagggtgaggtggtgacagaggctggcatccaggcaagccatgtgtacagcgggcatggggaagccagcacagtgcattgcaggtgggtggtcccgtggtgcggcaaggttccgggcctgggagaaggtctgatgaggggacagggctcttgtcagtgcggcagggacacccttctcaccctgctgcagcctagtcagacttaaggcaggggacttgtactgccctggagaagacaaacaaggaaataactgggggagaacgggggagccaaacccagtcatggggagccaggagccaggggtgggctcggactctctgagcagaccttgagccctgatcagggggcttcgaccacctgaatcatcagctgggctgggctgggctcgaccatcggaatcaccagctgttttccagggtccacatgggtggtcctagcacactatggttgggtcctgggtcccaggcctgagccagtgaccaagttccaaatgccagtggacaccctggctctcccacagtggggcctgggggcctgcactcctgccagcaaggctgctgcgagggccacaaggcactcacccccaccctaacttttagcatgtgtgagcagcacagatgggatcatgacttctgtgctccggggcctccttggtccagccccttatgagcagcatccactgatgcctcccgggagccgtgtgctggctgtggcggtagtgtcagctgatgagcctgcaggcagcctctaagtggctcatccattgaagggggaaggtgctttagacactggcactcagcagaatgccctcactagaaaaatgttcaagggtgcctttaggcttgcagttccctccatgcttgacaagagccgaggctgagttctagacagtaggcagggccacagtgcccagcctgctgctgcctggctggcccctcctgggacgtggggtgtctctgtgacatgtggagtctgggctgggatgggctgagctggaccatctgaaccaccagccgttctctaacctcccaccagtgatgggccacgccatggctactggccttgtgctgattggcactggaagctccgtgaagctggacaaagagctggacctggctgtgaagacaatggtggagatttcaagaacccagccgctgacaaggcgggagcagctgcacgtgtctgcagtagagacatttgccaatgggtgaggggcctccctgggctgggagctggcaccctgaggctgagctgggggagtggcagggtatccctttcctgatgcccttgggacgggggcggggtgggagaatgcttctctccctgcctcctgagatgctctgatggaaaatcgcatcctgtctgcttccctattcttggtggagtgctgagtgaggaagcagttggtgaagattcccaacttagtgtccaaagtaacttgctttgtttcattaagtaaattatatattattttccttacaaaaataatagggtcacactacagaaattactaggttagggaagagagaagaaaacatgcttcttctagtgagaaataaacaatcaaatcaaatcttcacccataagttccttgctcttgcactgactttcacatcatccccccgctgttcctatgctggttccctcattctccgggacagcccccatgtctgctcaggcaggcgagatgccctgcagagttaggcgaccctagccgattgtgcagggactcagggattccgaaccctgagactggggaggtgcggcctggtcttcctggtaagtcagcccaggtgtgggttccacctcagagacttcctgtggctgtctcacggtctccactgggattatctttggcaatttgttaaaccagtttttttttttttttaaattgaactaaagagtaaaagttcccactgggttttcagtttgttttctgattcacaacctaacatagaaagtgatttttttacatttatttatttagagttttgctcttgtcgcccaggctggaatgcagtggcgcaatctcggctcactgcctccacctcccgggttcaagtgattctcctgcctcagcctcccgggtagctgggattacaggcacatatcaccacaccctgctcatttttgtatttttagtagagatggggtttcaccatcttggccaggctggtcttgaactcctgacctcgtgatccacctgccttggtctcccaaagtgctgggattacaggcataagccaccgcacccagtcagaaactgatttttaaaaaaacacatccatgtagaccatgacactggtgagaaacaatgcctcttacactccctgtgtgggtggactatgtgttcagcgttggtgagaaatctttctcggtttccaggaactttccgaaagcctgtgaactatgggaacagattctccaggaccacccgacagacatgttggccctgaaattttcccatgatgcttatttttacctgggctatcaggaacagatgagagattctgttgctcgaatttaccccttctggacacctgacatccccctaagcaggtatgtgccagctggaaatcacattatttctgtttcttaatctctcttttctgccctaaaaatatggtgactctcttggccctgtcctaaaaataatgggaccactgttgctattctcctagttccttaaagttcaaaggcctcattttcttcacttgattttcatcccacctgtgaatgaggtagtaccattatgtatcagtcagcatgggattgtttttgctgcagtaataaacatcccctggttcttcttccccaaagcttattacagcaaaggtttatttttcactcatactacgtggctaccttagaagggctgagggctctgccaccatgtccttgtctccatctgggatcccagctgatgaagcaactgccctctggacatacctgtcactaagagggaaaagcaagctttccttggggggcttacaatggcaattaaaggtttagaatgaaaggataccctgccactcccaagtcattggccagaactgatcacatgacctcacccacccacaagagaccaggaagtacagttctaccgtgtgcttgggaagagaagaaggcctggaatgtgcatgaacagccccagtgaccaccacacaggactgacttcactgcagcttcattacagaatagttgtgaggttcggacaggttaataagctgtattatttagtcagcactctccagagaagcccagagagctctgagacagagagagagatggagatttattttaaggaattggctcatgtgagtgtgagggctggcaagttcaaaatctgtagggcagggcagcaagctggaaatcgctgcaggagtcagcattagtcttacatctggaggcagtctgcaggcagaatttcttcttctaggggcctccgtctttctcttaaggcctttaactgattggatgaggcccacccacatggagggtaatctgctttactcaaatcgcatctagaaataccttcacgagactgggcacagtggcttatgcctgtaatcccagctgtttgggaagctgaggcggtaggattgcttgagcccaggagtttgagataagcttggtcaacatggcaagactctgtctctacaaaaagaaaaaataaattaaaaaagttagccaggcatggtggcatgtgcctgtagttccggctactcaggaggctgtggcgggaggttcccttgagcccaggagtttgaggctgcagtgagctggcgatcatgccactgcactcagcctgggcagcagagcaagactctgtatctaaaagaatatatatattaaaaatatatatattaaaaaaatatatataaaatacatatattaaaaatatatattaaatatatattaaaatatatattaaaaattatatattaaaatatatatattaaatatatatatatatataaacatatatatatataaaaaatactttcaccgcaacacctagactggtgtttcgccaaacagctgagcaccacgggccagccaaattgacagataaaaattaaccgtcatgaaacctaatagtacctgacacacagcaaacatacaataaatagcttaagtgttgaggattaaatgaccccagtaaacaatacatatatatacatacacacacacacacacacacacacacacacacacacacatacattttaaagataactctggaagccagtgcttaagaacattgcttcaatgaataacaaaagctagaatcagtcttcttgcaaagtaatgaagctaacatcttagtctcaaacagaagccctattgccctattttgttttcacttaaccccgagaaaccacaggaaagaaaacttgtttcatgtgtgaccaccctagatactcgggtgcgcagttgcagatgagattggaagtgtgggcgggacgcaatggctcatgcctggaatcccagcactttgggaggccgaggcgggtggatcacctgaggtcaggagtttgaggccagcctggccaacatggtgaaaccccgtctctactaaaaataccaaaattagctgggcgaggtggcatgtgcctgtaatcccagctactcaggagactgaggaaggagaattgcttgaactcaggaggcggaggttgcagtgagctgagattgtgccactgcactccagcctgggcaacagagcgagactctgtctccaaaaaaaaaaaaaaaaaaaaaaaagagagagattggaagcgtgcaattattcagcagtgtcttctagcccatcctgggctgggcctgggctgaggctgagttggacagacaggtcccagcctgtgggagctccaggtctggggaggacccggccattcactgagtgcattccaggccgggcaggggactgtgtacagcactgcagaagtcaaggaggagctgttgacagcccacaggtcacggaggcttcccagggaggtgcccctgggtcatgcctctgggtggatgtcaccatgcagacaggagcgggaggagacccttgttactctcagtggagacccgtgttgattcttagaaggtgggatgctaattgaggagcagggccgctctccgtgctgggcttggggatgattgtgcggatgtaatgttcaccttgcccctcaccagtcagaagcatggaattgctgacaagcacagagcttggcgtggggttggaggttgcatcagtctcctgcggttgctgtagcgaagggctgcaaactgggtggtttggagcagcagacaggtactcacagctttgagggccaagagtcccatctaaggtgtcagcaagggcagtgccctcagagcctcaggggtgggtccttcctgcctcttccaatttctggtggtgcccagagttccttgaagtcccttggctcgcagctgtatcactctgccttggtctttacctgccgccttccctcggcatctgtgtcttcacacggccctcttgtaaggacaccagtcattgcgttagggcccaccctaatcccgtatgacctcctctaaacttattacctctgcaaagaccctatttccaaaaaaggtcacattcccagtgctggcagttaggacctcagtgtatctttgcggggacacagttcaacctgctacccatccatcattttgtattctgagatctttttttctgtttttagctatgtgaaaggcatctactcttttggcttgatggaaaccaacttctacgaccaggcagaaaaactcgccaaagaggtaagtgggtccttcctaaggtgcctgacccctcagggagtagccgttggctggaccagggcatatgaggggcaccattcgtgtgtgaccccggcgaaccccatccctggtctcacttcctcagagagactggggagctcatgttagtgtgagcagctgccgcccgccaggggctgtcattcacctgtggcccccccaaagtccccagagccacgttccttggctaacactggatccacgtctacagatgaggttgatggggtacggggagcctgtggtcagcctgctcacttagggttgcacagaatggcaggtctgggctcccaccagctctgcctggctccggagcccacactgccctgctgggacaggactttgtaggaggagaagtgtaaataagcgttggctcttccttcctgaacttcgcatttctaagcatcactcacggcaccagaggttcagggagctgagtgatgatcgccagtcatgatcattgctgggtgcccatgtgtacctgggcccagggctgggtggcaggctgcagctgtcaggcctggggcgcgaatggtctcacgctctgggggtccctctcctctactcctcttcttgcaggagtggaaactgaggcccatggaggggctgccatgcacaagggagtgacagctgctcctgtgcccggctctgtgtggcacttcatgtgtgtctgcttgcatccacacagctctgcccacgtgatgtccaactccttgttgcccagatgaggggcccaaggctcagaggccaaggctagagcctgcctaagaccacatggctcagagatggcagagccggattctacccaggctacctggcaatggctgtcctttcagctgcctgctccaggccctgcctcccaacatcctggctggggttcttcccccagtagttgccctagtcggcctgcagcatcctctctgggagacagcattggggcccaagggtcgctgcgctctctgaagactgctctgattacagaatccgagacttgaggcttgagtgatgtgttctttgctttaactctgagtcagggcaggtgggggacccgagtggctttctgacagtcttggttccatggcctgggtgaccagacagcaccatccaggggtcagctgtaggaaagtcccttggagaccatggtagctgggccctcctgtgggtggcatccatctgggcacctgagagctcctgggacatttggagaagctctggacaagggtagctgtggcaaaccagatgtggcaagtcccccgcactgagggtggccaaaaaaacatgcaagcccatgccttgcaaggagcaagaagtggtggatagggtcccctcccttctccattgctcccctttcgcctcctgtcccttgtgttgcaggcaccaactctttgtcttcaacaccagcaccccacagacaactactgggcaggaaaagcaggctgtgatggggccaggagtggtaacacatgggctctgtgtctgcagccccaggctggtgagggtaggaggagccagggcaggagcaggcaggcggcaggcacaggcacagccacagagcttggggacctggagctccatccaagtggctcaatgggtggaggcttagggaggaggcggcaagccagggctccaggagccagggctgtagaggggcaggtgaggactggattctgctgggccttgtagcctgggaatgcagtttggactccttcccacggaaccatgggagggctccaagagagggaagatgccagtcagctcatcagagctggtgacagccaccacccttcactcctgccattcgtgaaagcagcatgcttagcagggtcccgtctcggggccccacgcccgccctgcttagactgtgcccaagtgtcctgtactcagagcccctgcccaggggtgcccacggtcccctacagacacactttctttccctctgttcccacatggagtgggctgggcccacaaaagctgagtggtgggcagggaggcagggcttgctggggccgacctcctgccaaaagcctcacaggaggtgctgggccagggcagaagagcttggggcttctggacccctatgaaaggcgtggggagactgaggcagtggggctggcgggaactcatgatttggcatgggggacctgggcacaggccaggcaatggggcttctgtgagcctcagtttactgctccattttctaagctctgactgtggctgagtagatgcttagcaaacatgagctgaacacataaatagaagaaagaaacggctaggaggggaggatcattccatgagtcctgcctgcctcgctggtcgctgtcaagctcacaggtcatgggagcggctgttgtcatgaactgtgataacctcagagccagctgtttctgcacccagaaagccacgtgtcctcacatatatggtagtgggaagaggcagtcacagccactggaggacttgatagttcacaccacgttcacatgggcagtaaccacttctctaagagaaaggcagcatccgtggccttccaggcaggcggcagctgaggcccagagagggcgggtatgttttgcaagcacctcagctgtatgcagaatgctgtgggcttgggtctgagccctggctttagaaagatcctgctgctgtccagctgggtgaagtcgcatagcctccctaagactcagcttcctcatctgtgaactgggcagtgagacccatgagctggtgtgcccgggcaggcaggaagtggtgctaattgtcagtgttttgagtcagagccccgcccccccacttgctccaccccgttcagcccaggcccctcttgccccttagagacctgccgtcgcctgccccggcagcctgactgatctgctttatctggaatcctcttccccgcaccctgcgtaggctttatctattaacccgacagacgcatggtcggtgcacaccgtcgctcacatccacgagatgaaagcagagatcaaggatgggttggaattcatgcagcactcagagaccttctggaaggtatgatgcttgtcaatgggtcacctccctgggaaattcagtgcatccccttgagtcaggccaaggctttatggacaagagttacagggcatggcttaattctcggggttccctctcctcctccacctgcacctgcctcaggtgtttggctgctgagcagaatgcaatcaagattccagtccccaccccaggcccataccttgccctagggactccactgagggtccagcccagacttctctgtccttacagggcctggtcaggaggagcgagcagcctcttcaaagcacatgagctgcaccatgacggggaccctctgtgggatgtggaaacgcagaggaagcattaaactcaactgggcttggggggacagtggctagggaaggcatcctggagggggcaacctctgagttggctactgaaggatgagcaggtgtgtgccacacagagggggaagatggagggcatcctagcccgtcactagcttgagcaaggcctccaaggcctacagtggcctgtgagggagaggagagctgcttactttggtgtcctagagcccaggtacaaggcggacatgggctgtgcaggaggccttgtcagtccctctttccaggggaggcaaggtggtgtccaggcagaggcagaaacgcctgcagaggcctcagggaaggaaaggctagcaccatggtggaggtgggccctctggacagacggggctgcatcaggtgagcctattgggctcaagggagatggggcctcccctgggacagggacacagcgtcgctcactcagcgtttactgaatacctgctttgtatttggggcagcaagaaatcagggaagggtgtgcacttggctcccaagcaggggccatgcagtctgagccttgctgcggaggatcctcgggcctccagattcggctctgtcaagggggcagtggtcaggttcccttctcagggacactgaggtttgtttgaggtttctgagtgctgggcactctagcttgttgaggatcacgagtccagtctcctgagcttggaaataccctagcaggggccagctctgagcccagcacaggtcctactttaacactgcttcatactgagggcagcctaaggtagccacccacataccacccactcccctggctctcggggctttgccagcacctgttggagtgtggccctgggcctgttgatctctgcaggtttttgtttttgtttttttttgagacaagttctctctctgtcgcccaaggtggagtgcagtggcacaatcagggctcaccgcagcctcgaccgcctgggctcaagcgatccttccacctcggcctcccaaatagcagggactactggtgcgtgccaccacacctggctaattaaaaaaattttttttttttagagagacagggtctcttccctatgttgcccaggtgggtcttggactcttgggctcagttgatccttctgcctcggcctcccaaagtactgggattacaggcatgagccactgtgcccggctgatccttgcagttttatccaagtgccctgagctgtttaggcacccatgggcctcgcacctccctgtggagtggttctgttaatccttttctcaacttcacatgtgaggaaggcaaagctggagttgctgaagtaacttcctctgcaccggtcctggggctgctgctccccagctcaggcgagtaggttgggaacctcccctagcctcagtttcctccttggtaaatgcagcataatttcttcaccgcccttcggaatggaagaagattatgtggcctggaggcacctagtgcagaatattgtttcctgcactcaaagatgatggtttctgtggctaggcgcggtggctcatgcctgtaatcccagcactttgggaggctgaggcgggcggatcacctgaggtcagaagttcgagaccaccctggccaacatggtgaaaccctgtctctaccaaagatacaaaaattagccgggtgtggtggtgcacacttgtaatcccagctactcaggagactgaggcaggagaattgcttgaacccgggaggcagaggttgcagtgagccaagatcgtgtcactacactccagcctgagcaacagagccagacttagtctcaaaaaaaaaaaaaaaaaaaaaaaaaaagatgatggtttctgcattagcacaaaacaacatttgtttttttcccataggccttcagacttttcataaattctctttttttttttttctccaggactctgatatgttggcttgtcataactattggcactgggctttatatctgattgagaaggtaaggtgaccatctgtttgcactgtcttatcctataaagatgtctagagggagaaagatttttctagcttttgctatgtattcacatccgttggagccctgatgcaatggagcattaacatttccaaagagcactctaggcttcaacctttttagggattttttcactgtggaggcctggaaatcacatctgtggtgtataacttgcagagaccattcagagcgagtgcctgtggctggagtggagagccaagccccaactccgcagggtgtacctgcctgggccatgagatcttccaacgggagccaggctatggggcagctgctcaggacacccttgaccccagtgattccgccacagggttccatgtacaagactgtcacttgcagtgctccttatcgtgcacaaaagctagaagctccctgaatgtccataaagtgagaaatgctgagaacatgagggccttgtcatgacatgagaatgtgatgatacagtgtctggaagacagcacagaacccagctaaatgtacaggagaggaaacatatgcagaaaagaaaaaggcagctgggcacagtggctcatgcctgtaatcccagcactttgagaggccaaggcaggcaaataacttgaggtcaagagtttgagagcagcctgggcaacatggtaaaaccccatctctactaaaaatacaaaaattagccgggcatggtggcgcctccctgtagtcctgagcctgaggcatgagaatcgcttgaacctgggacgcggaggttacagtgagccgagattgtgccactgcactccagcctgggtgacagagtgagaccccatctcaaaaaaaaaaaaaaaaaaaaaagaaaaaggctagaaagaaatacatgaaaaagcttgcagcagttagtatgagcaatacctatattaactttccactaggagagagaatgcttccacagcaactgtttcttcagtggtggcggcacaggtgctgctgtgctttctacactggggaaccaaagccccggttggaagcgggttcaccttctcccatcccgaatgccaccaagacaccgtccgtccacctctgagaggaggtggaggccggagaccatgtgctcaggggtctttggcctggccgttctcagttcacgtgccagcattacactttgccttctccagggtttaataaggagaactttattcttccagggcgaatatgaggccgcgctgaccatctacgatacccacgtaagttgcattcacaccgtgtttggtttgttgcagcattttgcctttgagtctcaaagagaccagatttttgagttcatcaggattgtcccagccagaaaaacagctggagcaagaacacatttcttgtgtaaggcctcatggggttaattttgccaagagcaatgttgtaaccctgcctatgatggggacagtggttggccctgctcaactcgagggtgctgatagatttacacatctaagggcctcacctctgcaattgtggactctcctccagccctttcagatcacttttctttggtaagacaactggtctacccataggaattttttttttttttgagacagagtttcgctcttgttgcccaggctggagtgcaatggtgcgattggctggaattttttttctttgctgtgataaaataaaaataacataaaattacgtgtacaaggccgggtgtggtggctcacacctgtaatcccagtaatttgggagtccgaggcaggtggatcatttgaggtcaggagttcaagaccagcctggccaacatggtgaaacgctgtctctactaaaaatacaaaaaaattagctaggcgtggtggtgggcacctgtaatcccagctactcggggggctgaggcacgagaatcacttgaacccaggaggcagaggttacagtgagccaagatcacgctactgcactccagcctgggtgacagagtgagactctgtctcaaaaaaaaaaaaaaaaagtgtatagctctgtggcattaagtgcattcacattttgcaaccatcaccaccctccattttcagaacattcttcatctacccaaactgaaaccctatacccattaaacactaactccccattcctcctccccaggcccaggcattcttttgagagggggaaaaaaaaaagcctgaagcctgactcacagctcccaaggaccccagggatggcttcatcagaaaagcctgggaccacagaaatgcttgtgatctggggatctaaacatcagagaaaaacacacagtaaatttcccttgaagtaatcctttctacacggtcaggaagctgtagtaagaaatgaagggtgggccgggcacggtggctcacacatgtaatcccagcattttgggatgctgagacaggtagatcacctgaggtcaggagttcgagaccaacctggccaacgtggtgaaatcccatctctactaaaaatacaaaaactagctgcatgtggtggtgggcacctgtaatcccagctacttaggaggctgaggcaggataattgcttgaacccaggaggcggaggttgcagttagccaagcttgcgccatttgcactccagcctgggcgacagagggagaccctatctcaaaaaaaaaaaaaaaagaaagaaagaaatgaagggtgacatacaccgtgagctcgaggtgggctcctcagcaaagctgagtctagaaacgtgatcgggcagacagccctcccaccagtgtggtctgaggcccaggggtgggaggtggcagatgctttgggcctggcctgggccctgggtatgcaatgcagtgggctctttcttcaggtctacctggtgacccctctagtgcttggagcagtctacaccccaggcaagggtgatgggcctgtcagttgaggtgatggggacagtggcagagggcttgctctatgcaggccccaccccacctggacaggctgaccctggctgtgcctgcagccccatcatctgggccacccgctgagcccgccttggccgccctgtcttccagatccttcccagcctgcaggccaacgatgcaatgctggacgtggtggacagctgctccatgctctaccgcctgcagatggaaggtagccatccctgcagccccactggcttctgcctcttcctcccacatcatgaggagagggtgctgtggcctaggcccagggttgggcaagagctcatgggtgagccgctccagacccctctgcaggcctggccactgccttgggtaccgttctgcagctgcctcccagctggcccaaagctggagagggtgtccaggccacactactctttcttccagttcccaccgctcctcgatgtggacgcctccagctctgcacccagggcggcacctgctgtgctgttcccatggctggcctgcctgccaaaccttcggggcactggtagcacctggccacctgtctcgatgccacctcctttcctaaaacatgagagagtttctcaactccctgggattgtagacaggtttctcaaccttgtcatgctctgcaggtagcctggagggaccaaccacagctctgggggctcttgagggctctagccaaccactggggtgccagatggttctccccttgtctcaggctcagcagagtcaccctggaaccacagaggcctgggctaggccctgggtcagcagtacgatgagggctgagcaattcagggacctgagggagggcatggcaggctgtttctagagattcagaaggcttcctagtggaggtgaaatgtgagctactgaagcatatgtggggcttgctgggcagagacaagggaaagagttactctcagagaaagcagaccatccaaagctaccgggacatagaagccagcagcctgctgcgggacaaggggctggagggcaggcttgatgtggtcagatgggccaacagcaggctgaggggcacaggagccagggagcccacctgtgggaagggcaggctgaggctggagacccagagaaaagtggggagcctgggggatccttggggaggtcgggggatccattgggaagccaagggttgtgtgggaaggccgggggatccaagaggcctagggtttgtcaaagcggccagaggctttgtttaataacctttgacactttttaaaatgtgcttcctacttacgcgtctatggcctctataattagacagtcctgatagaggcctaagcacaaggccagacgctgcccgtggccctgcccacctccccggcctctcacctgggacagggtcatcaaggcctccaagggaagcgccgtgagggaggcccttgcacgggacatgccccagagcctcactccaggccctgggtctcctccccatgtcctcaggagtgtctgtgggccagcggtggcaggatgtcctgcctgtggcccggaagcacagccgagaccacatcctgctgttcaatgacgcacacttcctgatggcatccctgggtgcacacgacccccagaccacacaggagctgctgaccaccctgcgggacgccagcgagtatgcagaggggccttctcggggtgggggtcctcaccctgccgagagggtgagggggtgctagggccatgctgagacctgttcagtgcctgccccgcctgtgagtgcagcaggggggatgcccatggaggcagctcccaggtgtgcacccctatagatgtgcatcccctggtgcagacccccaaggtgtgtacacccacagctgtacaactggttgccccaagacacagagctgcctccatccccagggtgggtatgagatccgcagggtcacagggctgcctcccgtggagaggacacagtgaagccctgaagccagagacacctgctgcttacaggccctgaggtcctggacgaggtgcttctgtgctctgaacctcagtttccccatctaaatcagggcgatgcctggcaagagctggtgagggctgacctggaggacctgggctgccctgcccattcccttccgggggtgatgattgccttggcttgcagtgccaggcctttgcctgtattatcagcaatcctgacggttctgttagattggcactgttatgcctgcttacagatgagcaaactgaggctggaaggtgggggaccaggtagctggaagtgggcgaactccaacccagctctgagctcagtaccctgtcctgtcccctcgatgggctgccccgcctgtcacctcacctcatcagtgtggcatgtgtcaggcactggaccagggacacctcgctgaggaagaaatggctctgcccttcccggatgttctgtgatgggcaggcagctgagggcaccgtcttgggttcgcagatccccaggggagaactgccagcacctcctggcccgagacgtggggctgcccctgtgccaggccctggtggaggctgaggacgggaaccctgaccgcgtcctggagctgctcctgcccatccgctaccggatcgtccagctcggtgggagcaatgcccaggtgagccgatggccgccagctggggtgcctagggcctgggccagggagtctgggcgccccgcagcccccaagtttctcccatggtgttggtgccaacaatgtgggtgtgaacgtgtctctcacactcccgccgtgtaagttcgtcgttgagggtgtggcatcaacaccactgtctccctggagagcaggcagcccgcggtgggcgggggctcgcctcccccatcctgaggtacaggagactcacatgcccgattgacatttcagagagacgtcttcaaccagctgctgattcacgcggccttaaactgcacctccagcgtccataagaacgtagcccggtgagctcctggcccctgcccagcactcccgaccttcacaggctctccctgcagacctcaggagtgcctggaagccccaccacccttggcccgagatgctcctgcttctgaggctgtgaggtcgggaggctgtggggaatttggttctcctttgttagcaggctcagtgtgaccaagtggagccagccccaccccaggcccaacctcccacccttcccagcccactcccttttagccttgctaagctacctgggtacgtaaacacgtcctgctctttcaggctcctgggcctttgcacgcttggaacaccctttctccttttttgcacctggccgacacctaatgctcagttagacctcagctcatttcacctgcctgcctgtgctgggtaccgagagggagcagtgagcaggcacaccagtcactggctaccaggagcccatctgtagtcgggggagcgacagggagcaatcagtcccacagacacgtaaactcgcactgagggagcagcagctgagggcagacccgaaaccacagtgggtttagccaggccaggcatggggctggtaggagggtggcgtggctggagggtgagtgttagggtggcatggctggagggtgagtgtgttagggcagcgtggctggagggtgttaggagggtggtgtggctggagggtgagtgttaggagggtggcgtggctggagggtgagtgttaggagggtggcgtggctggaaggtgtgttagggtggcgtggctggagggtgagtgttaggagggtggtgtggctggcaggcgagtgtcaggagggtggcatagctggcagatgagagtgctgggggaactccaaagagccctcaccattgccagcagccttggtgcttccatggcccagcttgcctccctccacttaggctgctgagctcttggccagcagctgcgtagcccgtgtgcctgagcggcgagtttgacacctctccttgcccatgtccctgccaccctcagacataagtgaaaggaagaatagaggagtcatggggtgcctggtggggaaggtgtgctgtgagagcaggtggcagcccgggtccacaggaggcccttggctggtgacaagcccagtggtttaggcgcaggtgcaccagcgcagctccctccaggcagggttacccaaactgagctgtacaggttctgtggtactcatgaaacaggtctggctggcagcactggaaccgcctagaactgtaaaatgtcttggacgcatgctccccgctttccccttccatggctgtagacaaaaccatgcgtgtttctttggtggtcaagccccctggggagctcaggctgtggtgtgggtgggagttggtgcctctggcagcagcggtggggaaagtggctgtgtggacaggagggctgaggatggagctggggtgacatctgtggggcagtgcggcagtgccgatgtggccttctgcggggcccagtgggggagggcagggggagagcaggctgcacagggagccgactgcattaggagacgtggagggggccttctctccaagtcctgtcctgctaccaggcagcatccatggggccatcagcacagctcaccagcccccaaggtgggaaaccttccacccacagccatggtgccccccacaatgagttcccggccccagccccttcacaccacccacgccctctagaaccactgttttcaggtgtttgggggctgtcttagtcagtttgggttgttattttaaaagtgccacagacaggccgggcacggtggctcatgcctgtaatcccagcactttcggaggccaaggcgggtggatcacctgaggtcaggagttcaagaccagcctggctaatatggtgaaactccgcctctactaaaaatacaaaaaattagccgggcgtggtggtgggtacctgtaatcccggctagtcgggagcctgaggcaggagaatcgcttgaacctgggaggtggaggttgcagtgagccgagatcgcgtcattgcactccagcctgagtgaccgagggagattctatctcaaaaaattaaaaaataaaagtgccacagtctgggcggcttgcacagtaggcatgcactgtctcacagttctggaggctggaatgtccaggaacaaggcctggctgggttcagtttctgctgaggcctctcttcctggcttgtggacagccactttcttgctgtgtcctcacatgacctttcctttgagtgctaattctttcacgtctcttctttcttctttctttttaaatttttttatatttttagaggcaaggtctcactcggtcatccaggttggaatgcagtggtgtgatcacagttcactgtaaactcaaactcctgggctcaaggaatcttcctgcctcatccttccatcgtgcagggattacaggggtgagccaccacacctatctcttcttataagggcactaatcccattcacaagggccccaccctcatgacttaatcacctccaagaggccctgttcttaataccatcaccttgggcatttgggcttcaacatatacatttagcctggacacagacattcagtccacagcagggtctttacctcaaaccgtacctgggtcttctctcttcaaacctgggttttccccactgccacctgttgtgccccatctcgggtgtggcttcctgcactggaggtctgtgccctcccatcctcacctctccccaaactgaggccaggcctcctgcccctgggccttggcccttgctgttccctcagtgccgcagtctagcctgcctgtgttctgccttgggaccaagggaccaccaggccccacatccctctagaaggttctgtaacaggacctctgtgtctgtttccacaggagccttctgatggagcgtgatgccttgaagcccaactcgcccctgaccgagcggctcatccgcaaggcagctaccgtccacctcatgcagtgagccagcctggccgcctccaccctgcagaacctcagtggtggcgtcactgcgtccagtcagctgctccaccgggttagggtcaggagacggccagagcctgtttgttagggctgttagagggtgatcttcagttttacaggaagtgggtcacgggttaattttaaatgtgattccgaatctcctttcagtcctcgagaagggccaatgagcatttttcagcagtcacagccagtgtgagtgctgctctttccacctgccttgcaaattctgtttcccaggggaatgtgtctactgcctggtggttcaaaggttggaaggcagggcagaggtgggggctgattctgctgggacaggtcttccagaggcagcctccccccactgcctgtccccgtccccaccaggctgcccttgggatggaccttttcattcttttctttatattctagacagtctctgttgtctcattgtgttgctgtcccatttttcaggtgagggtaccggggtaggggagtggcctgcccagggtcacactatgagaggcccccacctgctgcctttggacgcagccccctgctgctgcatccaccacccttcttacagatcagcgcgcacatggggtccttctgctgtctctggggcgagtcttggagccccctggggggctctgttggtgctgatttggacccgtttctctttttaaactgcacatcataacagggcttcatgtcgagcatgattttaatcataaatgcacttctgaggtgcaaggattgagctcagagctgctctgttgtggcaaaacccaaagtgctgtgatgtgtggctgtgacaagcctggagcgggtcctgtgagcgccgcctctgtctcctgcttccccactgaacgcctgctgaatgtgccgctgactcagctgtgctgctttcagccctcctgtgaggggcggtcccagtgcacagatgtttttcaagttcctcagtttgtactgaaattagggattcatcagggcaggaagcaggcaggcctctcagaagggagaggaggcctccaaatctattgagtccccacagtttgctcaagcccaggcaaatttctgtgattaaaatgaattcatcagttcctccaa

SEQ ID NO: 1557 - DNA, 278 bp, Homo sapiens
cagagttcaggccgggccagaccgggccagtccagagggagaagccgctactgcaggagacagagcgatttttccgctgcaaatccttgagaagggaggatggaggcggcgggacgacccagtgaagccggccccgaacgccaagtgagtgtgtgccgtgcgcgcgcgggtagctgccgaccgcaacgacataaacttgaaagtgaccgctgtcccggagctccctgctcccaagggacccgtcgcgttgcagagttgtccggtcgggcctctggggc

SEQ ID NO: 1558 - DNA, 5958 bp, Homo sapiens
ttcctggtggtcagatgaaagggcagattaaatggactcatcagggtaagaggaataatatgggtaaaacaagaaatggcccgatagtttcacactattcctatacctccaggtccggaagacaggtaaaaaattctataatgtaagaatggaggtagttaccctgatttgaccctgtgtgggaaatgctgaaagcaccaggaggaagccggttcccgtgagataagttaacccggcctgacagaatcaagaaaattgagatgagatttgaaaggacccgaaaatgcaggggttggctttctgactgggaacttaaaaatcactcttcatgcttccctggtcctatgtgataacagagttagagacttgagtctgatttcagtcatcttcagggaccagtctgatgttgtagcaagaagactccctttaaaagtgttactgttcaaatcatatatcaggttgaatcacattcaacagagatatattctagaatacttttttagaagaggctaataaagggaagaattatattgaatggaattatttttgataatgagaattatttgggtagattcactgaggctatgtcaacatgatatttagaccaacaggtgatcaatgtttggaaaatacaacaatgacttatttaaaaattacccttcctgctatttagacaaaaacaactgatcagtggttctgttatgtcagctgactttgttagtatcatgttgaaatagcttgaagtaatatcttttatccccttgcaaattcttgtcttccaatcatctcccatatattttcataattagttgtttatgacacctttgtttttctccctctgttcagtatttcaaggaaaattatggatgccagtcttggctgcacaagatatccattacgtacttatacattttaaaatgagtactaattttcactgctaataattctgtaaggacacatcaaagctggccaaaataatgaattttttttaaaaagcaatacctggtttccaccttggactgactttgatcctgttccacttttgaaattttatttgttccttttccatcgtggatgttcctctactttggcaattgtggagggctaatcaatcttatgttagcaggacaacccatgaaaaacaagtcagagagtgaaggctttttcccctaatcctggcagagcagggcgtagaaaagagaggatgtccgtgcttaattctagatacttttgagacaacaccttcagaaaacacataatttaatctttgccatccttagatagagaagggctatagatcacatacgttatcaaaaactactcccttggaaaaaatatctttcgaaaatcaaatttaaacatttcactctgtgctgcatatttcttttaccattgaccattattatagggacccatgaagtaaatgtcacaatcatcttactagctctctctctctcagcaaaataaaactgtgatgtgtcttctttgtaaaagtttaggtataaaatgctatgcaactttttctttatagtaagagctttattttctttaataatatagcccaacttatatgttttaatctcccttgtccctcagaataagcagaaaatataactgcagctgtatgtcgtagacacaagaattgaaactgtgcagtcagtagagctgaacttagctatgaattaatttaaattaattctaaagtgactctggtttccattttagtctattagctagagggttttggctgttgctttttttaaagttaggtccacacagtgaagggaaaagagtctgtgaaggtgatcagtgtagcagtaagacatctaaaatcaagacaatgacatgggggctttgtgtacttagctggataattcccttctactgtcctcttccccttggctgtgtagataaaattgtgcattcaaatgatggtactttgacttttgagggtttttatttctgttattcacaaaatactcattctcatttatgtatattgtatgtttaacccccagtgggatttctggctgctgaaaccactttgggccaggaagaacaaggatgaagaggttcctgtcatttcttatggggttcacagaattatttggggcttaaatggtacaatggagacagtcatgtgcaatgcttaagatggtctgacagggtcccttttgctggaggtgttcctgaagagattgaacctagtaacaggctttattttcaccttgtgtacaacatggcaaagactgctaagattaaaatccgtctcccatttgttacagcctcacctgcaccaggatagaaagcacgtgatggaatctgtgatgtctaatgtgtcttatgaaaattgccaaacaactgtccctggggattctgctttgattggcatttttagtcatgggaatgtatatttgctgatatatctgctctgtgtttgggcctctcttgctgtcattatgatgtattttgagatgattagtcaagagtcaaggttgcgagtacaggccaagaccatgggaaaaaaagccatgctcactggccaataaagagcttgatgctgcctggccaaatgaggtgactcagatagaatctgatcccattcagagcttggtaaatgtcactgtacagaagacattgaaaaggaagaggcatagtcatgatcaaaaggatatattgacagttatctatagccagggtagttgttaatacctgcttgtttggggagatatgtttgattatagagagactctgggccaccctcaaacaccgtcagatgcattagcagcccactgcatgggacaatcgcaggcagatacgaggaatgtatcccctgcctattttccttgtgtaacaaatggaaaacattctcccctgtgagaaataatgcaatttctaattatctggatgttcgttgaaaatatattagacattctccctgaggttaaaaacaaaaagtacgtgaccagtttggtaagaagtattaatgaagtagctaatattacagcttcattttctactaccacctatcataatggtcttagtcatttcacacaaatcagaacttccttccccaccagggaggacaacatcttcatgctgtgattgaagcatccattcagaacacgaggcaatattgcagtccacagggaatggatgcttcacttgatctccggaccttggctgcagaggccatcgcagcttttgaaaagtgaaggggttaattcccattggtgtctttgcttatagcatttttctctaacctataacaaggagacattacattttactttagaacatgagaatagcagttttgctcatgacttaccattccagctgcatgggaaagcaaagcagaaaacagtgccccaaatggaaaaaagatactcacacagaacaaaacagttcttggtcttgttcttggtcttgtcaaaccttgcctgatgctctttctaaagtcaaaatatgaatgctaagaaggcataacctacatccttctctgatttcttcagcagggtcaaaagacagttactagcaatggggaatgcttgtcactgtggagaaagagttttgtatatgtctgataccgttgttataacaaaacaaatttttttactatagttttttgttttctacctgcacacccaccagaagagcacaaagcaaggccattgcaacaggcatttaaaaattattatcaaacatgcacatgcttgtacacacacacacacacacacacaaacaggggcatttgtaaaggtgtccctggaatgtaagatttataatgtttaaggcaaggtgaaggcattgccaagtgtgtgtcgctcataggactagtgtatattcactgaaagttaacctgatgatttgttattgtttgaaccatatgctgatttgcttctggtttctgtttagtgtgttctctctgataaggggctgaaagattctgcatcacacatcctctgagacctaccatgtcgcacactttgttaatgacaaacttcactctacactatacagtaccttgttgatatattcagtaaagtcttattttaaaagaaaaccacattgtgtttatctgagtaagttcattgggatacagtcaatacttgtgctgttaatgtagaagaaatgacgcaggagggcaggaataaaagaggtaataggactttcgtattctcctatcatgaatatgacttgcatttctaaaggccatttgatcctttttgtgtgaggagtttatatgaaatcctcatgttcttttaaatttcccaactaaattgtgtgttcctacgaataccttttaggtatgcacacatacacagagcatcttattttatactggtgaaatctatgttgtttaggatacagataatgtcattgtatttatcctatcagaataggcttttcccctatttcaaaatagatgctattggctttattttttatttttaaattttttttaaacacggtcttaccatgttgcccaggctggtctcaaactcctagatgcaagcaatcatcccacctcgatcacccaaagtgctgggagtacaggcagaggacaccatgcccagccacgctattggttttaaatgtcagatttctttaagaattctcatagtacttttctgccgcagaatttatagcacatctgtccatcctttcaataggcactcaaggaaatgtatctattcatatgctcaacttcaattgattagtctcatatgatttttcagaaccccttttgctaacccctcttggccatttcattaataatgtatttgacagagattgaatcaggaaataaattcatgacatttcagttaactagtattacctgtttgtagaatctctgttggaacattgactatgaaagacagtgctaacaagtaattcatattacttttggggattttatgtaaagtaacatctatgctattcttgggtacttttgccaagagttacagaccttattctatacagactaaaccattagtcaaaaaataccattcattcaaaataattcattaatgtcctcctactctgttccaaacactaggctgagttcagaggcctcacagaatagtgaaatgcgttcttagccaaatcaggcaaatcttctccctcactatgtccctgaagaaatctcttcatctgatatatttactattcatctactttctacagcactatgttagggtcttccggggattcagagaaaagtgtctgtgagccattaagaaactcacagatcaggtaataaacactttttctaatgcattccagtgtctcagagcctgcataatcactttatactacttcattaaattgacaggacatctaaggtgacaaaagagatgtttctacctgttggtaaggttgatgcaactgtcataattagatgttcttggtttttaatagatgcagcaatgagagagtacattgctaaagtcagaacttaatttgaattaaattttcaagtttccaccaagtatttgaaaacttagaaattgtatttcgtaattacacatgcagacatttaaatttttattaagcaccacgatggaactcaatctaaaggaataatggcacctgataattactaacaacctttgtttatataagaccttgtgcaaactgtgtgataacgtatgtttgcattctgtctttaaaataaccctgtaaggtgcgttattttaatttttagattttaaaacttagcttcaagagaaattaagtgattagtctatagctacaaatcctgtaaatggcagagtcaggaattaccactgagcatgactccatggactcttaattgttttcctgcctcttaataaattgaccatccttgagactgactagccttcagatttttcatgatggagctatcataacttctcagtggatacatatattatcatttatggcaaataaagggaacattttagaagcctc

SEQ ID NO: 1559 - DNA, 2545 bp, Homo sapiens
ttgggcttgtgttgacacggctgataacttgccatcacctgttgccagtgtggaaaaattctccctgttgaattttttgcacatggaggacagcagcaaagagggcaacacaggctgataagaccagagacagcagggagattattttaccatacgccctcaggacgttccctctagctggagttctggacttcaacagaaccccatccagtcattttgattttgctgtttattttttttttctttttctttttcccaccacattgtattttatttccgtacttcagaaatgggcctacagaccacaaagtggcccagccatggggcttttttcctgaagtcttggcttatcatttccctggggctctactcacaggtgtccaaactcctggcctgccctagtgtgtgccgctgcgacaggaactttgtctactgtaatgagcgaagcttgacctcagtgcctcttgggatcccggagggcgtaactgtactctacctccacaacaaccaaattaataatgctggatttcctgcagaactgcacaatgtacagtcggtgcacacggtctacctgtatggcaaccaactggacgaattccccatgaaccttcccaagaatgtcagagttctccatttgcaggaaaacaatattcagaccatttcacgggctgctcttgcccagctcttgaagcttgaagagctgcacctggatgacaactccatatccacagtgggggtggaagacggggccttccgggaggctattagcctcaaattgttgtttttgtctaagaatcacctgagcagtgtgcctgttgggcttcctgtggacttgcaagagctgagagtggatgaaaatcgaattgctgtcatatccgacatggccttccagaatctcacgagcttggagcgtcttattgtggacgggaacctcctgaccaacaagggtatcgccgagggcaccttcagccatctcaccaagctcaaggaattttcaattgtacgtaattcgctgtcccaccctcctcccgatctcccaggtacgcatctgatcaggctctatttgcaggacaaccagataaaccacattcctttgacagccttctcaaatctgcgtaagctggaacggctggatatatccaacaaccaactgcggatgctgactcaaggggtttttgataatctctccaacctgaagcagctcactgctcggaataacccttggttttgtgactgcagtattaaatgggtcacagaatggctcaaatatatcccttcatctctcaacgtgcggggtttcatgtgccaaggtcctgaacaagtccgggggatggccgtcagggaattaaatatgaatcttttgtcctgtcccaccacgacccccggcctgcctctcttcaccccagccccaagtacagcttctccgaccactcagcctcccaccctctctattccaaaccctagcagaagctacacgcctccaactcctaccacatcgaaacttcccacgattcctgactgggatggcagagaaagagtgaccccacctatttctgaacggatccagctctctatccattttgtgaatgatacttccattcaagtcagctggctctctctcttcaccgtgatggcatacaaactcacatgggtgaaaatgggccacagtttagtagggggcatcgttcaggagcgcatagtcagcggtgagaagcaacacctgagcctggttaacttagagccccgatccacctatcggatttgtttagtgccactggatgcttttaactaccgcgcggtagaagacaccatttgttcagaggccaccacccatgcctcctatctgaacaacggcagcaacacagcgtccagccatgagcagacgacgtcccacagcatgggctccccctttctgctggcgggcttgatcgggggcgcggtgatatttgtgctggtggtcttgctcagcgtcttttgctggcatatgcacaaaaaggggcgctacacctcccagaagtggaaatacaaccggggccggcggaaagatgattattgcgaggcaggcaccaagaaggacaactccatcctggagatgacagaaaccagttttcagatcgtctccttaaataacgatcaactccttaaaggagatttcagactgcagcccatttacaccccaaatgggggcattaattacacagactgccatatccccaacaacatgcgatactgcaacagcagcgtgccagacctggagcactgccatacgtgacagccagaggcccagcgttatcaaggcggacaattagactcttgagaacacactcgtgtgtgcacataaagacacgcagattacatttgataaatgttacacagatgcatttgtgcatttgaatactctgtaatttatacggtgtactatataatgggatttaaaaaaagtgctatcttttctatttcaagttaattacaaacagttttgtaactctttgctttttaaatcttaaaaaaaaaaaagttgctgaagtactgtacagggttgtac

SEQ ID NO: 1560 - DNA, 5161 bp, Homo sapiens
ccagcaatccaggtgcttacaggctgattgtacagccatgcacacagagtgccacgatgcaaaataggatgtggtaagggtcatgcagttcagaggagaaagcaagtgtggctgatgaacatcacggagcagtgaccttcatggacagacagaatttgagctggccctttaaccaatgaggaggattcaaacagaggtgaggtgtgtggggggcagggagaatattctggcagtgggagtaatgagcaaagatgcatggaaccgaagagcctgttaaggccagagtaagtccacctggagcactggggtttgagaagttcctaaggcctccctcacctctctaaggctctctcttactctgcaaaaccgggataagagtacccacctcactgggttgtttgaggaaaaatgagataatgaattttcagcctactgcttggctattaactgttagctgttctatcaccgccacttgtggactgggctaagtagtctaagtttctggcagaacagaaaggatgggggacgctcagcaacagagggaggaaatatggagctagctaaagccacttcatgaggcgcaagcttcttccagatggcatcagagtgcatgccagcaatgggggctgtagcccaggcagagcctggcccctgtctgccaggaattagcagttcattgttcagatagcagagttgggagggtgtctgctcgtcattttacagaaaatgacagcgaggctgagatggctgaagttcccttggcttctccactaagataacttcttgagaggacaatgtgaagtgtatctcgtgcctgtgtataagctctactttctaggggtggaaaagctggtggcctgtatctggatacctgtctatccagcttccacatggtctgaatctaccctttcaatctcagaggtgtttccagttcttctcaagtacttacccttgggaaatccaagctaacagaagtcctagaggtcaacttttctctccctgaccatttgtctactatccttgtataatgaccaatcagggtaagtgagggcgttaattctttccttagagactttttgtacagaccttatccaatcttggtgcaagggctccaagaagctcactttgagaaatgtggttctaacctatgaatctaaattcctcctgggcattatccctctctgctcttattctctccttggtagaatcagagaacaagatgtaatagtccctccagtacttaaatctaaaagtcctctaccactctgttggcacctggagagaggctgcaggtccttggcttcaaaacattagccaatgaaaagtccttccccaagctgcaaccagccagcccaggtcagcagcatgaggaatgcctttctgagggctgctctcaggcagagaagggcacctcctaccagaaacatgatgttctgaagcaccctcagagtctccttgcctggggagttgtactggggacaggatgtgcagggtgcttttccagagaggagtctgaggagaggccaagagacacacatgtggggaacaatattggccaccattcttggaaaatgaactctgttccagccactgcactcagcacttgacatgtgttagcttactgaatccctatcacaaacctgcaaggtaggtattactgtaaacgctacttctctcattttacaggtgaggaaaatgatactctgaggggttaagtaactgtacagtcatatagctatgtaggcagtgccaatattcaaagtcatgaatgtctgagacattaactcaagcttttaggctaaggtgggaggctcgcttgagcccagctgctcaagaccagcctgggcaacatggcgagaccccatttccacatgcatacatatatgcatacatacataactcaagcttttatcctgaggagaagatagtgacaacctgaagagcagaagaaatataatgttcaatccagcccgtttaaattgtgacaaatgtactacaggaagcttcgtgggaacatgtgtcttttccctctctaatatcatccttggagatgaggtgaacactttttactcatctccatcagtgacctctcaaggacctaccatccatgcaacttgtgattgaggatcagctgctctgcactgccgcacaccccctccctggcctgattctctatttgtccctgcctctttgctgacaagtcctactgcatcatagtcaagatctccctttgccagcctttaagactggctaggtgaccacctggagactgtcatggtccattcagataccaaggtctggctccccacaacttgtagccaagtccctgcttcccttacgatccacccgctgccttcctctcagtaagctactctaggtccagagcctagccccttgccctggcttcctgcagagaatagggacacattgggcagggcctagagacagagcagctcagattttaaaatgggaatttgggtgatggggcaagagcacagacatacaggtaggaaactggagggcatggaacaggtaactgggaagagtccagtttggccatgatacagggtctgtaaaagggagacatgagaaaagcctggaaagacctctctggtctgagaacaaactggtgaggatgctgttagtctggattctccccttagtgcatctgccaaggtgatatgatttctagaaacagagctttgaagcttctggggtagagaaagcctggccaggacctccaagggctcctgctggagaaggcttcaagataatcagtatctctattataactttggattccttgctctaaaaacagaggcaataataatagtatctgccttaaagcagttcacagaatttactgaaaggatgcctgacatgtggtaagaactcaatactggaaggatgcctgacatgtggtaagaactcaataaaagtttgcaaatataggccgggcgcagcgctcatgcctgtaatcctagcactttcggaggccaaggtgggtggatcacctgaggtcaggattttgagaccagcctggccaacatggtgaaaccctgtctctactaaaaatacaaaaattagttgtgcgtggtggcacgtgcctgtagtcccagctacatgggaggctgaggcaggagaattgcttgaatccgggaggcagaggttgcagtgagccgagatcatgccactgttctccagcgacagagtgagattccgtctcaaaaaaaaaaaaaaaaaaaaaaaaaaagtttgcaaatatgatccataggtaaaaatggaacacttaatagttgacctcaaacaccttccaccccatcccaggaaacagcagaactatacaaccaattgctatggccacaacctaagtgtcttggttcctaataacattattatttgtacttatttgttttagcctacaagaaacaagagtttcaggccggtcgcggtggttcacgcctgtaatcccagcactttgggaggccgaggcgggcagatcacctgaggtcgggggtttgagaccagcctgaccaacatggagaaaccccatctctactaaaaatataaaattagccagatgtggtggcacatgcctgtaatcccagccacttgggaggctgaggcaggagaatcgcttgaacctgggaggcggaggttgcagtgagccgagatcacgccattgcactccagcctgggcaacaagagcgaaactccatttcaaaaaaaaagaaacaagagtttcataattacattaccaacattgccactaacaataaacctcttaagtaatgtttaattttgtgttgcagtttgtattatcctgaaaagaaattccactaaagatgaatagcagagaactgtgttcaggtaagctgaattaattcctttctctggggagttatattatcaccttgatatagctagtttcacttgtttctatttcaacatttgtttttatcccgtcttcactcctccccttccctactgccaccaccctacctcgaggcgcatcctctctcacctggactactgcaggagttctgtctcttggctttaactccagcccgttgaaaattctgaatgatttttacaaaatgcaactcagatcccgtcatcccctgattaaagtccttcagctttgttaccatgacctacaaggctctatatgagccaaggtctgactctagcctcatttcctgcccttctcccttggcacattgacctcttttttgttcttccaagacccaaactttaacctcagtctctttgcattctcttcattactttctagcacatcactctgtattcttcactgccttattacaatcggaacttatatatttgtttacttgtttatttctgtctcctcaagaatacaagttccacaaaggtagagatcttgtccctctggctacctgttgactctcctgtgcctaatacagtgcctgattcatactactcaataaatacttatggaatgaatgaaacttgagttaactcctctgacaaccatatgcaaagtatctgagaaacgtgaaattactataaaagacttctgagcagcccaattagaggtaaaaacacaaaaactcatgcaccaagctcctttgggcttcatgcagagccagttcactctcattttatatacataattccaacaagcttgactatctggtttccttgtctatagctgatttaaaacagtaaatactatggaagaggagagatactgtcaaaattaactgttgacagcagtaggaaatgaaagagggaggacacagaaaaatatacatgaaacctcaaacccaggtattctgggaccatctaacttagagcaaacagccctacccctcaaggatattgttgtacaatgaagtgtttaaagatgataattactattatcataatcattagaatatgacggccaggcatggtggctcatgtctataatcctagcacctggggaggccgaagcaggaggatcacttgagcttaagagttcaagaccagcctgggcaacatagtgaggacttatctctacaaaaaataacaaaaatcagccaggcatggtggtgtgtgcccatagtcctagctacttgggaggctgaagtaagccaaagttgcacaactgcactccagcctgggcaacagagtgaga

SEQ ID NO: 1561 - DNA, 2595 bp, Homo sapiens
gaggaaagcgcccggggattaggaaacaagtagaggaacaggtggtgtgatggcaaaagggctcttccggtgccccctagtccaaagccagggtcttggagctagccaagtgcacctgagggagggtaggcaattgcagcagcaaaagaaggtgttcttccgttgcagttagcaaacaagttttacatctaagaatctttaaaaattctatttgagacccagcacacaagaatacgatagatgtcctcaaatgggggcttggctcacaggtggaaggacactaaattggtcccatctgatttcttgaggcaagggttgaacctggcttgcacaaatcacacctgtccaaagcaaccacgagttctactattttgcagcccttgctgctgggcgacgacgacgacctctctgcctcttctttccaccactacatcgcctcctggggcagcttctccctactccaccctgtgtacctttcccagaatacagaacctcaggccaaagagagatgccagccccattaatcacctctactgtaccccaatcatattacggaaagtcagacccaggagacaggactcaacagccacgctcatagggcagattccgtttgctgcctccagcccctcattcccgccttaattgtagggctctgcattatagccgcataattcatgcctccctaattatggctgtcaacagccccattgtaaagctgtaaaatgtacagcacctgctctccaggaaccctgtgccagggattggtagaggggagtgccaggtgtggatgggggctttgccaaagggttcactgattggcttctcaatcgccgtgtctggcatttatgcttgattctgggagcatggacaatagccaagaagtctcttgccgccaggtatcccgggacagaaaggggaagaggcgggtggggtataggaaagttaggggtttcctgtgtgctcttgctacaacttgcaagatttcacctctcccctagagggagctgctagggaaacagcttgcagaaagtaaaatgggaagtctggcatggtggctcatgcctgtaatcccagcactttgggagggtgaggccggcggatcacctgaggtcaggagttcgagaccagccaggacagggtgagatgctgtctccaaaaaaaaaaaaaaaaagaagaaggaaaatggactttaaagagagtagcatttggttggtgttgctggctggtacttgccggtgtggggcacctgaaatagagttgctcaggcagacagctcttcaaaggcactaatcctctcagcagctctgcagcaagtcctggcagagggaggtaagggaaaggacacagctttgaccctcacaagcagaggacctagaacaagctttgccatgccaagaataaatcatctagggcctacttagggagccaggtcaaaaagctgagagaaacctcgaagagtggagtgggaatcagagtttgagatggtgagggcagggagcagagtcagttggaagaagtgtttggttctgctcagtcctgttgtgttacaggggaggcctgtgctggattcagttcaccagggcctacaggcccttctgttaccctgaaccatggagggggccagtctcatttgggagtggagcctggccccatgccctgcaagaggaggagaaaagcttgtgtgggctgagtcgacaataggtaattggattgtaatcgcccgcctagcttccgcgcaccattgggggtgctgagtctttcagtgagcaatcagtactgtgtggtgggagagggtagagattcaatagcaaatcccaggtggagagccaagggggaggagcagcagatgggcaaattttctgtctctcccaccccttttttccttacccaaataactgcctgcctattagttatttactagcagatccaaggtagagccaaatcttttgtggaagctgggtggaaggctaaaatggaagggtaaagagctagggttttggggagaactcttccctgaaattctgtgtgttgaaggatgtgctggtggaaaaagaaagtgcatctaagagacaggcagctgatgagttgtggccctttgctctccaaaccctattggtgaccagacctaggtttagtgtactcgtgggagactttcaccctcaatcctcctcaggagcctgtcccaggcagcccaaaggtatctatggccagcaaacctggcctggggggctccccagccaagcaaagggaacaccattcattatcaggaaaggaggtgcctttcaccaagaaaaggaaggggagtggagccctggaggcagagggcagggcaaagtggcaggtggccagcctcattcaggctgatgcagtgcccagacgggccagccagtcagctcgcttgagttccaaggcctgcaggaagccttggactcgctcttcccgtctggccgagagtttgtgcaagcgtgtccttcggagctgggcgtccccactggcttggagcccctctcgcagcagctgctctgtcactgtagcctggtccctctccagctgctgcctcttccgctcctctgcatacatgtctcgggccttctg

SEQ ID NO: 1562 - DNA, 479 bp, Homo sapiens
gcctcatttaactttttcttcagaaccccatgcaggtgtttcagggctttacgtcattcaaggatgtggctgtgaacttcactaggaagaatggagagtactggaccttgctcagagagtcttgtacagggatgtaatgctggagaactataggaacctggtctccttgggtaagcttgggtccttccaccccagattgacctttcaggatacctttgccttctaaagattcccttgcttctattaggggatgataacaaatgaggctttggttattttcccccacagaatccagatcagatccttaaactgtttctcaccctacttgggtagaaattatttaattgcttttgacaattagttatttcattttctcctctctaaaatgcaacagagtgggactgagaatagagtggtcctttctcttttgaacttaaaattacattctgtttgtatctcttgagtaggatttccatttt

SEQ ID NO: 1563 - DNA, 571 bp, Homo sapiens
gcctcatgtaactttttcttcagaaccccatgcaggtgtttcagggctttatgtcattcaaggatgtggctgtgaacttcactaggaagaatggagagaactggaccttgctcagagagtcttgtacagggatgtaatgctggagaactataggaacctggtctccttgggtgagcttgggtccttcccaccccagattgacctttcaggatacctttgccttctaaagattcccttgcttctattagggaatggtaacaaatgaggctttggttattttcccccacagaatccagatcagatccttaaactgtttctcaccctacttgggtagaaattatttaattgcttttgacaattagttatttcgttttctcctctctaaaatgcaacagagtgggactgagaatagagtggtcctttctcttttgaacttaaaattacattctgtttgtatctcttcagtaggatttccattttccaaacctggtatcatctcctagttggaagaagtggtaagcccacgaacacaaatgcaggagggagaggtgccaagaagcagcggtacacg

SEQ ID NO: 1564 - DNA, 570 bp, Homo sapiens
gcctcatgtaactttttcttcagaaccccatgcaggtgtttcagggctttatgtcattcaaggatgtggctgtgaacttcactaggaagaatggagagaactggaccttgctcagagagtcttgtacagggatgtaatgctggagaactataggaacctggtctccttgggtgagcttgggtccttccaccccagattgacctttcaggatacctttgccttctaaagattcccttgcttctattagggaatggtaacaaatgaggctttggttattttcccccacagaatccagatcagatccttaaactgtttctcaccctacttgggtagaaattatttaattgcttttgacaattagttatttcgttttctcctctctaaaatgcaacagagtgggactgagaatagagtggtcctttctcttttgaacttaaaattacattctgtttgtatctcttcagtaggatttccattttccaaacctggtatcatctcctagttggaagaagtggtaagcccacgaacacaaatgcaggagggagaggtgccaagaagcagcggtacacg

SEQ ID NO: 1565 - DNA, 302 bp, Homo sapiens
ttttcttttttttttttttgagacagagtctcgttctgttgcccaggctggagtgcagtggcgtgatctcggctcactgcaagcttcgcctcccgggttcacgccattctcctgcttcagcctcccgagtagctgggactacaggcgcccaccaccatgcctggctaattttttttgtatttatagtagagatggggtttcaccgtgttagccaggatgggctcgatctcctgacctcgtgatctgcccgcctcggcctcccaaagtgctgggattacaggcgtgagccactgcacccagcc

SEQ ID NO: 1566 - DNA, 319 bp, Homo sapiens
tttcggccgggcgcggtggctcacgcctgtaatcccagcactttgggaggccgaggcgggcggatcacgaggtcaggagatggagaccatcctggctaacatggtgaaaccccatctgtactaaaaatacaaaaaattagccgggcgtggtggcgggcgcctgtagtcccagctactcgggaggttgaggcaggagaatggcgtgaaccccaggaggtggagcttgcagcgagccgagatcatgccactgcactccagcctgggtgacagagcgagactccgtctcaagaaaaaaaaaaaaaaagaaaaaattctcagg

SEQ ID NO: 1567 - DNA, 299 bp, Homo sapiens
ccaggcgcagtggctcacgcctataatcccagcactttgggaggccgaggcgggcggatcacgaggtcaggagatggagaccatcctggctaacatggtgaaaccccatctgtactaaaaatacaaaaaattagccgggcgtggtggcgggcgcctgtagtcccagctacttgggaggttgaggcaggagaatggcgtgaaccccaggaggtggggcttgcagcgagccgagatcatgccattgcactccagcctgggtgacagagcgagactccatctcaagaaaaaaaaaaaaaaaa

SEQ ID NO: 1568 - DNA, 2018 bp, Homo sapiens
cttatttctttttttctttttttttttttttgagacatagtctcgctctctcgcccaggctggagtgcagtggcgcgatctcagctcactgcaagctccgcctcccaggttcacgccattctcctgcctcagcctcccgagtagctgggactacaggcacctgccaccgcgcccggctaattttttgtatttttagtagagacagggtttcaccgtgttagccaggatggtctcgatctcctgaccttgtgatctgcccgcctcggcctcccaaagtgctgggattacaggcgtgagccaccacgcccggccagcttggcctatttcttagtttcttacttaccatgtgtctctctcaacttaactgaagataaccttaaggccggctaaacaataggcttgggtgggaaggccacatccttaatctgacattttttttacagggctaaatcactttgtttagttaacaggtgtaatgggcctttattgctcaaagctcttgttagacttacttcccactgtatgagatctagaaacagtttgcttttccaaccacgtgaggcctcagatttctgcactctattctcttttgttttggcttgaaaattgacacattgtttcctgaacttaactcattctttgttcgccagacatatccaggagcattctacacaaagagcgttctggtgctttccaacctgttctagagccacaggcccagtgagcatttgccctggcctcatagttgctaattagtttgccagtgtatattaagagtctgcatctgttggctggatgcggtggctcatgcctgtaatcccagcactttgggaggccgaggtgggcggatcacctgaggtcaggagtctgtgaccagcctggacaacatggtgagatcccgtttctactaaaaatacaaaaaaaagtagctgggcgtggtggctcacacctgtagtcccagctactcaagaggctgaggcaggagaatcgcttaaacatgggagatggaggttgcggtaagccgagagcatcgtggccactgcactccagcaacagagtgagactccgtctcaaaaaaaaaaaaaaaaaaaggagagtctgcatttctccagtcgtaaatattcttttctttgaagcttgccacctgactgtcaatccaatgccacctgtgtatttgaactttttattatgatatctcccacttgaaggtgctgatttctgaattagtttgggttggcttactaataactgttgtaaccaatagacccaaaatatatatggccttaatacaatagaagtgtattgtttgctgtcatagccatgtgagtgggtatatagattgataggatggccattcagggacctgagctacctgaagctctagcctctttaccatatggcttccaaactcactctggggctcatggccctaccagccagtcagaaggggaaaacagcatggaggaacatacgtgagtcaggcctggaaagggcgcacatcactcctgcttgcattccattggttaggatctcatggccaggtctaactacaggaggttgggaaatgtttgtatacctagaaaggagaggaggaggcatattttcatggacagttagcagctcgtagcactgttctcaaacatttaggttatttagaacgattttgctatttttctattgtaaggtataaatagatgtgattctttgtttataactctccatatttctgatagttttctttttttttttttgagacacagtctcgttctgttgcccaggctggagtgcaatggcgtgatctcggctcactgcaagcttcgcctcccgggttcacgccattctcctgcttcagcctcccgaatagctgggactacaggcgcccaccaccatgcctggctaattttttttgtatttatagtagagatggggtttcaccatgttagccaggatggtctcgatctcctgacctcgtgatctgcccacctcggcctcccaaagtgctgggattacaggcgtga

SEQ ID NO: 1569 - DNA, 285 bp, Homo sapiens
tttttttttttttttgagacatagtctcgctctctcgcccaggctggagtgcagtggcgcgatctcagctcactgcaagctccgcctcccaggttcactccattctcctgcctcagcctcccgagtagctgggactacaggcacccgccaccgcgcccggctaattttttgtatttttagtagagacagggtttcaccgtgttagccaggatggtctcgatctcctgaccttgtgatctgcccgcctcggcctcccaaagtgctgggattacaggcgtgagccac

SEQ ID NO: 1570 - DNA, 132 bp, Homo sapiens
caggagatggagaccatcctggctaacatggtgaaaccccatctgtactaaaaatacaaaaaattagccgggcgtggtggcgggcacctgtagtcccagctacttgggaggttgaggcaggagaatggcgtg

SEQ ID NO: 1571 - DNA, 435 bp, Homo sapiens
tcactacagggctatgtggagaagcatatctcccatagcatggcagcagaaagggctgtgatctgttgataatgtctgccctgcttatgggagcagggtgcggcgttccttgaatcctgtgtccggcaattcttcccaggttgcttaacactattggcacatctgtaaagaaccacaggactagggaaattttaaatagatcaagttttatttgcttagtagaaaaagggcccctccctttgcaaaaggattggagaatagaggcttcacagctgtaatccagacaccttgatcacaggcacaggatccaattggtgaaaatgcccttcaccagtttttctaggcatgataacttgcagaagactatagccatgagttcatggcatgtggtattttcctgatcagagtaactccagggctccacattcacgatgg

SEQ ID NO: 1572 - DNA, 4660 bp, Homo sapiens
ggcacaaaagcgctggtgagtagaactgctggtgccttagcatacattaagacagtgacactaaactgtactaatagccagtgtgttcttcactgccatgcactcacagtaagtaaataaataaattaattaattaattaatttaaaaaattcagttttacttaactatgtcattgataaaatggtaaaactttgtttgttttggggtttctttggagacagaatctcactctgttgcccaggctggagttcagtgtcacgatcttggctcactgcagcctccacttcccgggttcaagcaattattgtgcctcagcctcctgagtatctgggattacaggcgggtaccaccacatgcagctaattttttgtatttttacagaaatacaaaaaacatacaagaaacctacaacatgtttcaccatgttgcccaggctggtttggaactcttgagctcaggcaatctgcccaccttggcctcccaaagtgctaggctgagccaccatgcctggccaaaaacttactgattttattgaatcttgacccttgaggaccctatttttaaatatttgctatgacaaaatgggaagtacacataaagcacttctgcacgccaaggtagggaaaatgcttatgccattgttcaagttgcaagctgatctagctacttttttcatagaacatcttgttttatttgaattaacaactgaaagataaattatggtttttcaaacttaaatatttggcagacatttttacaacaataaacgaagtgagcctcgtcacctcaaggaaaacatctgacagtacttgtaggcagtgaaaaaattcaagtattcaggtgaaagttagaattttagaaaacttagtcagggcatggtggctcaagcctataatcccagcactttgggagaccaaggcgggcggatcacctgaggtcgggagtttgagaccaacctgaccaacatagagaaaccccatctctactaaaaattagctgggcgtggtggcgcatgcttgtaatgccagctactagggaagctaaggcacaagaatcgcttgaacctgggaagcagaggttgtggtgagccgagatcgcgtcattgcactccagcctaggcaacgagtgaaactacatctcaaaaaaaaaaaaaaaagaattttagaaaacttgcatcttccatcataagcttgacagcttcccaataattaaagagttttctactgggtgtggtggcttacgcctgtaatcccagcactttgagagaccaaggtgggcggatcacctgaggtcgggagtttgagaccagcctagccaacatggtgaaacgctgtctctactaaaaataaaaatttagccaggtatggtagctcacgtctgtaatcccagctccttgggaggctgaggcaggagaatcgtttgaacctgggaggtggaggttgcagtgagccgagaacacgccactgtactccagcctgggtgacagagtgagactccatctcaaaaacaaacaaacaaataaaaacaggccaggcaaggtggctcatgcctgtaatccaagcactttgggaagcagaggcaagtggatcatgaggtcaggagatcaagaccatcctggctaacatggtggaaccccgtctctactaaaaatacaaaaaatttgccgggcgtggtggcacgcgcctgtatgtagtcccagttactcaggaggctgaggcaggagaattatttgaacctgggaggtggaggttgcagtgagccgagatcacaccactgcacttcagcctgggtgacagagcgagactccatctcaagaagaagaaacaagactgtcttgatgagatctgaagtgatgtaaataaataaggcttcctgatattgtataatgaaatgtatcaacatttgaaagacctgttatgaaatcatgcacaggcaaaggatccattcattcaaagtacaaaatacagtagtggatttttttttgtaggaaaatatacgtaacataaaatttaccattttaatgatttttttttttttttgagacagagtctcactctgtcaccaggctggagtgcagtggcatgaccttggctcactgcagcctccacctcctgggttcaagcaattctcctgcctcagcgtcccaggtagctgggactacaggtgtgtgccaccacgcccagctaatttttgtattttttagtagagatggggtttcaccatgttggccaggatagtctcgatctcttgaccccgtgatccacctgccttggcctcccaaagtgctgggattacaggtgtgagccaccacgcccagcccattttaatgatttttaagtgtacagttcagtaacatgaagtacattcatactcataaccatcaccattatccacctccagaattttttcatcatccccaattgaaactctgtacccattaaacaataactccccacttcaccctccctccagcccctggtaactgctatcctactttctactttctgtctctatggatttgactattctaggtactagataagtgagagactaattgttctttttttttttttttaagttcattgatctagctttcaaattccacattgcaaccaatctttaagaaacaaccacttgttggattctgatgtagtaccaaagaaaaatatccacagttagctgaaaagtttgttaaaatactcttccttttacaactacatatctgtgtaaggttagattttcgttatatacttcaaccagcacgacatatcacgacagattgaatgcaaaaatcacatatgagaatcctgctgtcttctattcagtcagacattaaagatttgcaaagatgtaaatcagtgccactcttctcactaaattgttttggaaaacagttacctttttctaaaatattatttgcgttaacatataatagatatattatttgtgttaacatatgttatttgttaaatgaataaatattttaaaatttttgccgttctaattctaatacagtaaatattgataggtataatccactttggggtcttgaatacatagtaagagtgtaaagaggtcctgaaaccaaagactttggagtagggtataaaagcccagattggaagctctgacctggaaggacaacacagttctagtcctgactgccacgaacatgctgaatggccttaagaaatgacttaacttctcaacatcctgtacttcatctgtaaaatttatctgcctagcctatgtcatagagttgttaccagaaacaaattagagaacaaacagttgtaactaagatttaaaagaaaagttatattgggagagaaacgttgcttataaaatttggaattcaattagttgagccagtttgagttggttatattgcctataatcatgtaggtatttttttgttgttattatttttgtttgtttggttgggtttgtttttgtttttgtttttgttttgacagagtcttgctctgtctcccaggctggagtgcagtggcactatctcagctcactgcaagctccacctgccgggttcacgccattctcctgcctcagcctcccaagtagctgggactacaggcacctgccaccacgcccggctaatttttttgtatttttagtagagacggggtttcacagtgttcgccaggatggtcttgatctcctgacttcgtgatccgcccgcctcggcctccccaagtgctggcattacaggtgtgagccaccgcgcccggctggttggtttgttttgtttttgagacagagtctcgctctgtctctcagtctggagtgcagtggtgcaatcttggctcactgcaacctccgcctcccaggttcaagtgattctccctgccttgagcctcctgagtagctgggattacaggcacctgccaccaccatttgtttgttttattgagacagtctcactctgttgcccaggctggagtgcagtggcacaatctcggctcactgcaacctccacctcccaggttcaaggatcctcatgcatcagcctcccaagtagctgggactacaaggggcgtgtcgtcgcacccggctaatttctgtatttttagtagagacgaggtttcaccatgttggccaggctggtctcgaacccctgacctcaggcaatccatctgccttggcctcccgaagtgctgggattacaggcgtgagccactgtgcctggcctcaggtaggtgtttgttattaggccaggaaatgttctgttatctgagagagagtgtttagaaaaatggcttaaagaaaagagttctaagaattttagaaaatagacccaaacttaaaagggaatggagtttggaaggcagatagcaaatgggtgtgggaatccatagggaattatttgtacttgttttaaaactcagtggcctgtaggaaaatctgtttagagcaggatttgctttttcattattgaggtcatccttctatatctccaaaacatattgttcttggttttcaaacctcatttctggttctctggctgatttcaactccaagggcacaagagactatagtccccggcagatggcagttcgcgagaaggtgtttgacgtaatcatccgttgcttcaagcgccacggtgcagaagtcattgatacacctgtatctcaactaaag

SEQ ID NO: 1573 - DNA, 14152 bp, Homo sapiens
ggcacaaaagcgctggtgagtagaactgctggtgccttagcatacattaagacagtgacactaaactgtactaatagccagtgtgttcttcactgccatgcactcacagtaagtaaataaataaataaattaattaattaatttaaaaaattcagttttacttaactatgtcattgataaaatggtaaaactttgtttgttttggggtttctttggagacagaatctcactctgttgcccaggctggagttcagtgtcacgatcttggctcactgcagcctccacttcccgggttcaagcaattattgtgcctcagcctcctgagtatctgggattacaggcgggtaccaccacatgcagctaattttttgtatttttacagaaatacaaaaaacatacaagaaacctacaacatgtttcaccatgttgaccaggctggtttggaactcttgagctcaggcaatctgcccaccttggcctcccaaagtgctaggctgagccaccatgcctggccaaaaacttactgattttattgaatcttgacccttgaggaccctatttttaaatatttgctatgacaaaatgggaagtacacataaagcacttctgcacgccaaggtagggaaaatgcttatgccattgttcaagttgcaagctgatctagctacttttttcatagaacatcttgttttatttgaattaacaactgaaagataaattatggtttttcaaacttaaatatttggcagacatttttacaacaataaacgaagtgagcctcgtcacctcaaggaaaacatctgacagtacttgtaggcagtgaaaaaattcaagtattcaggtgacagttagaattttagaaaacttagtcagggcatggtggctcaagcctataatcccagcactttgggagaccaaggcgggcggatcacctgaggtcgggagtttgagaccaacctgaccaacatagagaaaccccatctctactaaaaattagctgggcgtggtggcgcatgcttgtaatgccagctactagggaggctaaggcacaagaatcgcttgaacctgggaagcagaggttgtggtgagccgagatcgcgtcattgcactccagcctaggcaacgagtgaaactacatctcaaaaaaaaaaaaaaaagaattttagaaaacttgcatcttccatcataagcttgacagcttcccaataattaaagagttttctactgggtgtggtggcttacgcctgtaatcccagcactttgagagaccaaggtgggcggatcacctgaggtcgggagtttgagaccagcctagccaacatggtgaaacgctgtctctactaaaaataaaaatttagccaggtatggtagctcacgtctgtaatcccagctccttgggaggctgaggcaggagaatcgtttgaacctgggaggtggaggttgcagtgagccgagaacacgccactgtactccagcctgggtgacagagtgagactccatctcaaaaacaaacaaacaaataaaaacaggccaggcaaggtggctcatgcctgtaatccaagcactttgggaagcagaggcaagtggatcatgaggtcaggagatcaagaccatcctggctaacatggtggaaccccgtctctactaaaaatacaaaaaatttgccgggcgtggtggcacgcgcctgtatgtagtcccagttactcaggaggctgaggcaggagaattatttgaacctgggaggtggaggttgcagtgagccgagatcacaccactgcacttcagcctgggtgacagagcgagactccatctcaaaaaaaaaaaaaaaagactttcttgatgagatctgaagtgatgtaaataaataaggcttcctgatattgtataatgaaatgtatcaacatttgaaagacctgttatgaaatcatgcacaggcaaaggatccattcattcaaagtacaaaatacagtagtggatttttttttgtaggaaaatatacgtaacataaaatttaccattttaatgattttttttttttttttgagacagagtctcactctgtcaccaggctggagtgcagtggcatgaccttggctcactgcagcctccacctcctgggttcaagcaattctcctgcctcagcctcccaggtagctgggactacaggtgtgtgccaccacgcccagctaatttttgtattttttagtagagatggggtttcaccatgttggccaggatagtctcgatctcttgaccccgtgatccacctgccttggcctcccaaagtgctgggattacaggtgtgagccaccacgcccagcccattttaatgatttttaagtgtacagttcagtaacatgaagtacattcatactcataaccatcaccattatccacctccagaattttttcatcatccccaattgaaactctgtacccattaaacaataactccccacttcaccctccctccagcccctggtaactgctatcctactttctactttctgtctctatggatttgactattctaggtactagataagtgagagactaattgttcttttttttttttttttaagttcattgatctagctttcaaattccacattgcaaccaatctttaagaaacaaccacttgttggattctgatgtagtaccaaagaaaaatatccacagttagctgaaaagtttgttaaaatactcttccttttacaactacatatctgtgtaaggttagattttcgttatatacttcaaccagcacgacatatcacgacagattgaatgcaaaaatcacatatgagaatcctgctgtcttctattcagtcagacattaaagatttgcaaagatgtaaatcagtgccactcttctcactaaattgttttggaaaacagttacctttttctaaaatattatttgcgttaacatataatagatatattatttgtgttaacatatgttatttgttaaatgaataaatattttaaaatttttgccgttctaattctaatacagtaaatattgataggtataatccactttggggtcttgaatacatagtaagagtgtaaagaggtcctgaaaccaaagactttggagtagggtataaaagcccagattggaagctctgacctggaaggacaacacagttctagtcctgactgccacgaacatgctgaatggccttaagaaatgacttaacttctcaacatcctgtacttcatctgtaaaatttatctgcctagcctatgtcatagagttgttaccagaaacaaattagagaacaaacagttgtaactaagatttaaaagaaaagttatattgggagagaaacgttgcttataaaatttggaattcaattagttgagccagtttgagttggttatattgcctataatcatgtaggtatttttttgttgttattatttttgtttgtttggttgggtttgtttttgtttttgtttttgttttgacagagtcttgctctgtctcccaggctggagtgcagtggcactatctcagctcactgcaagctccacctgccgggttcacgccattctcctgcctcagcctcccaagtagctgggactacaggcacctgccaccacgcccggctaatttttttgtatttttagtagagacggggtttcacagtgttcgccaggatggtcttgatctcctgacttcgtgatccgcccgcctcggcctccccaagtgctggcattacaggtgtgagccaccgcgcccggctggttggtttgttttgtttttgagacagagtctcgctctgtctctcagtctggagtgcagtggtgcaatcttggctcactgcaacctccgcctcccaggttcaagtgattctccctgccttgagcctcctgagtagctgggattacaggcacctgccaccaccatttgtttgttttattgagacagtctcactctgttgcccaggctggagtgcagtggcacaatctcggctcactgcaacctccacctcccaggttcaaggatcctcatgcatcagcctcccaagtagctgggactacaaggggcgtgtcgtcgcacccggctaatttctgtatttttagtagagacgaggtttcaccatgttggccaggctggtctcgaacccctgacctcaggcaatccatctgccttggcctcccgaagtgctgggattacaggcgtgagccactgtgcctggcctcaggtaggtgtttgttattaggccaggaaatgttctgttatccgagagagagtgtttagaaaaatggcttaaagaaaagagttctaagaattttagaaaatagacccaaacttaaaagggaatggagtttggaaggcagatagcaaatgggtgtgggaattaatagggaattatttgtacttgttttaaaactcagtggcctgtaggaaaatctgtttagagcaggatttgctttttcattattgaggtcatccttttatatttccaaaacatattgttcttggttttcaaacctcatttctggttctctggctgatttcaactccaagggcacaagagactatagtccccggcagatggcagttcgcgagaaggtgtttgacgtaatcatccgttgcttcaagcgccacggtgcagaagtcattgatacacctgtatttgaactaaaggtgaggaatgggcaagaagaaactacatggtagatgagtgggcatttgaataacaaagaagatgacaacaagagagtgagggtccaaagggcccactcctgttgtggacacagaccagtctttgctccaataagaagagggacaagaatggcttggagggagaggccctgtcttttattatcttggttgtggccagcagattccaaaagagagccattctttggaatggtaattgttctgggtcctctctacattgtattgcgtggcatctgtacttggaatgttttctagattcatgcaaaccatacgtacataaatatgcaaccactctcctattgatggactctgaagttgttagtagttctttgctattaaaaactagattgcaactgggcacatctgtagttcctgcttctcaggaggctgaagcagaaagatcactggatccgaggagttcaaggctgtagtgtgctatgatggtgcctgtgaatagccaccatactccagtctgggcaatgtagcaagcccctgtctctaaaacaaaccagccaacccagattgcattactacctgcttcaaacccagtgattcccactgcacttatagtacaacccaaactctttactcaggtttacagagccctaggtgatctggccactgcctctcctacctcatctcatgctatttttcctcttgcccactatgctactctggtcttcttcctactcttggaacatagtcagtgtgtttgtacctccacacctttgttcttgctcttcccctttcctgaactccctttccttagctctttgcatgatttatttcagattatactagagactgcagattttaattcctttttaaaaaaaaaaaatacaaatagagacagaggtcttgctatgttgcccaggctgcttgcgaacgaacccctggcctcaagtggtcctccttcctcagcctcccaaagtgctgacattacaggcatgagccaccacgtccagccagccagattttaatttcagagctcagctaaaatgccactcctcaagtaatcttctccaactaccttctttaaagtagctgttctctctcttatcacaatgagctagtttattgcctttaggctataaaactgtctgaaattatctgttgtttccttcatcaatgtctctttttattgatatttaattgtacatatttatgagactgtttttacctactgtattagtttgctagggctaccataacaaagtaccatagactaggtagtctaaacaacagaaatttattttctcacagttccagaggctggaagttgacataacatgttggcaggcctagttctttctgaaggccataaggaaggatctgttccaggcctctctccatggcttgtagatggccatcatctccctttgttttttttttaattgagacagagtctcgctctgttgcctgggctggagtgcagtggcaccatctcatctcactgcaactccacctcccaggttcaagcgattctcctgcctcagtctcctaagtagctgggattacaacacgtgtgccaccacacctggctaatttttctatttttagtagagacgaggtttcaccatgttgaccaggttggtggtcttgaattcctggcctccagtgattcgcccaccccagcctcccaaagtgctggaattacaggcatgagccaccgcgcccagcctccctttgtctttacatcgtcttccctctgtccctatctaaattttctcttcttacaacaacatattggatcagagcccaacttggagacctcatgttagcttaatcatctctttaaagaccctatcaccaaatgtagacatgttcagaggttactgggagttaggacttaaacaaatgaattggggagggtggggccagggggacacagttcagcccgtaacactagtgtgttactgtttctgatactgcatactgggaagtttcaggctttttaatctttgccaacctggtaagtgaaatatgctattaccgatgatagacatcacagggcaaggactgctgtaatgcccttaagacattccccagtttttacttttgacattattcgaatctcaggcatcaaaaaacatttatgtttgttggtctgataacctattcctagtagtttatcatcaagaaaaatactttttttttaaaaaaaaaagagctatatacctaaatattagatattgaaatgttatggggaatttttttttttttgagacagagtttcactctcgtcacccaggctggagtgcaatggtgcgatctctgctcactgcaccctctgcctcccgggttcaagcgattctcctgcctaagcctccgaatagctgggattagatgcctaccagctcccccagctaattttgtatttttagtagagacagggtttcaccatgttggccaggctggtcacgaactcctgacctcaggtgatccatccgccttggcctcccaaagtgctgggattacaggcgtgagccgctatgcctggcctaaaaaaatttttttttaaattagaataacctaaacacctaacagtataacatgagggaggaagtaagtacagagcttcttctcactggaatttatgcatcttttaaaaacacttcaggccgggcgctgtggctcgcacttgtaatcccagtactttgggaggctgaagcgggcagatcacgaggtcaagagatcgagactatcctggccaacatggtgaaaccctgtctctactaaaaatacaaaacttagccgggcatggtggcacccgcctgtagtcgcagccactctggaggctgaggcaggagaatctcttgaaccccggagtcagaggttgcagtgagccgagatcacgccactgcactccagcctggtgacagagcgagactccatttcaaaaaaaaaaaacaaacttcatgctgagaagtctgaagaaaaaaaagatttttaagaggaaaatgtgtaagaaaaatacttcagctctgttacaaaatcaaaatagaaaaaaacacaaaattggtgtttccttttaatgataactacatcagacacctaagaattgggataaagagcagagggaaatgtagacaagttggaatcagtcatgtttgttttcaaaacttccttttaaattgttatgtttattattatgaccacatttatttatgttttctccaggaaacactgatgggaaagtatggggaagactccaagcttatctatgacctgaaggaccagggcggggagctcctgtcccttcgctatgacctcactgtatctttctaaacttgggctcttgagactttggatggattggcactcacttggctcaggtttaagaatggtagagtaggtaggatcaaatatgaggcctttggcgattaggggaattatttctctaaaccaggagtggaactttggctaaacagagcatacacatccttagaaatcttctgaatcctgagtgagacctcagcttgatgtcagggcccagttccaactctacagtcatcccctggctccagaatacctctcccctgccctgtccagtgaacaaaattcttcttaatggactagcaacacatttcccttgtctccaagctacacagagaatcatctgcttagaaatcccatatgggggcctttttctggtcgcctttttctggtctgtggccaacctgcccagccccttgccatgctcaaaaaagtccagtcaacactacaaaagggaaaggtgccttaatcttttttgagccttcagctacctcatgtggtagcacagctgatgctttctgatgtttgtaagtgctattaatcttatgggtggcagttttacccacatagggaggggttagaccccagcttctgttggtgatgataatcaacttgcagacagtgataggaggggctttctccttaactctttgtcatcaggttccttttgctcggtatttggcaatgaataaactgaccaacattaaacgctaccacatagcaaaggtatatcggcgggataacccagccatgacccgtggccgataccgggaattctaccagtgtgtgagtgttgggaaaccgtggggcaggatgagttacttggggctctctcaagccagcagaatctattgagtactcacggtgtcctgagcaaattggatgacccagataatgctcttagggtttctatggtggtttttttgtttgttttttgtttttttgagacggagtctcgctctgttgcccaagctggagtgcagtggtgcagtcttggctcactgcaacctctgcctcctgggttcaaacgattcttctgcctcagccacctgagtagctgggattacaggcgcctgccactatgcccggctaattttttgtatttttagtagagacggggttttaccatgttggccaggctggtctcgaactcctggtctcatgatccgcctgcctcggcctcccaaagtgctgggattacaggcgtgagccaccgcacccagcctcttctatggtgttttcatgcagatttcacaaaatccctgtggtgggggaggagaataaagtctcttcattttacatatgagtaaacttgatacccagcccatgaagagatcatagggataagaaaggcaaagtcaggactagaactcttggtccagtgctctttattttaaaccacagtgataggatcacagcagagaataaggaaattagctttgatacatcaaatcatccagactgatgccagggcttctggatgaatagggaaaatggctaagcactaaagccatataatcaccccatccagtaggaggagttaagaagatgatgaagtagaaaatgaaggaatagcccagtagatggaaaggaaaccaaaactggtgagaagcccaaagatgccggggtttacctctgggctgatgatcagaaaatgaaagagaaattctatgcttgagtgcaaccaggccttcctagaggacagagctcccagagtccccccttcagaaaggtgaatccctgaagaccgctggctaaccctctccctgcaggattttgacattgctgggaactttgatcccatgatccctgatgcagagtgcctgaagatcatgtgcgagatcctgagttcacttcagataggcgacttcctggtcaaggtcagagctgacaaggctgggagggcaaagttgggcctggcctctcacaagagaagatccttgtgcagagggaccagtagcctaagtgaccatgactattgcaggtcatgtaagaaaagagattcccccctcactatgcattggttccttgcaggtaaacgatcgacgcattctagatgggatgtttgctatctgtggtgtttctgacagcaagttccgtaccatctgctcctcagtagacaagctggacaaggtaacaacccaagtacttgactttttttcccagatcccaccctgccttgggaaatggaaaacaagattgagagagagagaggtgcatgcctctatacccaccagaggaaggttagccccaggatgtaggctcatgggcagctactgctctaaaacggttccccgaggacagtacacacttgctctgtggtgcggaagctgcccaggggtccctgactggtgtctgtctgcctaggtgtcctgggaagaggtgaagaatgagatggtgggagagaagggccttgcacctgaggtggctgaccgcattggggactatgtccagcaacatggtgaggaacagaaccaagcctccccagcagccgtcccactgccctcagtcctaaagttgaaactgttctgtgttatgtatgtaggggagtgagtgtgtctatgcatatgtacacacacatgcatgggcgactagagtccaggcaagaaggtcaaccctccttaccttttttgtttccttgtcagcctcactcacaagtctgtctccccaggtggggtatccctggtggaacagctgctccaggatcctaaactatcccaaaacaagcaggccttggagggcctgggagacctgaagttgctctttgagtacctgaccctatttggcattgatgacaaagtgagtcaagttggggacgggatcccttctgagctctggggcttcaggtccctgatcttaatctggcactgaccattttcttatctccacagatctcctttgacctgagccttgctcgagggctggattactacactggggtgatctatgaggcagtgctgctacagaccccagcccaggcaggggaagagcccctgggtgtgggcagtgtggctgctggaggacgctatgatgggctagtgggcatgttcgaccccaaagggcgcaaggtgccatgtgtggggctcagcattggggtggagcggattttctccatcgtggaacagagactagaggtaggtcctaggaggtaggtagaagatagtctgagcaggtggtggcacctaagctatctgatctccaagggagcaagtggtgctgctttgggcagggagcatctcacagaaatggagaaaagattattgctctttttcacagatttctaccccattatatgtaagttttatggatctttaatccataatctttctgcactcaatcctctgctctgggtctctacttccttcagggctgtcacaaacctgggctggtgtatccaagacttagatcttcctcatgatacggaatacttaacattttactgccttgtgccaggcactgtgcttggtgcttttcatgcattatcaaaatataattgttactacagccctgtgagagtagctaattttattaattgcattttccagatgagaacactgaagcattatagatcaaataatttgcttaaggccatgaaacttgtaagtggtagggtcagaatttgaatccaggcagtctgactccaaagtcttgccactaaccacactgcaatactgtctctaaatgggaagcatgtgtctgaggccctgggatccctcagatggctaccgtgactctctagcacctagagtaacaccaaggaagcctcttgtagcctcaagccctcctttgttgctgctggtcttaagtggctggttgcatttcatcttctgggaaatgctctggcaacctccccacagtcctatgccttttctctagggtggaaaccacccatttcccagttgagatcatttttccagtaggcatcttacattctaagaactatgaaaatagttttcctgaaaaagacaagggaagcagcagcagcattctcctttccccacacccatatacacgcctgtgccctgtaactgaagtgtgagaggcacagtgtcataaatgggtagatagtaagtggggactaaaactgtcaagggtgatctaattggggtgggctcatagtagtacttctgtgtgaatgctttggtggacccttaaggtactacatggaccagcctgggcaacatgatgagaccctgtctctacagattaaaaaaaaaaattttttttttttttaaattagctgagtatggtggtgtgtgcctgtagtcaggaggctgaggtgggaggatcacttgagcttgggaggtcgaagctgcagtgatcacaccacggcacttcagcctggatgacagagaccctgtctcaaaaaaaaaaaaaaggtactacatggagataagcttgaagttactgtaaaaaagctacctttactcttgccctaagttatttattctgatacgtcctatgtacaagtcagtcagttcagtcctcatatctactaaaagctacctttatgcccaaggtgctagatgagaagacagggcccctgccctggtagagctgagttgggcctggtctcaaaatcccgactagagcctgctttgtttgctccttgaaggtgttagcccagctctcttttatctgccccttccccaggctttggaggagaagatacggaccacggagacacaggtgcttgtggcatctgcacagaagaagctgctagaggaaagactaaagcttgtctcagaactgtgggatgctgggatcaaggtatgggaggcaagccccagggtggcagcaaacttaggtgtgctggacacaaactgaataaaagctcacccataatggatcctgccattacttctcaaaagtagagctaagaacagagtgccagcttggacaccctctgtccctgaggacagcagaagccagccttcatcttctgctcttgtcccctgcaggctgagctgctgtacaagaagaacccaaagctactgaaccagttacagtactgtgaggaggcaggcatcccactggtggctatcatcggcgagcaggaactcaaggatggggtcatcaagctccgttcagtgacgagcagggaagaggtgagggaggtgggcaggaaggctaagggacagagaatgtatgccattttggcaggcccatgcccattcaagacctgagaaaaagcctggcattgatattagtacaactcataaaagccttgagggcttaacctgttactgtggtcttagtagggtgagatctccatccctgcatataccttatggtttgttggctcccccaagaggcacactctagcctgaggtgtttaattaggttcctgctcccagctgagacaagcctgatgcctagagggctagaggaaactaggcactcggggagcagtggaatggaagatgcttataccaccttcttctcccatcctggccaggtggatgtccgaagagaagaccttgtggaggaaatcaaaaggagaacaggccagcccctctgcatctgctgaactgaacaaactatcagaggaaaggaagtgggactggcactatttgaggttaagacaaactgcatatgtacttcaattgctttgcacttttccgtttcagcggaagacctgaagagtggtcagaacagagcctttgatttttattatggttattttattgattattactggcaaaaacggccaggtacaacacctttttcatacaaggcccaggaggcttagtccagtctgtgctcctgggctacaaggacccagcctgagatggtcccatctgcagggccccgcaccagttggagcagatgcctccccaccaccaattgccaaaggtccaataaaatgcctcaaccacggagtctgcgtgtgtcagtgatgcctagccccgccttccccagcagaccaatgtagggatggaaaagggagaaaaacagtaaacttgtgaccctgaggttcttgtctccagcgtccaccctgcggcttgggagctcctcctggggaggcagcccccgtacatacgcacccgcgactttgcagctttcacctgaaggtctgagcgaagcccgggcggcgcacgtgcagtggatacctccacccccctgggaggcggggtcgcgctcagagccaatgagagcttgcggggtggaggggta

SEQ ID NO: 1574 - DNA, 112 bp, Homo sapiens
ttttgtttgagacggagtcttgctctgtcgcccaggctggagtgcagtggcgtgatctcagctcactgcaacctccgcctcccgggttcaagcgattgtcctgcctcagcct

SEQ ID NO: 1575 - DNA, 112 bp, Homo sapiens; identical to SEQ ID NO: 1574

SEQ ID NO: 1576 - DNA, 260 bp, Homo sapiens
gcctgacggtggccttgcataccctcttcccacaggctgggtgggcagcccgccgccagctgggtcagaggtgttcatcgggcggctgcctcaggacgtgtacgagcaccagcttatcccgctgttccagcgcgtgggccgcctctacgagttccgcctgatgatgaccttcagcggcctgaaccgcggcttcgcctatgcccgctacagctcgaggcgcggcgcgcaggccgccatcgccacgctgcacaaccacccgc

SEQ ID NO: 1577 - DNA, 4073 bp, Homo sapiens
ccttccgtgtccccaaacgcccagagcccgggacacgggccggcggccgggtcaccaagccagttcccggaatcggctcgcgccggaatccagactcggcttgcaaagcccgctcctgccgtctctccgcagcgcgccctgccccccactgccggccctcttagcttcaaaaccaaattttgcctttcatcctgagagattaataccccgcaggtgaaaccgtggagacggagctgcggtgggtttcttttccacgcctcagtttcctcgtctgtgaaatgggaccaggcgcgcctgtgcttctccgggagtttattgcagggctggctggagagaatggctgggtggaagctgccaggaggaggcccaaggccgcccaccccgtgggcctcgtttgctgagcgggggtcagaggcgtgcgggacagggcgcgccccacggcggctctggaggcggcccggcccgtccctgtctcctcccctcgctccccctcccccggccttcccggaactctcctcgcccgctgggtggaggaggggcgagggccgactccgccgcccctggggtctccctcctcccacccccaccgcagagtctggcccgccctgggctttcctctcaggtccctttgggtctccagaagcccggaggtttcgcgcagactcgaacctgagatgacaccacccagcaccccaaatcctgcagagtgtggaggggatctggggagaaggcaggggctgcccgggcgctctggctgctgggggtgggggacagggcctgccggggaagcgggtcgggggaggactggagacccaggctcccctaggtacaacgaacctcgcgggagggaatacgccatccccgtacccacttccgaggacgtaggtcttttggcaccggcggcagccgcgttcccacacatctgggcggggccccgcagcatggcctggggagctgaggcttcgggatccggcacaaactaccattctaggtgtagacggaggaggtggggtgtgggaagcagggggccatggtctgagcagaccttctcacctctgggcctcccacctcctggggcaggacttacggggaaggacccgaggggagtggggtgtccatagggacacccaagggtctatccctgcgagctttgctttctactaaaccaataatcgcagtggtggtggcagtcgagacacggctcaaagagccggcaagaatagagcagagaccaggatcgccccaggcagggaaaaaatgaccagttctgtagagtgacccgaaggtgatggaatcactcgggcgtcctcctgggaaagagctgcctgctcccccgccgccgccagtacaccggcgcccatgccccgggggctggagagagcagccaggcacaggtaactcaagaactccagtcccctcacgggtgccgtgctgtggggcgccctcacccccacactttgggtccctgggcctcctcatcaaagcaggggcctgagtggcaggaacacccctgtgtgcagaatagtgccccctgcagcccccacaggtcacctctttgaggacctaggtggggcctgccctggggactggggtgaagagggcaggtccagccttcagcagcccctcccccatgacttcagtggaattacaaggggaacacccagggcagctcccgtaggctgcacaagggaagaggggagggcttctactgaggtgaaacagtgacccacccctcccacaccgtcagcctccctcccctctccacccttcagtgctgggaccccagggcccatagacagctgggggagtggggagacaggaggaactcaagctcagcttctgcctcctgtctcctgggaccctcgggcagcccctccagcttcctgggagtccaatttcccaaggtagaacggtggcggcagagcctggccctgtggtggggcagctgcaccccgatgagtggcttgcagttcctggagccctgcaggttgttggagaggcagggagcccttctccctcctgcctgccctcttgcacttcctctcccagaacccagcactactcccagaggctctgagctggagccctagaaggtaaccacctcctggctggacacagggcaagttggggccaggcgtgaggacaggtgccccaggagccacctgctccactcatccacaaaggccttaactggctcaggggcccctagctcccagtcaagccctgccctcctgaccttgtcctgccctggtgctgccagtcgggtggagatgtctaggggccagctggtctcctggcaactgaagtccgcgcttcccttccgttcactcattccttcctttcctcatgcaggaggcgctgcaaggctccgtgctcctggagcttcgagtctatggtatgagttaaacagaagggtatctcctccatcagatctacaggagggtgtctgctccatcagacctggagcttccaaggcattttacccgaagctccagcacctggcccaaggctgggctgtgctgtgtcctcagtgaaagaatggatgagtcacagctgaatgactgaagagctgaaccagtaggtttccctggggtttccacaggcagtttcagcccaggggaagacccagggagatgagggccaccttgcaggacgctgtggtgtggaggcagcagcctggggcagggactgtgctgagtgtctgaggccgagccacccctctgtaacctctataatccatcaggtctcagagggccgtcctatgttcagtaagccaatgctagcaccatgtgacgaggacacagcagtgagcagctgcccaggccccttgcactgtgtttggaaaaggaagctggcttgttcaggggtccccagcaggatggggggcgggggcagggaccatggcagagcgagagttctaggagagaagctggtccacccacaggctccctggcctgggtgctgtaccaggcagggtgctgggcattgtgctgctcacttcccacccctgggttgcaactgggggctgtgtggccttcccagtcctgttgtgggtgctgtgattgtgcccaccttacagatgggaaaactgatgctcagaggcttgagcaacctaggccaggacctgtccttagaggcagaagcaggactcagaggaagagcaccctgaccacaaagccccaggtgacttacactgcagggatggcgctctccggggtgtgcagggtggcagaggtgcctctgcagagagatccctgcctgggaccctttcctggggctcttctggtgctgggagtgtgagcaccacgaaagccccactacagtcatgccacccagagggcgctctggcctcttggtcacccgtgtccttctggcaatgaccaatacacttttttgccagggtccagaaagactcagccactggagtctgtatttcctgagtcgcctctcactggtaagtcctgagccccgttccttcccagcacccactcttggagcagctctccagggctgtgctgtggctgctgcggtcagggagaggtcgcatgctccagccagggtctttggggactcagtttagaactaatacgccaagcaagtcgtgctgagtgtctgggcttcttctaggaaggtatttccaatcatcaaatgtgccattaaaaaaaatgcatgtcagttaagtgtgcactaagcctggaccacatgggacatagtggttccaataaacacgaataagccagttttcacattagagaaataccagtttcttgcagaaatgcggtgcttttaaaagaggttaattaataaacagcaggtaattgttcgtggcacgttgtggcagagggtaattttcattttagaggatggaagggccaaatacccctccccactcagcatttttctgtaataatcacctcagcttcacctccgcctttcatttttacagctggagctgtttatcatcgctccaactttcactaaaaaggaaaaactatcacttaaacaaagccattgaaaccccagcatcatgtgtggattttttaacataaataaatcatacaaactaagattta

SEQ ID NO: 1578 - DNA, 4073 bp, Homo sapiens; identical to SEQ ID NO: 1577

SEQ ID NO: 1579 - DNA, 364 bp, Homo sapiens
acagcagccaccagaaattaatatggggaggaaatagggatttcatctgtccatagtaaagacatgccgggggtgataagaatctgagcccatctcacctagatgagaacgagagagtaatgaccacagaatagtggtgatggccatcctcacatctggctccttagccacccatgccagtatggactgactgccttctacgtcttgtccatggccattctctagggaaattcccttgcatctcctgctacctttacagactacatattttgttggattactttctcattttcatgaagcatatcttctagtaacttctgataaaagatgcataggagataaatattttaggacttccacagta

SEQ ID NO: 1580 - DNA, 4781 bp, Homo sapiens
ccggcccccgcctcctccccttcgcccccacccaacggctgctgcttcgggcttcgcggctcaaaaacaacagcggaggcgccgccagctccgcgctccgccactgcccaggccggcgggcggcactcggacccgccgccctcggtccctcgcgaggccacggaggccaacacgcctcgcacggggggacagcgcgggggcagccgtccaaacaccaggcgtcctcggctggtcgtcccagggcgcccgcacctctccgcccgcgctctcctgccgccgcgcccccaaggtgagtacccggctgcgcgagcgcccgagctgggccaccttcggggacccgggccactggggacactcccctctggcctctcggggcccaggtgcgtagcgggcggaaaggccagcggcgcaggtggagcagctcggacgggagccgaccagacgcttcctcttcccctgtagcccccaaactccgaggcgctgcggcggaggggccgggctgagcgcaggcagggtggcccgggcccaggagcctgacggcctgagtgcggatttctcatctgagtatctgggaatcgagaatgaattggaaggaaaccgaggcgctgccctggccaggttgctgccccgcacccttccggagcaccgaagtcctgcccggcaacgggacttggagctgccgcagagtcagcctgagcccgaggcaggggtcgcgcccgcgatgcggggtctctgcgccgccccgcgaggctcctggccttgccctccctgccctttgttgtgtaataagacctgtggcggctccactgagacccacacgtgcaactccgcgcctccgcgttaaaggaggtgaaacgcagcagccctgagaaaccccgagaccccggtgtcctagcagaggcgccccggatggggaggggcgcggggccggcgccaccccagaggaaaagcccagcggagccgggttgggcaggagctggcggcggcggtgcgctgggccttctgccttggatcctccgcggtcggcaccgcttccctgctcagattcgaacccagattcggctcccaaggctcccacggctccagggtgcccagtcttgcagccagctcgccgcccgagccccggatggaggaagcgctcactggccgctacctctgctgtttctggcaccaggtgagtgtcgcctagagaagggccatgagcaatggcacagccccattccctgccgtcctttcgagggtctatcgacccctttacccaccctccccacaccctgaccatctttctacaggggttggggcagagaacagctcagtttacaggcccggctctggaggtcttgatctgcctagccaactagggcaccgctgcagctttgcaccgccaaggccggttctgaacctgctcgccccagtgggtgggaggtgctggagcccaggaacacgggcgctgtcttgcctaaaccccgccaagggcaggttcccaacggtgggcccaacctggctggagctgctggctagaaaggactcaaggtcactcccatatctctgcacccaggtcccccttgctcctgcctgaagcctctgcaggtttgggaggaggcctggggaagttactatggtgcctgcgaaccactcccacctgcagagagggtcccttccccaccctcaccctgcagcccagcagaggcctcctttgcccctggcctggaggtagccaacagatgccaaggttgtgcagtcctggccttcttctacgggtgccccaactctctcaggccctctccctgcctcctcctccagctcaggaggtggttctcagaaccctggccaggctaggacaggacagccatccctggcctgttgccagcccctagggaagaagggcaggaggtatgggagcaagctggtctgtgccatctggtccttgccctccaccaggctgttgggtagggatggggtcatggatctgcctgggaaggggtagctgccggtcaagcctcgccagggagacagccgggctgcctacctgcaaggcactgacgcagccctggctccagtggggcagtgtctcccgagcctgctcgaggagcccaggcaggctgtccccaaggccatggccctggccgaggttgcatcctggcctggccaggccctgcccccgcgtggccagacttagaagcggagagcaggtcaggcattgaggagtcccgtggggaaaaagggtgaagcagggaagatcagatgcaagtcctccctggggcccagttctgtgtccctgcctggcaagggctttggggggcttggagaacaggtagggcaaatgtaggcccagtggggaaaaggttgatactaaaaggtctaagggcaattttcaaaccaagtctagctctgcagagccttgaggctgatgccaggccctggggcccctgcgctgggattgtaagtgctgtaagctcattcctactgacctccttgggtcgtccaaggacagtgagtgtgggttggccacatagaggctcctacactggacaactgcacgctgctgtcgagttccaaaaccaatttcatagctggggtcttggaggctagagcggggctttaaccaccaacttctgctggggtctgggcagagagggagtccatggaaactcgatttctccatgagccctgcagactcccagtgtttctaacggctggagacccatgaccaggttaattccttagggaaaaggccgggtttgagagccagaaatgctggtcctgccgtgctggaggaagcatcttattagcgagtaggaggcccccaagccccaggggttccccagaagcccattgagtagcagaactaccatgccggcctgccctccactcccggaatctacaaatgcattcaagggctagagggccccttcgcttggccaggccttgtgccccatgccaactggcagggtcagagcagccccagctgcccctacccccagcccctcaggccccagggagccctgcttcgggccgtgtgtgcaggacaggaggtaggcatggcacctggcaagatggactcacctcaccaggttctttctctcccactttctctcccctcacctcacccctttctctcccactcctctgtgctttttgaacttagccatgggttttcagatacttggcctcaggctctattgaattccaggtcaaggttttactgactccacacccccaccttgttcctccgggtagcaaagaagcacacagcctctggtttaccaacgggctttcctgggagattggaaatgccccaggtgggatccagatcgccagcgctcaccccacccccaatacgtgggccactgagtcaggccaggatgaggctcttgctccccgggcatgttctcctgccccagacttgagcagcaggagccaggagaccacaggggcccttggggatggctgacttggctcccactagacagaggggaacatggaggagggctgcttggaccctatacctcgcaggggactcgatgggggctgaatgctggaaggagcctgcgtttggtctagaatggtgggggtgggtgggagacacaagtcatggaaaaggccatttcttccctattgagacctctgaaatgacccgaagtgggtgcttcctccagcatcatgcctcagccgcacactggggctacaggaatccccccagaccctggggtcaatatttcggggcccctttgaaccttcttctcacccgaggcctgggaaaccttcttgtgccccagaatacttggagaggacaggacacaggtcccagttgtggcccagtggtggcaaggttccattccctgcactgctcaaaggtgggggcctcccaaagccgatacccgattcctggtcccagagtgggtagctgggaggagtggacttcctaggaatgtgagccatgtcgctgatttcgaacaaaccccagatgtgtggaaactgacttattttgattgcaagagggtccttgtcccttgcagatgggcagcttccggggaccggcttgcacgatgccgtggccaccccagtggagaccctctgcccggctttgtgtcctggcgtccccaccagggtgcccagctctcctgcgcagatgtcgggagtatctggatgccccatgggcacttcgagggcccaatccggagttttttgttttgttttgttttaagagattgagactgtgaacctgaactcccttgatctcctcccgttgggcccaggagggagccgaatccaggcccaaccgggctcactgagaaggtgcaggaagcccccaacgactcctactcgtgtgcggcccatactgggccaggacgctgcagtggccgagccgctgggtgtctgcaacggggagctcccccgccgctgggggcaataaacggaatcggtttcacacgctttccctcttgatctaagaacctttaaaaatccgccaacgaatgctgttgcctggatgcgctgcctatgaccttcagccgtgtgttcacgcgcgcccgcagccgtggagtggcggtccctcctgccgcccgcaaccccggggccgccggtctgcgcacaccgggagcaacttcgttacccacagcgcccgcgtcctgcggctcgcgcggaactgcgcgcgggaaggtggcagagcgacgctccagaacgctgcttgcgtagacgctgccgctgccttcagatcccaattcggccgcgcgcgggcggggccctggcagcaacgaaaatggcgagcctcgtagcct

SEQ ID NO: 1581 - DNA, 4781 bp, Homo sapiens; identical to SEQ ID NO: 1580

SEQ ID NO: 1582 - DNA, 364 bp, Homo sapiens; identical to SEQ ID NO: 1579

SEQ ID NO: 1583 - DNA, 304 bp, Homo sapiens
caggctcgaggctcactctttcccggcccctgagtaagatgggaaagaaggtgcccacacagggcctggtgcacaggaggggctcagcacaggttccctgctgggacacagggccaagacctgagaatgtgcctccaagtggggctgggccctgctgctgggagctggcaaagggagctgggaggggagggcctggaaagccacattattaatttatttactgccatggcattccccatggggcggggctccccccagagctgggacagatggtgttcctgggagcctgcagtgtctcagcagc

SEQ ID NO: 1584 - DNA, 304 bp, Homo sapiens; identical to SEQ ID NO: 1583

SEQ ID NO: 1585 - DNA, 304 bp, Homo sapiens; identical to SEQ ID NO: 1583

SEQ ID NO: 1586 - DNA, 412 bp, Homo sapiens
gaatcctccatgctccccacccccatgccccctccacaaccccagcctggcaatcgttccccttcatccattcctgcctcccccaaactgctcctgctggcctcttccccactcagcttcctaaatccttcggggatcagctctagcctcctttcctctgggaagtcctctctaccccttgaccatgggaccaagctcactcctgctccctcctctgagctctcctgccctggcagtcagatgccagggcgctctgctgtctgtcgcccaccgtgctgtgccacgagcaccctgttttctccatcacgtgactctgtatgtgtgtctgtctggtcttctctgcactgtgagctctttgagcctcgggagtgtgctttcttcattcctgaaccttctaccacccttggatggg

SEQ ID NO: 1587 - DNA, 253 bp, Homo sapiens
aggcaggtggatcacaaggtcaggagatcgagaccattctggttaacagggtgaaacctgtctctactaaaaatacaaaaaattagccggttgtggtggtgggcgcctgtagtcccagctacttgggaggctgaggcaggagaatggtgtgaacccgggaggcagagcttgcagtgagccgagatcgcgccactgcacttcagcctgggtgacagagtgagactccatctcaaaaaaaaaaaaaaagaacctc

SEQ ID NO: 1588 - DNA, 253 bp, Homo sapiens; identical to SEQ ID NO: 1587

SEQ ID NO: 1589 - DNA, 412 bp, Homo sapiens
gaatcctccatgctccccacccccatgccccctccacaaccccagcctggcaatcgttccccttcatccattcctgcctcccccaaactgctcctgctggcctcttccccactcagcttcctaaatccttcggggatcagctctagcctcctttcctctgggaagtcctctctaccccttgaccatgggaccaagctcactcctgctccctcctctgagctctcctgccctggcagtcagatgccagggcgctctgctgtctgtcgcccaccgtgctgtgccacgagcaccctgttttctccatcacgtgactctgtatgtgtgtctgccttgtcttctctgcactgtgagctctttgagcctcgggactgtgctttcttcattcctgaaccttctaccacccttggatggg

SEQ ID NO: 1590 - DNA, 240 bp, Homo sapiens
acaaggtcaggagatcgagaccattctggttaacagggtgaaacctgtctctactaaaaatacaaaaaattagccggttgtggtggtgggcgcctgtagtcccagctacttgggaggctgaggcaggagaatggtgtgaacccgggaggcagagcttgcagtgagccgagatcgcgccactgcacttcagcctgggtgacagagtgagactccatctcaaaaaaaaaaaaaaagaacctc

SEQ ID NO: 1591 - DNA, 412 bp, Homo sapiens; identical to SEQ ID NO: 1589

SEQ ID NO: 1592 - DNA, 370 bp, Homo sapiens
cacatgactgtatctagccccccgggttcccctggccttgcctctcaagcaaccaccatgaaccctctgtgtgcatgtgggcggcctggagttaacccttgggtgccagcctggagagggggggcatgcatctttcttcctaattagtgtgggcctttctgactaccatgtccgtgggtagaggaccctgcccatggctctagctccaggactttgggaggtcttagctcgcctgctccctccatttcatcagaaccgcacatccctctcagaggagcagttgcgggcagccgtgacagctgggaggatcccagagccccagagggcagggactgggcacagcgggcatcacaggtaactgaggacctgg

SEQ ID NO: 1593 - DNA, 371 bp, Homo sapiens
cacatgactgtatctagccccccgggttcccctggccttgcctctcaagcaaccaccatgaaccctctgtgtgcatgtgggcggcctggagttaacccttgggtgccagcctggagagggggggcatgcatctttcttcctaattagtgtgggcctttctgactaccatgtccgtgggtagaggaccctgcccatggctctagctccaggactttgggaggtcttagctcgcctgctccctccatttcatcagaaccgcacatccctctcagaggagcagttgcgggcagccgtgacagctgggaggatcccagagcccccagagggcagggactgggcacagcgggcatcacaggtaactgaggacctgg

SEQ ID NO: 1594 - DNA, 383 bp, Homo sapiens
gggctctgggacaacctgcccaaatgtgttcttgagcagcacgggcatccggtggcacccacgctctggggttggggttgccctatccctgttcgttggacacagccaggtactccaggcttctcccggggctggctgccttctggtcccttctcccctctcccttctggggttcgctatctcctggcctccctgctgccctgtcctgcaattctcagacctatctctgtctcctgtcctggcatttccctgcgccccacagggtaggcgtactttgcgcggatgcggagctcaccaggtaggcccaggacgtgcgtggtgtgaagttggtgtggtggggcgtggtgccttctcgggtgctccagccctgcgtggggagatgc

SEQ ID NO: 1595 - DNA, 488 bp, Homo sapiens
cggaaccacctccgccctcccacccccacccctgctcccctcggctcttaccacctgcccttccctcctagttctctctctcctacgaaggcttctctctgcttcctggaagcctctattactggcagctgccccgggccttcctgggggacaaggtaacaaggatttggggggattataggggtgtcatagaatcccaaaatatcagagggccctttgtcaaggccctttatgacacaaatggggagaccgaggctcacggtgggtagagacttgcctggggtctcatgttcaggtcagagcacagctgagactgaactcagctctgcccctgtccttcagcgggccctgacccctgacccctggcccctgacccctgtcagaggagctgtctcgcctgggagggtttctctagtgccttttctctgggcttccttgaccttgtgtctagatgctggcctagtttttggtacttcactcagtcattc

SEQ ID NO: 1596 - DNA, 387 bp, Homo sapiens
gggctctgggacaacctgcccaaatgtgttcttgagcagcacgggcatccggtggcacccacgctctggggttggggttgccctatccctgttcgttggacacagccaggtactccaggcttctcccggggctggctgccttctggtcccttctcccctctcccttctggggttcgctatctcctggcctccctgctgccctgtcctgcaattctcagacctatctctgtctcctgtcctggcatttccctgcgccccacagggggaggcgtactttgcgcggatgcgccgggctcaccaggtaggcccaggacgtgcgtggtgtgaagttggtgtggtggggcgtggtgccttctcgggtgctcccagccctgcgtggggagatgc

SEQ ID NO: 1597 - DNA, 488 bp, Homo sapiens; identical to SEQ ID NO: 1595

SEQ ID NO: 1598 - DNA, 11538 bp, Homo sapiens
ggggaaaaccggctgtggagaaggaaatagggcccggcgctgagtgagcgtggttgcgtgtcctttgcagacactttctggggcgaggtgacatggcgagagtcttggatcggtggacgtagacggtagacagttcgcgtgcgtttccttcgcctacttggcctacatgccttctgcccgtgaagcgatgtttcccctcgaaaggccgtaggctacgccgtcagaatcggtttttcagtgagttttgacccctccgacgctccgtcgcctgacagaatcgcggcgttcttcgtacccgcccatcctccgcggacgcccgctgccatggcgactctgctgcgccctgtcctccgtcggctctgcgggctcccgggcctacagcggcctgcggcaggcaagtggcgccgggttctgggcgcaggcgggaaggagcctgagggcgcccggctcctctgacctcggcctttttcttgccccgcagaaatgcccctccgggctaggagcgacggcgccggcccgctatactcgcaccacctccccacctccccgctgcagaaagcgctgttggccgccggctccgcggcgatggcgctctataacccctaccgccacggtaaggccgcccgcgcctcgcccccgtgggggcggcttggagccgtttcctgtgggtaactggaacatagcctaggtcggggtacccaaacctggttgcagctcgtaaccactcggaacgtttatgaaaatgcagattcctggatcccacctaaacgcactgaatctgaatctgaatctgcagtggagggagaaatgggcgtgaaaccgaaagtctgtctttaaactacttgggagaatctgtcatgcagccatattgagaacatctagactaaatagatgattcataagtaccgatcagtttataatatcctactagaaagtcaactccgaggtcgaggaccatgtctgcctcgttccactgcatctgcagccttctggatagtgcctggcacatagtaaatgctcaataaatgtttgctggatgtgtgactagaacattctagggttctacagtgtttttcttatgcctcctagatttttgagttctgggaagtactgttattcctactaacaaaaacaggctaggcgctattatagtggctcacgcctataatccctatcggggggccgaagcgggcagatggcttgagctgaggagtttgaaaccagcctgggcaacacggtgaatccccatctctacaaaaaaaaatacaagaattaattggggctggttgcatgcggctgtattcccaggctgaggtggaaggaccatttgagccggggagttcgagactgcagtaagttgtgattgcgccattgcactccagcctgggcgacagagcgagaccctgtcttaaacaaaaaatacactatatctccatgtccccagtggttttttgtttgttttgttttgagacacagtattgctctgtggcccacgctggagtgcagtggcgcaatctcagctctatgcaacttccacctcccaggttcaagcgattctcgtgcctcagcctcctgagtagctgggattacaggcctgtgcggcctggctaattgttgtatttttagtagagacgggattttgctatgttgcccaggctggtctcaaactcctgacttcaggtgatcctcccacctcggcctcccaaagtgttgggattacaggcatgagccaccacgcccggccaagaccagcgaattttttaatttttttgtagagacggcgtcttgccacgttgcccaggctgctctggaactcttggcctcaagtgatcctcctgcctcagccccccagtgttgagattacaggtgtcagccgctacacttggccactaagtgttatatatatatgattttcatggtttctcacattaaccagctaagaaaggtgttgtctgcacttcacaaattaagacactgaggctgaaaaatgtgaagcaggccaggcatggtggctcacacctgtaatcccagcaatttgggaatccaaggtgggaggatcacttggggccaaagttcaagaccagcctgggcaacatagcaagacctcatctctacagaaaatttaaaaaactagctgcatgcctgtagtcctagcagtgagctatgatcacaccacttcactccagcctgggcaacagagcaagaccctgtctcaaaaaaacaaaacaaaacagaaatgtgaagcaatttgtactaggtcacctagatagtgaacacacctggactgtagcccagcatctctgatgcctaagcctctaccaatcaatggagacatgatattgtattgtgaaaagtgatttataaaatctttacaacgttgtgctaactagagctgtcccgccccagtagattaagaataagaactatagatatgtatactgatcccttgttgtgtgctgggtaatttgctaagtgtttagcctgaatccttataacaaagagctagacatcatccctaatttatcctgtaggaaacaaaggctcagaccaggtcagctaacttacctaagatgacatcccccatttgtgcccgtttctgtcctttcagacatggtcgcagttctaggggagaccacaggacaccgcaccctgaaggtcctcagggaccagatgaggagggatccagagggtgcccagatcctgcagtaggtcccagctctgcctgggggtctgggggcattctctaggtattctgacctctctagaatcacattgtgtttgttctgttccgctagggagcttttgataccctggctacatatggttgcacaggctgggcactgcccaattccaggggtgtcattcacatacatgtgtatacactgatgacttccgagttgtgcagtgtgatagccttggcccagtttcaaccacagggctctgtgccttcattaagttcccataacatgtgctggctttacccctcccttgcagtaccttttgcaagtactctggtcacattcgaggactgtcttcctgccgagattgtacccctgcccatgtccttggtttggggtagtatcctaagtccctgacactagcctggccagttgtaggtgctccattaaggcttgtggtggccacattgctcctctgtacattctcccgcccctcagctcgctgtagttggatcgttcacctacctttgcccacaccctcccaatgcccaagtcttgcctttcagggagcgtccccggatttcgacatccaccctcgacctgggcaagctccagagcctgccggaaggctccctcggtcgcgagtatctccgtttcctggatgtgaacgtgagttttcagctcctgtgtatctggcagtcaccagacaggacagaggaatagcacaggcatgacaccctgaggaaagaggagccctgagctgccaccattggcaggagtgctcttcaggctcatgccaaggctttgtcattttctatgggataggcaaatgggtgggaacatgcctgcaattgataatactggccagtgttcattaacctcgcactgcatgcctgatgccagcctcatccgtgatcttgctgaatccccccacaactctgtcaagtatgttctattattatcctcttttagtagataaggaaacagaggctcagagcagtgaagcaaacttgctaattccacataactggtattaatggagatagtaatcaatcccagatcatgctcttcactgctgtactgtatccctttattccagggacattgctttccctacggtatggcaggtgtggcactctccagcccctccagccccaggcagggaggacaaggagagggggaaagggggtgtcccgactattggcaaactcattcactaactgaggctctgctatgtgccatccctttttttttttgagtcgctctgtcgcccaggctagagtgcagtggtgcgatctctgctcactgcaagctccgcctcccaggtacacgccattctcctgcctcagcctcccgagtagctgggactacaggcgcccgccacgacgcccggctaattttttgtattttttagtagagacggggtttcaccgtgctagccaggatggtctcgatctcctgaccacgtgatccgcccgcatcagcctcccaaagtgctgggattacaggcgtgagccacagcgcccggcccatcctttttgttttgttttgttttgagacagggtcccgctctgccacccaggctggagtgcagtggcgccgtctcggctcactgcaactcagcttcctgggttcaagcgattctcctgcctcaaccccccacgtagctgggactacaggtgcacaccacaacgcccagctaatttttgtacttttagtagagaggggttttaccatattaaccaggctggtcttgaactcctgacctcaagtgatccacctgcctcagcctcccaaaatgctgggactacaggtgtgagccaccgtgcccagcccaaccattgttttgtgtacaggggatataatggtgaactagacagccaagttccctgccctcatttctattctacttcgagaggtagacaataaaatagtttttaaaaattttcagggaaggcacagtggctcacatctgtaatcccagcactttgggaggctggcgggaggaccacctaaggtcaggagtttgagaccagtctgaccaacatggtggaaacctgtctctactaaaaatacaaaaattagctaggtgtgatggtgtgcgcctgtaatcccagctactcgggaggctgaggcaggagaattgattgaacccgggaggcacaggttgcagtgagctgagatcacaccactgcactccagcctgggcgacagagtgagactctgtctccaacaaaacaaaacaaaaaaattcatataaaaatacaggtaaaatgtttcaagtaattagaatattctggcactggtccatgcgtgttggctcatgcctgtaatcctaatactttggggggctgaagtgggcggatcacttgagcccaggagtttgagaccagcctggacaacatggtgaaaccctgtctctgcaaaaaatgcaaaaattagccaagtgtggtggtgtatacccatagtcccagctacctgggagggagtttgaggtaggaggatcagttgagcccaggaggtcgagggcggtgagccgtaatcacaccactacactccagcttggacaacagagcaagactctgtctcaaaaataaaaaaaagtataccagcactattgtcagcagttgggatacagtggacaaaaccagcaaaaagcctgcctttgtggaacttacattctagcagctatgaagagaacaagttagtgtgatagaagacagctttggtattgggaagggtacagccacttctgactgggtggtcagggccggctcctctgaggagacttggaaggtaaggaggagccaaccctgtggagagctgaggaggagcattctgagtagagggaatggcaagggcaaaggccccttgtgtttaggaaaaggaaggttgaccagtgtggccgcagaggagggagtagcagggagacagtgagtgggctggaaggggagccagggctgcgccctgtaggccaccagaaggaggagtctgtattttgtaataggagcagtaggaaacttgtggaaggttttgagcaggacagtaaagtgacctgatttgtaaaggaccttaggatccagttggcccatcttccctgtccctgtcccatcttccctccctcctgcaacacagatacatcccatcaaggcacccctgccaaatggcgagccagtctggctgatggaggtgaggggtctccaaaggttgccctagaacagtttctcaagccgggcatgttaatgtttaggctggatcactctttgttgtgggggcggtcctgagcctggtaggatgtttagtggcatccctggcttctacccactggatgccaggagcacccccccgtcaagttgtgacaaccacagatgtctccagagattacagatgttccctggtgggcagttgagaaccactgctctgaatggttattgtccccgagacgatgttctgttcctcacagtctcctgcacagctaccttgacggggcgatcacctgcactattttaaaccatctctctcagatttcaccaggatgcaagtcatttcatcagtgggaaactcaccagggtgacctgcctcaagtgctacacagggagggacagtctgaatttcccccagtctttagccctgtcgctgtggaggggagggggtagcagggacaggactgctaggacaccttgctcagccacagccccacttgtaaccgcgctggcgattgtgacacttgtagagcaaggaaatcagcagctcatggaatgtgaaggagcacctttgtccccagagagatttagataaaggttcaaggtgaggctaccctcccctccctgaggctgattttggtgagaggtgtggtcatcttgtagtatcaagactacaggcatgggcttgagaattaggaggagcctgagtgagaatcctggctctcttcccagctttacaagcctggacaaatcctttgacctcgctgagtctcaggttcctcatcagaagtaagaggacctcccatatatcttccagggcacttatcggccttggtaatggatattaaggccactggctttggaatccagcagactttgtttcaaatgctgactcggccactttactagctgtgtgatcttgggcaaattactttatctctctgagccttgttttccttatttttatttatttatttatttttttgagtctcgctctgtcacccaggctggagggcagtggcacaatcttggctcactgcaacctccacctcctggcaattctcctgcctcagcctcctgagtagctgggactacaggcgcacgccaccaggcctggctattttttgtatttttagtataggcgggatttcatcatattggccaggctggtctcaaactcctgacctcaagtgatccgctggccttggcctcccaaagtgttgggattacaggcatgagccaccacgcccggcccttgttttccttatctatatctgcagtaataacagtatttacctccaagattgcaaggatgaaaggataatatatgtaaaagacaccctaggtgccggcacctggtggatactctatgatcaccttcagcttcacacagcaggctaaggccattctttgggaacaggaagaccaggctgttcccactgtgtatgggtgctgctgagtactcagaggcagtgggcagttaagaggagaagagttctgggatcagaaaagtgcccaggactggccttttattcatatgttcaagaggtgttcattcatccaggccctggatcaggctactggaggtaaaagaataagtgaaacagagccagtcctgcccttgtgtagcagacaggctgtctggatactgtccataaaaataaaatgtgatcggctgggcacggtggctcacaactgtaatcccagctctctgggaggcccaggcgggtggatcacgaagtcaggagtttgagaccagcctgaccaacatggtgaaaccctgtctctactaaaaaaaaaaaaaaaaattagccgggtgtagtggcacgtgcctgtaatcctagctactcaggaagctgaggcagaagaattgcttgaatccgggaggaggagattgcagtaagccgagattgcaccacggcactccaacctgggcgacagagtgagactccatctcaaaaaataaaaataaaaataaataaataaaatgtgagcacgtaggtaatttttaattttctgccagctactttaatagcaaaaagaaattaatttttttgctattaaaattaaggtggaatttttttgtttgtttttttgagatagagtctcactctgttgcccaggctggagtgcaatggtgccatctcagctcactgcaacctctgccttctgggatcaagcaattctcttgtctcagcctcccaagtagctgggattacaggcacccgccaccatgcctggctaatttttgaccatattggtcaggctggccttgagctcctcaggtgatccgcccgcctcggcctcccaaagtgctgggattgtaaccatgagtcaccgtgcctggctagaattgattttaaatatgcatcttgtttagcccaatatatccaaagtattatttcaacaagtaatcaattttctttttttttttttttttgagacgaagtctcactctgtagcccaggctggagtgcagtggcgcgatctcggctcgctgcaagctccgcctcccgggcttacgccattctcctgcctcagcctcccgagtagctgggactacaggcgcccgccgccacgcccggagaattttttgtatttttagtagagacggagtttcaccgtgttagccaggatggtcttgatctcctgacctcatgatccacctgcctcagcctcccaaagtgctaggattacaggcgtgagccaccgcgcccggccagtatttttaaatcattgagagttttacatttttttcatactaagcatttgaagtctcgtgtgtattttatatgatcagcacatctcgcttggacaactttcttggccacatgtggcaagcggctgccatactggacagtgtaggtctaggagacattaatactcacatccactaaacatcaaggtacagttattttgagtgccactaagaggtgaatgatgtttccagagaccataacatgaacccacttggtctgtaggttaggggtggcctctctgtggtggggggaagggatgggggacaggggacacttaacccaggtcatgaaggataagtaggagttaccacagtgaagatggaggtagtgggagagaacaccccaagctgggagcaagttatgctaggatcagggtctttggggcttcattatttatttttagagacaatgtcttgcttgagtgcagtggtatagtcatagctccctgtaacctcaaactcctgggctcaagcatcctcctgtcccaagcctcctgagtagctgggactataggcacacaccaccacacctgactaatttttgtattttttttgttctgggttttttttttctttgagacagagtctctgtcacccaggcaggagtgcagtggtgcaatcttggctcactgcaacctccgcctcctgggttcaagtgattctcctgtctcagcctcccgagtagctgggactacaggtgtgcaccaccacacccggctaatttttgtattttttagtagagacagggtttcaccgtattggtcaggctggtgttgaactcctgatctcaggtgatccgcccaccttagcctcccaaagtgctgggatttacaggcatgagcctcggcccctggccagtcgccagagttttctagtaggtatgagttaggtgagagttgtgacggtgtcagagacagactggcaaatcgggccctgggaaccatcaggaagggttctaggggaggctcatggttgtcagagggtctccccagacacccgagcacccacccgcttcgtggatgatgaggagctagcgtatgtgattcagcggtaccgggaggtgcacgacatgcttcacaccctgctggggatgcccaccaacatcctgggtgagtgcccccaaccctgatggcctgtctccctggggtggcttcagggccagggcagggcttgcctatctccaccaccctctgcatcacctggcttggtgcctcaatttctgctttacctgaacatcttagtagcatctttgccacatgtcccccttctttctcccactgcccctcagggctcctgcactaatggagcagcagagcccatcttcaaggctcctggtgtctttttaggctttagctgcctccctgctctgaaacctcagtagctccctaaggcctgcaggaaccatcctggagtgtttagcctggcttatggggtcatggggtcctctgcgccctgaccccaggcttcctttccatcccctactcccttctgttcactcttgggctctctcctgtactccaagccaagtgccccagggcccagcacaggccaggactgggcacagctgaccccgtagagattagggaggaacagtgcctctctttaccctgctgtgagcaccactggcctttccttcagatagcttgttcacctcccaacacatccctcacccacaggggagatcgtggtgaaatggtttgaggctgtccagactggcctgcccatgtgcatcctgggtgcattctttggaccgatccgacttggcgctcagtaagttttcaagtggtagctgggtcggggttgagggtggtatcaggacagaactcagagggaccagggctcttagaagtaggaagagcacacgggcccctgcacagcccgttccagttctccaggaagtaagggtagaaagaatggagcagagatgtgaaactggcctggggcaagggtcttcaagtgagcaaataaagcctgtacatttcacaggactctggggtctcttgggccaggcctaagtgcatggtcagaatgatgagcgtcagtgggaaggcaggttggtgttagattctggagtgagggagccatgatttaaatctgagcttcgacatgttcaagatgtgtggctttgggcttgagattccacctcactgagctctgttgcctcatctaaaaagcagggataataactacctccttccgaggcctttgtgaggatgaactgagaaaatgcacaagtgccgagcagtcgagtgcctggccccagggacttgatgttttctttttcctctgctgccccacaggagcctgcaagtgctggtctcggagttgatcccatgggccgttcagaacgggcgcagagccccatgtgtcctcaacctgtactatgagcggcgctgggagcagtccctgagggctctgcgggaggagctgggcattacagcaccacccatgcacgtccagggcttggcctgagctcctgagccagcggggcctggcctacctcccccatcccctgcttcccttggaggcagagggctcccttgactacctttgttcctcttctttgaacactgacccttggacaacatttatcataatttgtcataaccactgctgagtggccttgaggacgaaccccgcagggagcaagcagtacagtggcattcccagggggaccagcagctacccaaggagaaccatgcatgaacagtatcagtcgtctgggctcatgctgggatgtcgcagtgctcctgttgcaactcctcccagccagccaggtttgctgggggccaggctgggtgtcctcacaggagtgagggctacacccaattccaaaagcctgagaagagagaagtggagggggaggcgagtgtgtgaataaaggctcccatcaggtcaa

SEQ ID NO: 1599 - DNA, 17792 bp, Homo sapiens
agcttttgttttgtttttatggtttttatgtgggtgtgataaaatgtgcataatgtaaaatttatcattttagccttttttttttaagagttgagggtcttaattagccaggtgtcacggtgtgcatctgtagtctcagctacttgggaggctgaggtgggagaatcacttgagcctgggaggcagaggttgcagtgagctaagattgcgccactacactccagcctaggtgacaaagtgagactctgtctcaaaaaaaaaaaaaaattacgtacatacttatatataaaatgaatcagctcccaagcctctgcttcactgaccagccagatctcctccctgtgctcatcactccattattttcttgcctgatccccctacgtcataatctctgtgagacctagagcctcatctgtccttgagtaccaagtcccagcacccagagcagtggctggcctacaggagcacgcgattaacacacgtgggtgggatgaaagacaatgagcaagtgagtgtcgttttaatccccattttatagataggtgacagcttcagaggccacattacccagtcagtaaacacagtaagctgaggttccacccaggccctttggctgtgaaagccaagatgagtagcctgggggccacgcccctcccccaggtgcccagttcatacaggcaggcaattggcagacgtgggggcctgtggatttgtcagcaaggttgctggtggggtttttgtttgtttgttttgagatagggtctcaccctgtcacccaggctagagtacagtcgtgtgatttcagctcactgcaacctccacctcctgggttcaaatgattctcccacctcagcccagatctggagtagctgtagctggactacagacaagcgccaccatgcccggctaatttttgtatttttggtagagacagggtttcaccatattggccaggctggtctcgaactcctgacctcaagtgattcacctgctttggcttcccaaagtgcagggattacaggcgtgagccaccacgctcagcctgctgggtggctttttctttttttctgacatagggtctcgctctgttgcccaggctggagtacagatctccatttactgccgccttgacttgctaggttcaagcgatcctcccatctcagcctccctagtagctgggactacaggcacacaccaacacccccggcttttttgtttgtttgtttgttttttgtagagacagggtctccttgtgttgcccaggctggtctcaaacttctgggctcaagcaatcctcctgtgtggggatcgcaaagtgctgggattacaggcatgagccgccacacccagcagaattttaatttaaaagctcagcttaaacacctcatgatgcttacacatttggtacatttttaacaatcgttgattgttcaactccatccgtctcagagttaaagacacaggataaggaaaacatctccttatccaagtgatttggggtggtattcccagctgtctgaggctgtacattgaccaattattttggccatgactcagagttcccctatcctgctatcctgagatcatgagaggccatcacagagtccacttttatcatctctatgccaataagggctctaaatggggtggtgtgacagcccatgtgccctacgttcaagttacctaatttttccaaagaactgagttttgctgataccctccactcccacccagctttcctcaccatttcattggattctgcttgtctaaatattgctgattttgttctgatttttctcttttttttttttttttgagacagagtctcactctgtcacctaggctggagtgcagtggcgcaatctccactcactgcaagctccgcctcccgagttccagttattctgcatcagcctcccgggtagccaggactacaggcacgtgcaagcacgcccggctaattttgtatttttagtagagacaggtttcaccatgttggtcaggctggtcttgaactcctgacctcgtgatccgcccaccctggcctcccaaagtgctgggattacaggcgtgagccaccgtgcccagcctttttttttttcttttctgagacagagtctcactctctcgtccagactggagtgcaggggcacaatctcagctaatggcaatctccacctcctgggcttcagcgattcttgtgcctcagcctcccaagtagctaggattacagaagtgcgtcaccatagctggctaatttttgtatttttagtagagacagggtttcactatgttggccaggctggtcttgaactcctgatctcaggtgggccaggtatggtggctcacgcctgtaatcccagcactttgggaggctgaagcgggcagatcacctgaggtcaggactttgagaccagcatgtccaacatggtgaaaccccgtctctactaaaaatacaaaagttagctgggcgtggtggtgaacgcctataatcccagctacttgggtggctgaggcaggagaatcacttgaccctgggaggcggaggttgcagtgagccaagattgtgccattgcactccagcctgggtgacagagcaagactccatctcaaaaaaaaataataaaattagctggaaaaaaatatttagccaggcatcgtggtgcacgcctgtagtcccagctattctggagggtgaggtgggaagatggttgagcctgggaggatgacggtgcagtgagtcatgtttgcaccattgcactccagcctgggtgacagagcaagactctgtctaaaaaaaacaggccggaaacagtggctcatgcctatattcccagtactttggaaggccgaggtaggcggatcacctcaggtcaggagttccagaccagcctggccaacatagtgaaaccctgtctctactaaaaatacaaaaattagccaggcttggtggtgcacaccggtaatcccagcaactctggagactaaggcaggaagaatcgcttgacccaggagggtcgaggctgcaatgagttgaaaccgcgccactgcactctagcctgggcgacagtgcgaggccctgtctcaaaaataaaataaaataaataaattagccagatactgtgtgcacgcctgcagtcccagctattctggaagctgaggtgggaagatggttaagcctgagaggacaaagctgcagtgagtcatgtttgcatcactgcactccagcctgggtgacagagcaagaccctgtctaaaaaacaaaaacaggccgggtgtggtggctcatgcctgccatcccagtgctttgggaggcagaggttggcataatcccagcgctctgggaggctgaggtgggcggatcacctgaggtcaggagttccagaccagcctggccaacatggtgaaaccctgtctctactaaaaatacaaaaattagccaggcatggtggtacacatctgtaatcccagctacttgagaagctgaggcaggagaatcgcttgaacctgggaggcagaggttgcagtgagctgagattgtgccactgcactccaacctggatgacggagtgagactccgtctcagaaaaaaaaaaaaccaaaacaggccgggtgtggtggctcacggctgtaatcccagtactttgggaggccaagccaggcggatcacgaggtcaggagattgagaccatcctggctaacacggtgcaacaccgtctctactaaaaatacaaaaaaattagctgggcgtggtggtgggcacctgtagtcccagctactcgggaggctgaggcaggagaatggcgtgaacctgggaagcggaggttgcagtgagcctagatcgcaccactgcactccagcctgggccacaaagcaagtctcaaaaacaaaaacaaaaacaaaaaaatgattaacatttcaatcagtcaatgggtagactttgagtcacgctgattatccaccacaattgtgggcggagctcattcaataaactgaagacctttaagagaaaagactgaggtcccggccaggtgcggtggctcacgcctgtaatcccagcactttgggaggctgagccaggccaacatggtgaaacctcatctcggatacaaaaaattagccaggtgtggtggcgggcgcctgtgaccccagctacttgggaggctgaggcaggagaatcacttgaacctgggaggcggaggctgcagtgagcaaagatggcgccactgcactccagcctgggcaacaacagaaaaacaacaaaaatcatctcattttcatctgtgtcttccagtattaaagaggttgagtgtcatttctggcttactagccatttggatttcttctgatacacacttcatctcatttgcctaattttgtcgttgtcttcttattgctttctaagggctctctgtatactatggatattagtccttggttaatgacactgcaaatacttacaattttttttaatttttaattttcgtgggcacatagtttattgagaatttttttttttttgagatggcaggggtctcatatgttccccagactagagtgcagtggctattcacaggcgccgtctagcgcactacaaccttaaactcctgggctcaagcaattctcctgcctcagccttgggagtagctgggattacaagtgcccgccaccacgcctggtctgccaatactttctatcagtctgtcatgtttactgtcttttcctccatacagaagtttttccttctcagttgggtcaagtccattgacctttctgttacagcttgagttttgtgtcttacgtagaaaaggtgcccctgctctcactttctgcacagctatcaggtccagctcatagcagttcttctatttatccatccactgccccaggagctgcctgggcattcactgccccgcacccctctccagccccaaggtagagctcgggccctgggagtcccaggaccatcccggactggggagctgcttggtgtccagccccgggctcaagctcttctccagctctgcagctacctgaggggtagcagcccggatagcatcctggatgttggttaggtcccactgggtcctcaggagggcactgtctagcgtgaagaagccgtcgcgcgtgcgccgcacttgggtgcagacagcagtggtctttagttccaggccgatttcatgaaccaacttccgcagctctttctgcgtctcatgcatgcactgcacctctgccagggacacacaatgacagacatggtggtgagagcacagcctctagtgtgtggttgtgaacgcacaccccttggatacctcctaggtgtgtaacaaccttagcaagacccctaagctctccaggttgtgctattcagaggacctgccctgtgggtgccacctgaaatgtgttaagacttgcagaacctcaggccccaccgggacctgccaagtcagaatctgcccttttttggcaacagggtctcattccatcacccaggctggagtgcagtggtgtgataacagatcactgcagccttgacctcctaggctcacatgatccacctgcctcagcctccggagtagctgggacgttctgagccatcacaactggctaattttttattttttgtagagacagggtctcgccatcttgcccaggttagaacctgccttttactaagactcggtttccctatctgtaaaatgggagttatgaggagtaaaagaaatcatttatagaaagataaatgattatctttaaaatgttattaagatgttatcttaataacagagttctgtgctcaagcagaggagcaggcattaacatgaccaacagaaaaaaggggcgggcgcaggcagagacaaaaggaacacagataagaggggcctgagctgggtgggactggggacgtaagagttgtgtctgatggagccctcacagcttcaaacatgggcagctctggaaataagccactaaatataacctttgcttggtaaggtctggcttccaagggtgacttggcaagagataggagagcttttgttctgcgagctctgtcatcagccaagtccaggccagggctgggaaggaagtcggcacctgatgccttggcccgcagagatcagggccggcgtgtgctggcctcagctgagccagacaacagtgacctctgcaagagcgttcctgagtgactcccaaacctacgggtcccatctcactgctccaacttccttggccaacctacctaagaggaattccggaggtgcaaagtagaggcatcggatgccagttatcagcatcggggacttgttcatgggccggatcaggcctctcacggccatctcataggcctcctgggtcttcaggtcgaggttggagtacctgcagatcaggaagggggctgcagctgggtggcccacctaccctttcccccacatgaggtgcctctctggaagctcctcacttgctttgtgtgccctgccaccgtggctcctccagccacctttcctgccctccttcatcaccaggtgcctggtagagtcaggaaacccaggcaagctggctccagagcccaagctcttaactccttggctgctcttgcccttgggctctgtgctccaatgatgtggtccctggtttccttgccattagatcatatactctcagcaggacagcttggttctcttgctcttcttggcctcccgttggccaacccaagacctggcacacagaaccatttcttaatgccaagaaagaaacaggtagctcccgtctggttctgggctctaaaaacaagatccatggaatctgccccaggtttgggggagcctacgggagccaagggcacttactgctctcccagtacctccctgagggccctactcacatcaccagggccttctgatgggagccttggataacggccagaatgcggtccagcttctctctggtcacgtggtctggaaaaggcagggggttgtcaatgtacaggtacctgctgagtattggtcacagcaaactccttccccccaggccagccccatccctggaacatggagagaggatgttttggagggatccccatggcggggtggttgggagtcctttgagattctcatgaaagcactggacctcagaaagatactggatctcagaaagatacacatgactcagcagcaagggcactctattttttttttttttttttttttgagacggagtctcgctctgtcacccagactggagtgcagtggcgcaatcttggctcactgcaagctccgcctcccaggttcatgccattctcctgcctcagcctctcgagtagctgggactacaggcgcccaccaccacgtccggctaattttttaaatttttagtagcaagggggtttcaccgtgttagccaggatggtctcaatctcctgacctcgtgatccgcccgcctcggcctcccaaagtgctgagattacaggtgtgagccactgcacccagacttttttttttttttttttttgagacggagtcttgttctgttgcccaggctggagtgcaaatggcacaatctcagctcactacaagctccgcctcctggagtcaagcaattctcctgcctcagcctcctgaaaagctaggattaaaggtacacgccaagacacccggctagtttttgtatttttagtagagacggggtttcaccatgttggccaggctggtctcgaactcctgacatcaggcaatccacctgccttggcctcccaaagtgctgggattacaggcgtgagccaccgaacctggcctttttttttttgagatggaatctcgctctgttgcccaggctggagtgcagtggtgagatctcagcaaactgcaaacttcacctcctaggttcaaacgattctcctgcctcagcctcccgagtacctgggattataggcgtgcactaccatgcccggctaattttttgtattattattattatttttttttttttttgagacggagtctcgctttgttgccaggctggagtgcagtggtgcaatctcagctcactgcaacctccgcctcccaggttcaagcgattctcctgcctcagcctcctgagtagctgggactacaggtgcctgccaccacgcccggctaatttttgtatttttactagagacgggttttaccatatcagccaggctggtctcaaactcctgaccttgtgatccacccatctcgacctcccaaagtgctgggattacaggcgtgagccactgcgcccggcctctttttaaaatttagaacagtagccaggcgtggtgactcacacctgtaatcccagcactttgggaggccgaggtgggcagaatacctgaggtcaggagttccagaccagactggccaacagggtgaaacccaatttctactaaaaatacaaaacattagctgggtgtggtggtgtgcacctgtaatctcagctactccgaaggctgaggcaggagaattgcttgaacctgggaggtggaggttgcagtaagccaagatcgcgccactgcactccagcctgggcgacagagcgagacatcgtttcaaaaaaaaaaaaagaaaagaaaaggaaaggctgggcgcggtggctcatgcctgtaatcccagcactttgggaggccaaggagggcggatcatgaggtcaggagatccagaccatcttggctaacatggtgaaaccccgtctcccatctctactaaaaatacaaaaaaaaaaaagccgggcgtggtggcgggcgcctgtagtcccagctactagggaggctgaggcaggagaatggcgtgaacccgggaggtggtgcttgcagcgagctgagatcgtgccactgcactccagcctgggcgacagagcgagactccgtctcaaaaaaaaaaaaaaaaaaagaaaagaaaaggaaaaggtcaaagactgacgagatggagagaaactagagtctttggaagtgacgttacatttgagctaggcaagcaggggagtagaggatgctcctggagcacagatcccgtggccaaagcctcagcccaagcctagtgtgtgcagtggaactgagaaggggccagcgtggcctagggcggggagaggactcagggaaagcaaatgcggagggaggcagcggcagccacttccggttctcaccataggttgtcttctctaccagcctcccgtcctcacggaagtcatctgtagctttgcccaggaggccacgcactgtgtaatccttcaaggacagggaggtaaagatccgtcagtgaccccattctaagccctagtagcccctgccccagaagctgggggtggggggtcctcaggtctccctcaggaagctcatgtgcccagcccctgcccagctgctccacagccccaggaggaagggcaccagctctgtcatgtggccttcagcagctcttgctctctttgtattcaagctctcctgtcacctggggacagtaacagggccagtctcacagtactgctgcctggattcagcaggacatggtacctggctcccagtcagcaggcttcctacaagactgctggctggtttccatgacaaccagcactggcagcctccaaaggtactgaccgctgacagccaccctgtggccaccccaggcctccatgtttctcctctccaacctaactcggcaatttatcaccccgagccccttctagcatgccctgtaggcttctctccacgcctctaaatagaatgagattccatggcccagatcaggcccttgctcatccctgcttgtaaaaactccccctcctctgaatctgtgcagctaaccccatctgccacagataagtaatgatcggctggatacagtgactcacacgtataatcccagcactttgggagacagaggcgggtggatcgtcgagtagctgggaggacaggcatgcgccaccagcctggctaatttttttgtatttttagtagagacaggttttcaccatgttgtccaggctggtcttgaactcctggcctcaagtgacccacccacctcagcctcccaaagtggcaggagccactgagcccggccacaatttttaaaatttttataatttaaaaaaattttgtaaatagagatggagtcttgctatgttgcccagactggtctcaaattcctgggctcaagcaatcctcctgcctcagcctcccaaagtactgggattacaggtatgagtcaccacacctggccctcattcccattttacagatgaggaaactgaggcacacagatattaattaggtaatctacccaaggacacacagctgtcagagtggtagaagctggggttcaaactgaagccatttggctccagaatttgtgcccttaaccactaaaaacatgggccccataacgtggcacctgcgtacatactttgtggtatcagactccatagccccgaccccacctctggatggtaagctccctgtgggtaggatgctgacatctacctctcagtcttgggacagaatagggaatggcatcatgatcaagctctggtgttggagagacctaggttcaaatcccagctcttaaagccctaacaactacatgacctaggtaagtaacatctcctctctgagcctcagttctctcatctgtgaaatgtggctaacaacagattccactttacagggaggctgtgaggcttccctaaaggaatccacgtacagtgctcagcacagagtagtcggcatacactaacactggtagttattattgttattattattacagcccctgcacagcacacgatcatcaaaaaaatgcttgcttatggcttgggtgttcccccacggaatcctctaagcttcagaatcctgctggtgacccccaggaaaggaccaagggagaagcaggctgtccccagaccctcgtaccttggtaagatgagcattgtacatatcggtgaggagcctgcatccatgtcccacgccgagcactgaaaagcagccagcgtcatctcacacctgggacccccttcccattcccctaagtatccccacccctacccccaccatcagaatactcccttttctgatgctgccaaaggcaacaagaaggcaaaaagatcttctacagggggcaggtgcacccctctgggtatatatcacatgcagattgctgggccttacccatatgcactgaatctgactcatggttggagggggcctaggatccctgccaagctctccacaggattctgacacctgagaggaagagatccctggcctagtcacacaaacctgcactcaaatcagggacagctctgagtataatctttagcctctttgagcgtcaagttccccatcagtaaaatgggggtaaaaatactgtctgaaggccaggcgcagtggctcatgcctgtaatcccagaactttgggaggccgaggcaggtggatcacctgaggtcaggagtttgagaccagcttggccaacatggtgaaaccccatctctaccaaaaaatacaaaattaaccaggtgtggtgctacactacactccagcttgggcaacaagagtgagactccgtctcacaaaaaaaaaaaaaaaaaattagccaggcgtggtggcgggcacctgtaatcccacctactcgggaggctaaggcagggagaattgcttgaacccaggaggcggaggttccagtgagccgagatcatgccattgcactccagcctgggagacagagcaagactctgtctcaggaaaaaaaaaaaatactgattcctgtgggtgctgtgcagtcggcacagaggaagggcccaataaacggtggccactgtggtcacttcctgcctttctcccggtctgtttctccctctggctgagggacagaataactctgcattcactcgtggggagacagaacagggagagggggcatgagatcatgtctgcctgcctgtgcctcaggaagcaagacaaggggactgtgactgtcgcggctggaggatgtgggcaccacctgaccctggggacacagatggctcatgactagggctttgtgtgtccagacccagccacatgcaggccctggccattaggtccagagtcacgcgcctggctgccccatgatgcaatgatggttttccttctccggaccaggggtattcactggccatgggacccagaacaagtcacctaaatcctactttcttcttccataaaatcatatagtatctacctaataaagttgttgtggtaaataaatgtgcataaagggcctcgaactatgtcatgtgtgggaatcactgaataaaggtgggtgactgtggtattaacctgtgattacctccgtcccacctatccactccccagctgatcagccttggggcaggaatcagggcaggagaggagtggtgggacgtgggtgccaggtaagaagtgggctgggctcctggtagcttcaggatcttttctcaagccttatcactgtacccccaggcttctcacatcacctaccaagtactccagaagcctgggcatccaaccgatgtcccacgccaaccttgagatgggcgaatgctggtccacatactggaaagaaacaaacaaggtccattttctcaactaaatgccaccccaggatggctttgggctgcatgttgacctcgttctcagaatgggcctcatggagcccaaactagcatcaggccagactctcaggcttccccgtcatggaatctgggaccctgaactgtatcctcagtgccctgggatccaaagggcagcccaagatgcctcttactctgcctatcatcagtctcccagtgagaggctctaagaagactggcgtaacactgaaggtcaagagtgcggggttccctgcccagctctactgaggaagagtccctggaggaaaatggaggctgtgagctccttaaggcagaacctgggtgtgtcaactcactagctgctcaggaaagaactactgaaagaataaatgcaggaatgagccagaagtgtttacacttctacagattaagaggaatctaggggaagagtccagggtagttaagggcctattgaatccaggccatgttactaaatgtcaacactgagcctcagttttctcccttgtgaaatgaaaataggacccatctcacagcactgtggtgatatcaatgaggattgtacttgggggaagcttaacacaatgcctagtacagagtggcgactcaatacattatacttcttattgttaccatataatagagtcattgaatatcacaagtccaacgggtttttgaggtttctggtcaaacctctagattccctgacacatgccttaatcacatctagtgatggggacacattaccagaaccagttccattgttgggcaactttattcagtaaaaaaatcactctttcggctgggcgcagtggctcacacctgtaatcccagcactttgggaggccaaggtgggcggatcacctgaggtcaggagttcgagaccagcctggccaacatggtgaaaccccatctctactaaaaatacaaaaattagctgggtgtggtggcacacacctgtaatcccagctacttgggaggctgaggcaagagaatagcttgaacctgggagatggaggttgcagtgagctgagatcacaccactgcactccagactccagcctgggcaacagagcaagactctgtcaaataaataaataaataaacttattctttcccagaaacccaaaacccctaccttaggacttctacctagggtctcatttctcacctggagtcccagaatagaaaaagggtcagcaaactacagtccacaagtcaaacctgaagactgaagactgttttttttttgtgtgtgtgtgtttgcttgttttgttttgttttgttttgagatggagtctcactttgtcacccaggctggagtgcagtggcgccatctcaactcactgcaacctccacctcccagattcaagcgattctcatgcctcagcctcctgagtagctaggattacaggcacctgcctccatacctagctaattttttgtatttttagtagagacggagtttcatcatgttggccaggctggtcttgaactcttgacctcaagtgatccgcctgcctcggcctcccaaagtgctgggattacatgaatgagccaccgcatctggcttgttttttgtggcctatgagttaagaatggtttttgcatttttcagtggttcaaaataaatcaagagaccagttgcaagggctcacgcttataatcccagcactttgagacgccgaggcaggcagatcacttgagcccaggagttcaatactagcatgggcaacgtgacaaaaccccatctctacaaaaaatacaaaaattagccaggcatggccgggcgtggtggctcacacctgtaatcccagcactttgggaggccgaggcgggtggatcacgaggtcaggagatcgagactatcctgcctaacatggtgaaaccccgtctctactaaaaatacaaaaaattagctgggcgtggtggcgggcgcctgtagtcccagctactcgggaggctgaggcaggagaatggcgtgaacccaggaggagaagcttgcagtgagccgagatcgtgccactgcactccagcctgggcaacagagcatgactccgtctcaaaaaaaaaaaaaaaattagccaggcatagtggcctgtgcctgtagtcccagctactcgggaggcttaggtgagaagactgcttgaactcaggaggcagaggtttcagtgagccgagatctcaccactgccctccagcctgggtgacagagtgagaccctgtctctaaataaatagaatactacagttgtcccttggtatccaaggggattgggtccaggatcccttgcagataccaaaatttgtagatgttcaagtccctgatataaaatggcatagtatttgcatataacctaggcatgtcgtcccatataccttttttttttttttttgaggcagagtctcactctttcacccaggctggagtgcagtggcacgatcatggctcaccacaacctctgcctcccaggttcgtgcgactcctcgtaactcagcctcctgagtagctgggattacaggtacgtgctatcatgcccagctaatttttactagagacggggctttgccatgtcttgaactcctgacctcaagtgatccgcccaccttggcctcccaaagtgcagcgattacaggcgtgagccaccacacctggccactttttttttttttgagactgagtctcgctgtgtcgcccaggctggagtgcagtggcacgatctccgctcactgcaagctccgcctcctgggttcacgccattctcctgcctcagcctctggagtagctgggactacaggcgcccaccaccacgcccggctaatttctttgtatttttagtagagacagggtatcaccgtattagccaggatggtctcgatttcctgacctcgtgatccgcccacctcagcctctttattttttttggagacagagtctcactctgtcacccaggctggagtgcactggcacagtctcggctcactgcagcctctgaactcctgggctcaagtgattctcccacctcaacctcccgagtagctggaactacaggcatatgccaccccacctggctaatttttttttttttttgagacagtttcactcttattgtccaggctagagtgcaatggcacaacctaagctcaccgcaacctccgactcccgggttcaagcaattctcctgcctcagcctcctgagaacctgggattataggcatgtgccaccacacctgtctaattttgtatttttagtagagacggggtttctccatgttggccaggctggtctcgaactcccgacctcaggtgatctgctcgcctcagcctcccaaagtgctgggattacaggtgtgagccactgcacccggccttttgtattctcttgtagaagtagggtttccccatgttgcccaggctgatgttaaactcctaggctcaagtaatccaccgcctcagcttcccaaagtgctgggattacaagcatgagccaccaggcctggccttcccatatattttaaatcatctctagattacctttttttttttgagacggagtctcgctctgttgccaggctggcgtgcagtggcacaatttcggctcactgcaacctccgcctcccgggttcaagtgattctcctgcctcagcctcctgagcaactgggactacaggcgcctgccaccactcccggctaatttttgtatttttagtagagacggggtttcaccatgttggccaggatggtctcgatctcttgacctcatgatccaccctcctcggcctctcaaaatgctgggattacaggcgtgagccaccacgcctagctagattacttataatgcctaatataatgcctatgcatcaccttgagtggattcaacacagtactaggtgcacagcaaattcaagttttgctttttggaactttgtgtttttcttcccaaatactgccaatctgaagctggatcatgggatgtggaactcatggactcagaggcaactgtacttagtgacacgtgaaaattacctgaagttcaaatatgaatattcataaagttctattggaatacagctaggctcattcctttagatactgtctatagctgtttggcactacattggcagagttgagcagttccaacggaaatcacatggcctgaaaactaaaacattcagtatctggccctttccaaggaaatctgccaattcctggtctaatacctcactcctctgtggaccttcaagggcctggcacaggaatctgagcactgggacactgactcggctcagggatttcctgggaagtgacacacaggatcctgcttaaatctgccttacccagtggatggttgatgaaagagggtacgctggtggctgtgagggtcagctccttctcttcgctgccttccatggggcccagcaagaagcgaacacgctgtttaggagcgggaggcttcctggcattgagacctgaacacacagagataatatatacacacatacatacaaatatatgtacatataaaatattttttaagagacagggcctcgttctgtagcccaggctgaagtgcaatggcgccatcatagctcactgtaacgtcaaactcttgggctcaagcgatcctcctgcctcagcctccagagtagctgggattacaggcgtgcaccacgatgctgaccaggaatatcttgttctgtccaaacacttgggggattagacaacagggaagtatgatgtagaagacaaagcagaagcccatggtgcagagggcagtatagcagtagttaagaaacaggcggattcaaacagactctacaacgtagtaaccgtgtgacaaggaacaatactgagtcagtttccccctcggaaaacagaggaaagtgaggagtaagaaagcacagagaacaggcgtttgggaaagcgctctgcccaggtgaataggtcacgtgattttgttttggggtaaggaccagaagcggagatggacttccaagagaacgagagcgggaacgtgggtctggttcgaggcactcacccttcagaagttgtagctccactgtatcccgcaggtgcttccattttagccccgggggcttatagaccgcgaaaagcccatgcagccgcgacaagccagcagaccccatacttgaagatcacagcacccgctggacct

SEQ ID NO: 1600 - DNA, 262 bp, Homo sapiens
gaacattcaggctgctttgtggctgcttttaactgcatatagtaaggtgcgagagggaagaaatgatttaaaaatggaatttataattaaatggtaagcggaacagaaagacttggaaaattagcagcttgaccatgtaaaaagtgaaaaggtatcttttaggaaagtaaaccaaggatgtgtgctaaagagatgagtgtggttacaggggagccaagtgctagtcaagacaatgggagaaaggccctgaaggcattttaag

SEQ ID NO: 1601 - DNA, 300 bp, Homo sapiens
ggccgggcgcggtggctcacgcttgtaatctcagcactttgggaggccaaggcgggcagatcgcgaggtcaggagattgagaccatcctggctaacacagtgaaaccccatctctactaaaaatacaaaaattagctgggcgtggtggtgggcgcctgtagtcccagctactcgggaggctgaggcaggagaatggtgtgaacccgggaggcggagcttgcagtgagccgagattgcaccactgcactccagcctgggcgatagagcgagactcagtctcaaaaaaaaaaaagaagacaa

SEQ ID NO: 1602 - DNA, 399 bp, Homo sapiens
caggtctaattcaagaatgaaactcttattagaactgattattattgccctctgctatagtttaaatgtgtccctccaaaattcatgtgttggaaacttaattgctgttggaacaatgttaagagatggggcctttaagaggtgattaggccatgagggctctgctctcatgaagggattaatgctattattgtgagagtaggttagttatctcaggagtgggctcctgataataagataagtcctgcttccattttctctttgtctcacatacatactcgcttgcacttcatgtgatgtcttccatcatgggatgacccttcccagatgcaggcatcatgctcttggactttacagcccccaaaactgaaagccaaataaacttttgttctttataaa

SEQ ID NO: 1603 - DNA, 463 bp, Homo sapiens
ggtgaggcccagccacctggaacaggtgtttgagttctcttcctggtcacaggtcgccctcccccgagagggtcccaggctgcccagggaggaccagccaagcagctgctgcccctggagcgggtgtaccaggagattgccatcctgaagaagctggaccacgtgaatgtggtcaaactgatcgaggtagggggtggtggtgagcaggtgggaaccagcacctgagtctcatgggagccgcttctggtgctggggagcccctagcacagacccagggatcttgcccaggtggcagatgtggctgaggcctctgaggacagggccagacttggggtggggctgcaggaaggctttgggggcccagcctggtcagggatgttcccaagttcccatggagggtgaggggctgccccagaggcaagaagtgagcccctcattgcagctggaggggaggaaggctgga

SEQ ID NO: 1604 - DNA, 1036 bp, Homo sapiens
cccagcccaggggtcagctactctaggagaagtcagagacggaggccctgcccttaggggtaaataagagaccaagaggaccattctttgaaggctgatgggggtcagtgaggctgaaatagtcagggagacctctggaaaaggggacggattttgacccaggccttgaagaactaggaagatagggatggaggagagggggaagaaaggagtgttttttaggtaaaagtatatagaggtgggactcaactcttaccggtattcaaatcacaaagggtttttcagctttccaacaagtctgtgaatggagtgggtgggattccagttgctcccatttgtgagagggaaagctaaggaccagagaaggtacgtggcttgctcaaggtcacacagcaagtcactgatggagcccaggcttccacatgtctgccctatgcggcttttcagggtatttacagagcagatgacatggagtaatgagcacggggctgggtggtccgggaccctcactgccaaggcttgaatgcagcctgcggcttgtccctttgcctgggcggctccctacagaccaatctggggagaggggcagggagtggtgtccctttaagacttggaggctttcaaatgttttgacctctatccaaaacaagaaatatatatttctattgctatccatatctgtaactgaaaccaaaattttacaaagcagcatatatctttactacatgcaatatattctgatatattctacttatttaggaaaaaaaaaaaaaagcagttgccacccactaaattgatttcatgatcctctcttgggtctggatccacggtttgaaacagtgctctaaatggcatctttgcaattgattatggacaattaagtacttagaagaaggaatatcaagccaatcagaaattaagagaaagctgatttgaaattatgattgaaatgggatatgtatgagtatgtgtgctttaaattttttattatgtagcagaaaaagctaatatcttgagttgtagggactcatgtggg

SEQ ID NO: 1605 - DNA, 32195 bp, Homo sapiens
ggaccccggtgtctggcttcccccgagccgggaccccgcgatggccaagcgcagctcgctgtacatccgcatcgtggaggggaagaaccttcccgccaaggacatgtgagcgcggccgggggtgggagccccaactttccggggaggggcactgccccccaggacgcctgacctttccggggtccacccacaagagcagcggagagggtgcgggagtgcggccgtggtgggggatcggcggggaaaatggggacagtgacattttctgcgagcaccagacggggtgacaaccggggggcggggaagtgtcaccgagggctgggggctgggaactagggagggggcgagaatttgtcagcgatccgcggctcacgaggggaaggggctttgatacgacaggagctggagcctggtgacatgccaggggagacgtcttggtgatctgcccccggggtggggttggagggggtggggtgtcccccgcaaaggaagggtcttcctcagtagttccagagcccttaatgccccggagtgtgcacctgaagcacatgctggggcccaggggctgtccccgggcttcctgctgtgcactcgggtaggagggactggcatgaaaagtgagaacaggtcaggaggccaggacaggtgcaggactgtgggggagggaaggagggtagtaactgtcgcttgtgccttgggctttacacctgagccatcccgttaatcctctcaaccaccccgaaaggcagttctcaccgttccattttacagatgagaaaactgaggttcagagaagtgaaatgctggctccaagtggcaggcagagcagggtcttgagtctagggcttctcacaggcactgacatctggggattcccctggtccctggctcgatttggggaggtttcaggggccccttgttccactcttctcagtaggtcccagggctgagctgcctgacccctggcccaccatcttggtcttgccaccaccttcctcatgtacagggtttaggcagctccctgctcctagagcctcagtttcccctctttaaactaggggttgaaatccctctagaggaagagggggaaagctcaaaggtcaaggggcactggctgcctggaggaggagggtgggagggggaaaagtggagcctggaggaaacagagtccaaagtctgcggagctgcagttccccaccccttgggcgccccgggctcctggatgcagagaagtggctagcatgggcgagggggtggagcagggtggggggcaggcactctgctcacacatatgtgtggtggcccctgtgagcttcccagcaagctcagcgcgccaccaccgagagcagtgccagttccaggccccctgggtctgatgaggcccagctcagcagttaccatgacaatggggaagggagggcggtgggcatccctaggtgggtttctgtgcttggaggcttggagggaggtggagtgggagctggcagtgaggtctgtgggctgggaaggcagaggagctctgagaagggtctcagcctccaggcccagcctttaagcatcccccaccccctgccaccactggcactaggaactaggtcatcttggcctcttctggctggtggcagctgggaggagcagcccctccgtctgtcgcctccctcctcatccccacagcagctggccctagtgcctggctccaggctctctccagcccagggcagccaagctcttggagtatgcccacctgggagcccagtgcctggttccctgctcagtgctttgcctctgggcaaaggggttccatctacagtggaggggtgccttgggatctcgatcctcaccctgcccccctgcctgccctactcacgtctcctttgcaaccccccatcttcccctgtggcttgcatacacagctctgacctgtcagccgcctcttaaaccatcccataaacagtccctcacatttgggctactacccttcacatctctgctttcgcccatgtgtggggacttctgccttcaagcactccacttcagtcctccagaaaactcctattcaatgttcaggactcctctcaaacttctcctctccagggcattccctggtgcacttgggcagagttcctggctcctgggctcgccccccagcactctgggtggcaggaggaagcccctggtgtggcagttcctccgtcaagtggtgcctgtcccagctgactgtgagggcagggactgtgactcattcatcctggcaccgggtccatagtagggagaataagaggtgttgaggacttcccccacttaatcctcttcttagctttataagatagacatcctcggtttgcacattgggaaactgaggctcaggaagtgaaagccatttgccaagagggtaggtagagaagtcaggattcagattgcctttgctgccgacaggctgagaattctagcctgcccgcggctgtaagcttgcggctgggctcagtgagactgagcctcggaaatcctatgcaaagcatttggctgcagagtcgggcaggggtttggagatcatgggaggccctcactgagtactggagtttcactgtgcctcaccagcaccccgcctatcttctgagtagcatctcctccagccagggcttgcatacttctgaggacggggagcttaccacctctcatagtggctcatcttgactgagacagttccaaggaggaagctgtcctcacacagctgccagctgccttcctgccacttctactcatgggtttttattcctctaaagggcacagagcgcagctgcattccccatcactgctagctttcagagcctgcctgttcctgccctgcctcttcccactgtctctcgtccccacgtacctaggcatgagccaagtctcacgatgaccagtgacccactgcctcccacaccaagtggccttggggactggcccaaggctattttggggttttccctgatcctcctccttccacagcctagaaactgccaaggccctaaatatagaggccccgaaagtagccagacaggccagtggcaactggctcgggaaaggagaaatgagagaggtgggcagcctaggggcctcaacactagcgaagaaggaactgggcagggcttgggtcccagcagcccactggggaccatggttgggcccaggtccttaaatctggcctcggcctgctctcaataccgtcctcttgccccacctctgatccagccacccggctcttcatagtccttgcacaccaggactcgggtcctgcttccaggcctttggaagcagtagcagcccagtagtgggggacagcccacggaggtcccctgttgcctcagtcagtactgacctctccctgcctcctctgagctccttgtatggctcctggatcctgcagcccagcccagcacctggggtgttcagaggcctgatttcttagcacctggagtcccctggctttgggttgatgggatgcaagctggggtattcacagggggctccctggaggtgggggggctctttattttattttatttatttctgagacagagtcttgctctgttgcccaggctggagtgcagtggcgcgatcttggttcactgcaacctcctcctccggggttcaagggattctcctacctcagcctccccagtagctgggattacagttgtacaccaccactacattcggctaatttttgtatttttcgtagagacggggtttcaccatgttggccaggctggtctggaactcctggcctcacgtgatctgcccacctcggcctcccaaagtgctgggattacaggtgtgagccaccacacctggccaggaggcgggggctctcaaatgatggcagggggaggttacagtcagagatgcaggcagtgctaacatttactgagcacctccaagaccttctctatcgtctcaggacccagggaagctcccttgtgagccggggttacacttcccactttataggtaggaaaactgagtcttggcagacatttcctgtctgtgtccaggagcttctggagctgttggccccaaatgccttcctctgccggaagagccccttttgagaagggaagcagagcttggaattccccaccctccaccatagaaacacacttcctttttatggacactcactggaggaacagctctagagacagccctcacttccccacttttacccagtaccagccctaggcctggctgcaggcctctcccagccccaggagccccccaacacctgagacccttggaactgagcgcgtgtttgccttcccccatccctctttccccagatagctgttacatttattcattcattcactcatcagttcattcattcgtctgttcattcggcaaacactcatgggctgcctgtcttgtgccaagccctgtgggggccctggggacacaggcatgctccccgcccccaggtagctcagagcaggtgggaggcagctgatcactaccaggctggatgaagtgggcaggcagtgtgagtccagggaggccttcctccccgtcccgtcctggggcgagggagggctctggcagggctgaaggccgactgggcaggagggacagcggtgtcggtgttggggagagcaggagcaaaggctccagggagagtaaggggctcgactttggtgtggagggtaggggtcccaggagcttgcctggggctgttgcttggagctgttctggggggaggcagggatggggtaggagggcatagaaaggaggaacattctatcccctgcgggaggaacaggaggtttccagtaccccctccctctgtccctctccctcccctccctgtctttcccctctccctctctacccctccctctcaccccctccctcagtctccccctccctctttactccctccctcttactctcctccctctctccccctccctctcaccccctcactcagtctccccctccctcttactctcctccctcttactctcctccctctctccccttctctctctcccccctctctcaccccctcagtctccccctctgtcttactctccttcctcttactctcctccctctctccccctcctactctcctccctctctccccctccctcttactcttctccctctctccccctccctctcaccccttccctctcaccccctcactcagtctccccctccctcttaactccctccctcttactctcctccctctctctccccctccctatcatcccccttccctcttaacccccacctctctcctcctccctctcagccccctccctctgtctcctcttccctctctctcccctccctgtccgtccccttccctttctgcccctccctctgtccctctcccagtctctccccttcctccttccccctcctttcttctcctttctctctctacccatccctgtctcctccccctccttctccctcccccacaactctccctccatctactcccacccctgcccgcgaaaggggagccctggtgcgggttcctgcccttccctcaccatccgctcccgggctgagggcggggacccgtgtttggccggaggagcctgcggtctccaaaccaggacgcggagactcagcctccgctctcttcccccgcactcctcccgaggggccaaaagagagaggagcctgccgcgagtccccgccccgatcccgccctccagccccgcccctgcctatttgtcttgcagcactggcagcagcgacccctactgcatcgtgaaggtggacaatgagcccatcatcaggtaccgcccccacccccaggaccgaggggcgctcagcctctcatcggcccgcgctctccccgcaaaggggtgtgaattttgttgtgaattttgtacggagatgggagggggcttggagcacctggtcccctgcctgggattccccacctcgccctgacaccccagctaggagacgagaaagaccttcagggaactggcctggccaagggcctctcaccggactctgttcatctttgcaatcatcacaacctccgggagagacagatgctgacgatttgtaacaacaactctcatttgtggagccagcccttttccagcccgtttagttcttgcaattaacgagatacgatatcattagaccccatttacagacaaggaaactgaggctcagggagactaactaccctggccaaggtcacatgcctagtaaaagtggcagagccacactggagcccaagtctggccaccccagagcctgagctcccttcccctccctggtcctggctctaacttgggtcctgtcccctgagagtcccatagtaatatccctcgaggctgggcaaccccagcctgcaccctgaagagtcacttcctccggatgtcccttcctccatggtccccatgatctctgggcagggtctttgctgtcctctcccttccttcacccagactcctgcttccaagttcatggccagagctgccctactgttctgcccacctgagtgcccgtggcctactcggagcccagtccttccctacctgcaagcaggctcccagcctttctcgagggtctgcaaaccacagacagcaagagggagaggggtgtgatggctctgatgctcttgatacagaagggaaacagatgacctgtctgagaagtggttggcatgaggtggtcccctgaactttcatccgggtccttgggggcttcagcgtctccccacccgctagcccactgagtcccatgagttgaaggctctgatccaaagggggttgaccagagctgggtgaggatgtgaggccaggctcaccagtcgccctgaggcagctaccctgtgacctgaggccaatgcctgccaactgtgatctcagtttccccaaatgtaaaacagctggagaggctgggcacggtggctcacgcctgtcatcccagcactttggaagtccgaggtgggcagatcacctgaggtcaggagttcgagagcagcctggccaacagggtgaaaccctgtctctacgaaaatgacaaaattagctgggcgtggtggcaggcgtctgtaatcccagctactcaggaagctgaggcagggagaattgcttgaacttgggaggcagaggttgcagtgagccgagatgacgccactgcactctagcctgggcgacagagcgagactccgtctcaaaaaaataaaataaaataaataacagccagagagaggcagccctgtgccccatccagagcagagaggaatgtcagggggtagtgattggtggtgaacagtagggtctggcacagggaaaacacatcagtggcagagccagttgttataggggtaggggaagatacaaggaaggtcccagcccagggcctgggagtggcctgggcacatgctgagggttctctcctgcaggacagccacagtgtggaagaccctgtgccccttctggggtgaggagtaccaagtgcacctgccgcccaccttccacgctgtggctttctatgtcatggatgaggatgccctcaggtgagtgcccccctctccagctgggacccagacctggccatctgattgctccctggcccatttcaccaccaggactcctgggtcctttttggcatcctctttgcagcctggagggaggcagagcctgggggcctgggagggcgaaaagcttgagcgtgtgggtgtgcacatgcgtggctccatggtgcatgcgccacatacacacgtgtgtgtgcaggcatgcaggcacaagtgtgcatggactacacgtgtgcgtgcaggtgtgagctgtgagatgggcacccagagagtgtgagcttggcatgtgtgggcatgtgagaaacctatcacatccccctagagggtccagaacccacagcctacagaagggccacaggtccagctctgttgggttactctggaaatgacagcggtgtccaccaccctgctccccccgggggggccctgaacttggtgggaggtcccagagggcagatactgaagccctgcccagctctgcctccgtctccctcctctagccgggacgacgttatcggaaaggtctgccttacaagggacaccatagcctctcaccctaagggtaagttctcccttccctcccacactggtctgcccagtccctggcctccctcccactcggagacctcccctctaggctccgtctggtctcctgctcagggaaagccatttctactctccccagaagccggggccacgttctgtactcctggcctctgttctgcagcatgttcccaagcctggttgttactgcctcttccctagggtgaagaggggctgctatgggtggaatctgaggcctctgctggcagaagaaggggcctccttacactctattgctgaagcatagggaccccttctccaaatcaggccagctccttctgtaacccatggggtcgcctccatctgggccctagtactactgtgtcctaagtctgaagggttggcctagagccagtccaggctggagatccctttcaattatttctgggatgcagacattgttttgtgttattgtttttacaatttttatatagtttttttttaaaaaaaaggccgggcacggtggctcacacctgtaatcccagcactttgggaggccgagacgggtggatcacgaggtcaggagatcgagaccatcctggctaacacggtgaaaccccgtctctactaaaagtacaaaaaaattagctgggcgtggtggcaggcacctgtagtcctagctacttggcaggctgaagcaggagaatggcgtgaacctgggaggcagagcttgcagtaagccgagatcgcgccactgcactccagcctcagcaacggagcaagactccacctcaaaaataaataaataaataaatgaataaaaaataaaaataaaaaataaaatagaggccgggtgcagtggctcacacctataatcccagcactttgggaggccgaggcaggtggatcacctgaggtcaggagttcaagaccagcctggccaacatggcaaaactctgtctctactaaaaatacaaaaaattagctagacgtcgtggtgggcacctgtaatcccagctactcaggaggctgaggcaggagaatcgcttgaatccaggaggcggaggttgcagtgagtcaagatcacgccattgcactccaacctggatgacagagcaagactccatctccaaaagaaaaacaaagatggaggccgggcatggtggctcacacctgtaatcccagtggcaattcacttgagattaggagttcaagaccagcctcgtcaacatggtgaaaccctgtctctactaaaaatataaaaattacctgggcatggtggcactcacctgtaatcccagctactggggaggctgagacaggaaaatctcttgaacctgggaggcagaggttgcagtgagccaagattgcgccattgcactccagcctaggtgacagagcaagactctgtctcaaaaaaaaaaaaaaaatggagatgggggtctcactctgttgcccaggctggtcttgaactcctggctttgacagatcctcccgccttggcctccccaaggtgctaggattacaggtgtgaaccaccatgctctgcccagacatgattttgagggttcagccctgtgccagcctcactgtgtgtgaccttgggcagctcctgccttctctgggcttctctgagggttcaaaccagttcttggatgctatgggctctgccatcagagcctttgtgtcccgcttactggcttccccccacacacacctgctcctgtctgtgacgctgggccagggatgggggcagggcgaaggcaggttctgctgactcatggggcttcttggcccctgccaggccaaaggcctttcccacctgcagccttagccagcgtctctggggtctagtggccccagtgaggctattcctccgggtgccttgtagcttccccatccaggcctcagaccctcctcccagcagccctaggggagggccactctcttcctgttttaagatggggaatctggctgggtacagcggcccacactcataatcgcagcaccttaggaggctgaggtgggaggatggcttgaggtcaggagtttgagaccagcctgagcaacatagcaagactccatcttttttttttttttttgagatggggtcttgctctatcacccagtctggagtgcaatggcgcaatcttgtagcttctccatctgggcctcagaccctcctcccagcagccctaggggagggccactctcttcccgttttaagatggggaatctggctgggtacagcggcccacgcttataatcccagcaccttgggaggctgaggtgggaggattgcttgaggtcaggagtttgagaccagcctgagcaacatagcaagactccatcttttttttttttttttttttttttttttgagatggggtcttgctctgtcacccagtctggagtgcaatggcgcgatctgagttcaagcaattctcctgcctcagcctcctgaggagctgggattacaggcatgcgccaccacacctggctcacagggtgagaccctgtctctaaaaacaacaatgacaaaaatgacacaatagtgagggcacaggccccagtcactgacttagattctaatcccagctcttccaactgctgtttcttcacctgcggagcctcagtttccccatctgtcattggggataccagcccctgcttcacgggtgcctaggggattcccagattatggaggtgcctcaaggtgcccggtggggctgagggtggagggtatgggggttcagggccgggtccctggctgagctgaccccacaggtttcagcgggtgggcccacctgacggaggtcgaccccgatgaggaggtgcagggcgagatccacctgcggctggaagtgtggccaggggcccgggcctgccggctacgctgctctgtgctggaggccaggtgagactcaggggcctgggggcgggcagtgggtcccctgcaactagagaaacccaatgaggaagctgagccccccctcgccccacctctacctcctggtcccagagctggccacctcccatcaaagcctgctctcaagagagggtctcgccaggcacggcgtctcacacctgtaatcccagcactttgggaggccgaggcaggtggttcacctgaggccaggagttcaagaccagcctgaccaccatggtgagaccctgtctctactaaaaatacaacaattagccgggcatggtggcaggcgcctgtaatctcagctactcaggaggctgaggcaggagtcttgaacccaggaggcagaggttgcagtgagccgagatggcgccactgcactccagcctgggtgacaagtgagactgtatctcaaaaaaaataaaaaagaaagaaaaaagagagggtctggggaggttttctggacttgaagatgtttcttgggtgatttccactcaaggggatatgtcccttaagggacagtctaatgttctcatggaggaactggagccatcacagaggagtggagtagggggtacgggtgaggagaccccgaactctgatcacacagcctcagtcccccagtgctaaggccggcttcccaatgtttaacgccagtgtgaacttggcctggtgggagtgtgtgtaagtgggtccctcgtggggctgggggggtgaaaagagttgctgaaaatctcccgatgggcaaattgagggttcccccaaggagggacagtggtttggatggttccatgggcctgagtcacctgtgacagggccaccccccaacccccagggtatttttagctgcaggctgcactcccgtctgggcctgggtctgagtcacactctgtccgtgagaagcgtcttcccttccggctccaaagccacctccccaagtcgctccctgcctgtgaggcaggagggtggcccccagccaggcagccctatggagccagtgttccccccacccttgaggggtcagcctgtctaagaggaagacttcccttgggcagaggggtgtgggtcggatgatgcccatgttgctcactctggcttcccgggagttattttctgtcctgggaaaatagaaatggatggaaaatgtctgggcttgggccgagcctcagccacacccccacactcgctcactctctggcctctgccattcattcccccccgccccaccccaactcacccgcttcctccatccttatcctttccaggcaccaggctgtctgggggacaggcatgcacacgtgtgcacccgctcacacacgtggccgggctctgggacctcggggccacttctcccaggcacccatcgtcacccacggagatgggaggcatggaagcatgtctccctggccctcccctctctccaggaatctcccctgtcccatcctctggggccacagtggttggccttctagtgagtcctagcaggggagaggaatgtccaggcctctctcagagtgaggggacttgtcccccgttgtcctcggcaatgagactcctgctgcaattccaagtcagcctaagaaggtccatttgctgcggagaaagaaagaacatttcctcattttttctggggagattctcaatatttcagtaaaaccttggggtttttttgttttttgtttttgagacaatctcgctccatcatccaggctggagtgcagtggcccgatctcagctcactgcaacctccaccttctgggttcaagcaattctcctgcctcagccttcctagtagctgggattacaggtgtgcaccaccacgcccggctaattttttgtatttttagtagagacgggacttcactatgttggctaggctggtctcaaactcctgacctcaggtgatctgcctgcctcggcctcccaaagtactgggattacaggcgtgagccactgcacccgggctgtttttttttttttttggtgggtttttttttttttttttgaggcagtctggctctgtcgcccaggctggagtgcagtggcgttttcttggctcactgcaacctctgcctccccaggttcaagcaattctcctgcctcagcctccttcccaaagtgctgggattataggaatgagccgctgcacccagcctcaatgttggggttttattagacagtcttgagggggaagaaaggcaggtatgagaggcttaaaatatcaaagatgagtgggctttggtgttcttccacaaagagttctaagtaggggatactggcagggtgcagtggctcactccagtaatcccaatgctttgggaagcagaggtgggaggatctcttgaggcccagatttcgagaccagcctgggcaacagcaagatcctgtctctacaaaaaaatttaaaaattagccaggtgtggtggggcacacctatagtgccaactacttgggaggctgacgtgggaggattgcttgagcccaggaggtggaggctgcagtgggctatgattgcatcactgtactccagcctgagcaacagagcaagaccctgtttaaaaaaaaaaaagaaaagaataaaagggccaggcgcggtggctcacgcctgtaatcccagcactttgggaggccaaggcaggcggatcacctgaggtcaggagttcgacggcagcctggccaacctggtgaaaccccatctctactgaaaatacgaaaattagctgggcgtggtggcaggcacctgtaatcccagctactcaggaggctgaggcaggagaattacttgaacccaggaggcggaggttgcagtgagctaagattgcaccattacactccagcctgggcgacagagcgagactccgtctcaaaaaaaaaaaaaagctggaggtaccgtgactagactagggctgtgtaaagacccatctatggagaaagggcagggccgcccatcagggctgcacctcactcctccaccaagtagagcgacattactggcagaccttccagaagcacactctctccctaaacctgagcccagtagcgattcacttttccattttcctgatgaggaaaccgaggcttagggcagccctgggaatggagggccaggaacattgccccggcggttccctggcagcactcacaccacccccctgccacccccagagcaaggtgcagccactggcctgcagctgcctggtgggaaggacccatggcctctaccttggggggttcttggccacatgggcgatcctggggagatggctatgggagcagggcccagaaagggcagaggcgcactgtccacagtcagcttgccagggacggaatgtgcccaggccttttggcccgctgtggttacataatggtggtgacaagtgggggagggggggctcagggacaagtcgatgatccaatcttcctccacccccaccagggatctggccccaaaggaccgcaatggcacatctgaccccttcgtccgagtgcgctacaagggccggacacgggagacctcggtgaggaggccagagggcagggaaggggcagggggctcgggggacgtgccagccacgcccccattgctcacctcaccacctgctcaccatccgctggtgggacagattgggggccacagtcttacagaggaggcccagggaaaggggcgacctctctgaggggacataataggtcccaggacctctggggccaacttcgctcactcccggccatgcttgggggtaaggaggggattgagacagccggagtggggtttatttgggaacacccatgctgccttccccacccccaggaaatgtccagagtcgagggcccagtcctgggcacgaagacaccaaggtctgctttctcagtatagtcgctactgtttttgttttgtgtttcgtggtgttttttttttttgaggccaagtcccaccctgtcacccaggctggagtgcagtggctggatctcagctcactgcaggctctgccttcccagttcgagagattctcctgcctcagccacacgagtagctaggattacaggcacacaccaccacaccaggctaatttcttgtatttttagtagagatggggtgtcaccatgttggccaggctggtctcgaactcctggcctcaagtgatcctcccgcctcggcttcccaaagtgctgggattacaggcatgagccaccacgcccagccctgtgttttttgtttgttttgctctgtttttaaatattttatttccacaggttattggggaacaggtggtgtttggttacataagttcttagtggtgatttatgagattttggttcacccatcacccgagcagtatacactgcacccaatttgtagtcttttatccctcacccccttcccacccttcccccccgagtccccaaagtccactgtgtcattgttatgcctttgcgtcctcatagcttagctcccacatatgagtgagaacataacgatgtttggttttccattcctgagttactacacttagaataatagtctccaatccaatccaggttgctgtgaatgccattaattcattccttttttatggctgagtagcattccatcgtatatatataccacagtttctttatccacttgttgattgatggacatttgggctggtttcacatttttgcaattgcgaattgtgctgctataaacatgcgtctgcaagtatcttggccaggcacagtggctcacacctgtaatcccagcactgtgggaggccaaggctggcagattgcttgaggccaggagtttgagaccagcctggccaacatggtgaaaccccgtctctactaaaaatacaaaaattagccgggcgtagcggcaggcccctgaaatcccagctacttgggaggctgaggcaggagaatcacttgaacccagaaggcggaggttgcagtgagctgagatcgtgccactgcactccagcctgggcgacagagcaagactgtttcaaaaacaaaacaaaacaaacaaaacaaaaacatatgtgtgcaagtatcttttttgtataatgacttctcctctgggtagatacccagtagtgggattgctgaatcaaatggtagttctacttttagttagttaaggaatctctgctgttttccatagtggttgtactagttcacattcccaccagcagtgtagaggtattccctgttcaccacatcctcatagtcagtactgttttgctgtgtggccttggatacatcttttccccaccctgggcctcagttctccctatctcagaaatgggtgggagcttggacaggacattttaacctctgctgtggcagaacctccaaggcgaggaggctgtggggaacccaggggaggtgtctagggcagctctgccttttgcccagcctggggagtccagtggcatcagcctaaccccctcccaccctcctctgggcagatcgtgaagaagtcatgctacccacgctggaatgagacgtttgaatttgagctgcaggagggggccatggaggcgctgtgcgtggaggcctgggactgggacctcgtcagccgaaacgacttcctgggcaaagtgagcaccaccgccccgccccccctcctcccccggcaggctgcacctgctgtcccccagcacctggttccattgcagccatcccatcctcagggacctccctccggcttccccaaagagggacactcaggaagcctgggactacccccccacctccaccgtctgccagaaccagcaacttccccccaccaccactggcactaagggacccttggaaggggcccctccccactaagaacagtagttggcaaggaggagacgtaagtctcccagctccaggaaaactgccactatgtccccaggtggtgattgatgtccagagactgcgggtggtgcagcaggaggagggctggttccggctgcagcccgaccagtccaagagccggcggcatgacgagtaagtgcatggagctgggcagccggcctcaaggggtggggtgggggctgacatttgggaattggctacaggcaggcagggcaggggggctgctcagggtgagaggtcaggagacacagctccagggtcccctcagcccctgcccacctagccagcatccttctcatcctggctgggctccacctcccctttatttattatttatttatttatttatttatttattttgagatggagtctcactctgtccccaggctggagtgcaatggcgtgatctcgactcactgcaggctccgcctcccgggttcacgccattctcctgcctcagcctcccaagtagctgggactacaggcacccgccaccgcgcctggctaattttttgcatttttagtagagacagggtttcaccatgttagccaggatggtctcaatctcctgaccttgtgatccacccgtctcggcctccccaagtactgggattacaggcatgagccaccgcgcccggcccctcccctttatttttccccacagttctgcattcagctcagctctgtcttctgtcttttttttgagatggagtcttgctctgtcacccaggctggagtgcagcggcacaatcttggctcactgcaacctccacctcctgggttccagtgattctcctgcctcaacctcctgattagctgggattacaactgtgtaccaccatgctcggctaatttttgtatttttagtagagacagggtttcaccatgttggccaagttggtctcgaacacctgacctcaagtgatccacccgcctcagcctgccaaagtgctaggattacaggcatgggccaccgcacccggccaggtctgtcttcttagctcacaggttgtacaggtctcctgctttctgcctctggaagtttctgaaacaagtactcagacattttccctttgaaaatttccctgcagacctcagaccagggttcaagtctccaaggtcagtgtccctgagccatagctccaactccctatgccagattctccaggaatagggttgtgagataagataggacaccattggccaggagcggtggctcatgcctgtaatcccagctctttgggaggccaaggtgggaggatcacttggggcaaggagtttgagaccagcctgggcaagaaagtgagactccgtctctacaaagaaataaaaattaggccaggcgcggtggctcacgcctgtaatcccagcactttgggaggtcgaggtgggcggatcacctgaggtcaggagtttgagaccagcctggccagatggcgggcacctgtaatcccagctactcgggaggctgaggcaggcagaattgcttgaaccccggaggcagaggttgtagtgagccaagattgcgccattgcactctagcctgggtgacaaagctagactctgtctcaaaaaaaaaaagaacacccagttaaaacttaatttcagataaaagtgaatatatatatatatattttttttttttgagcagaatctcactctgtcacctaggctggatggagtgcagtggcacggtcttggctcactgcaacctccgcctcccaggttcaagcaattctcatgcctcagcctcccgagtagctgggattacaggcatgcacctgtaccaccagtacagtggtgatcatagctcactgtagcctccacctcctgggtgcaagcaatcctcccatctcaacgttccaggtagctaggaccacctcacctggctaaatttttgtagttttagtagagatggggtttcaccgtgatggccgggcttgatgttgaactcctgacctgtgcccggctgtgaatacatttttagtataaaaataaccgctgggcgtggtgactcacacctgtaatcccaacactttgggagtttgaggtgggtggatcacttgaggtcacgagttcgagaccagcctggccaacatggtgaaacaccgtctctactaaaagtacaaaaaatggtggtgggcacctgtaatccaagctactgaagcaggataattgctggaacccaggagacggaggttgcagtgagccgagatcccaccactgcactccagcctcggtgacaagagcgaaactccgtctcaagaaaacagccgggtgcggtggctcatgcctgtaatctcagcacttgggtggccgaggcgggtggatcatgagatcaggagttcaagaccagcctggccaacatggtgaaatcccgtctgtactaaaaatacaaaaattacccggatgtggtggcgggcacctctaatctcagctacttgggaggctgaggatggagaattgcttgaacctgggaggtggaggttgcagtgagccgagatcgcgccactgcactccagcctgggtgacagagcaggactccatctcagcaaaaaaaataaataaataaagaagaagaatgaccatgcactatttgagacatacctatactaaaaatattcaaatttaggccgggtatggtggcgcatgcctgtaatctcagcactttgggaggccaaggcaggaggatcacttgagcccaggagttcaagaccagcctgggcaacatagcaagaccccatctctaaaaaaaatagttaataagtaaataaaatattcacatttaactgggtgtcttgggtcgttttgctaaatctggcagcctgtctaggaagccctctggcttgtttgctgtggcccacagccctcagtggttcagctttgtgtctctgtggaaggccccagacccccattcccccagttcccatccttaacagggtaggagcaggtggacggctgtgtgtccagcacaaggtgtttccatagaaccagccaaggcccatcttgccatcttattttttatttatttattttttttgagacagagtcaggctggagtgcagtggtgcaatcctggctcactgcaacctctgcttcctgggttgaagcgcttctcctgcctcagtctcccgagtagctgcgattacaggcacctgccacaatgcctggctaatttttatatatatattttaatagagatggggttttgccgtgtcagccaggctggtcttgaactcatgacctcaagtgatctgcctgccttggcctcccaaagtgctgagattacaggcatgagccactgcgccaggcccaggggcccatcttaacactgctctgtgcatgaggcttgtgctgagcaggggcagtgggagccttagaggttcccacttggtccacaccctcctctgttctgaacttccctatcagaacagggaagctgggaagctcaatctaatgtggcaagttgctgaactggctcgggtctcagtttccctattaggttgttatgagggttggggatttgcttctgctgtaaagtgtacccatgatggtgccattatctgggagttgatcgattcaaggctggcagctccacatacccaagcttggaggtggcagggagccagacctcgaagacagatagaggtgccttgagtgcagagacaggaagggctttccaaaaacagaaaataaatagcccgggcagagcctgggaggcagagctatgcagggcacccgaatggagggcatgagcagagagatgggaagccggccccaagggaaaaaactggaggccatgggagtggtgtggtccagggtggcctgagtccctggtggagaggtcacaggctgcccattccaggggcaacctgggctccttgcagctggaggtgcggctgcgggacgagacggtgctgccctccagctactaccagccactggtgcacctgctgtgccacgaggtcaagctgggcatgcaggtgagggggcctgggcagggtgggagggtccagtggcagtaggcctgtgcgcctgtccttctaaacccattctgcagagcagaaacctgaggtctggggatgtgaggagctggccagtgtccagggccccgtccccagccaccccttgggaaaatgtcctctttccctgggatgctctgaggtcctcagagggaaaggttcgggatcccccgtgcctctccctgcagggcccagggcagctgatcccactcatcgaggagacaaccagcaccgagtgtcgccaggacgtggccacgaacctgctcaagctcttcctggggcaggggctggccaaggacttcctggacctgctcttccagctggagctgagtcgcaccagtgaggcctgggaaggagctgggcccagaacactgggaggtgtttgggggtgggtgggctcctcctgtaggaggcagatggggtcagagaggagggaggcaaggaacagagccaagggcagaggtgggacagtgggctgggaggtggcgaggaggccctttattgagggggcagcttagatcccccagacccaaggtcctctgtcctccccctcccccaaaagctttgtgccagccccctacccactgggacctctgtttgtaggtgagaccaacaccctgttccggagcaactctctggcctcaaagtccatggagtcttttctgaaggtgaggttgcatgctatattgtcctcatcttgcaaatgacaacactgagcttcagagagagcgacagagggggctgggacttcgactccagtgttctatctccatattcagagccctttaaggttaagaatgtggctgggcatagtggctcatgcctgtaattgcagcactttgggaggctgaggcgggcggatcacttaaggtcaggagttcgagaccagcctggccaacatggcgaaaccccatctctactaaaaatacaaaaattagcctggcatggtggtgggcacctgtaatcccagctactggggaggctgaggcaggagactcacttgaaccaggagccagaggttgtagtgagctcacgccactgcactctagcctgggccccgtgctagactccgtgccccgcacccccccgccaaagagaatgtgtgtgtgattaaaatttaagttagaaacagtctcactatgttgcccaggctggtctcaaactcctggcctcaagtgatcctcctgccttggcctcccaaagtgctaggattacaagggctaagaattctagtcattcattcactcactcattcattcattcatgaataaacagtttgccctgcatgtgtacctggccccctcctgggcggatacggcaggcaaacggtgcaagggcggctgccgggagaaggtgggcagctggagtgggactgggggagacaggatcaatgtgacctgcggtggtccccaggtggccgggatgcagtacctgcacggcgtcctgggccccatcatcaacaaggtgtttgaggagaagaagtacgtggagctggaccccagcaaagtggaagttaaggatgtagggtgaggccgggggtaactccgggggttgcggggtgcagcggcagcgggttgggatcaggccctgtcagcatgtgtgtttgtgcttctgcccacccgtgtattgtcccctgtgtccgtgtcctggctgctgtgagagccactgttcctgtcgtggccctggcgctgaccgcgacctcctctgccaacccgccccgttccacgcaggtgctccgggctgcaccgcccgcagaccgaggccgaggtgctggagcagagcgcgcagacgctgcgcgcccacctgggggccctgctgagcgcgctcagccgctcggttcgcgcgtgccccgccgtggtgcgcgccaccttccgccagctcttccggcgcgtgcgcgagcgcttccccggcgcccagcacgaggtgcgccctccacccgctgggctaggctgggccgggttggactgggctggggcgaggggtgaagagcggtggggaaccagggagcgctggggaggaccagggaggctgtgtcccagcgagggtcagggacggagcctaaggggagggggctgccaggagccctggtctgggggactccagcccgcgctcttccgcacccctccagaatgtaccgttcatcgccgtcaccagcttcctgtgcctgcgcttcttctctcccgccatcatgtcgcccaagctcttccacctgcgggagcgccacgcggacgcccgcaccagccgcaccctgctcctgttggccaaggtgcgggccttgcggccacgggcgggatgcacagctgggtgtcctaccggggccctggcctggactgcagagtgttccctaccggctccggcgaggccactggcacgcccacgtaggcactgcacttcacagtttgcaaagccttcctgtggccaccttgtccgagctccatctcatggataagggaacaggcctgcgaggggtcgggggttgccaaggccgcccatcctgtcggtggtgaatcgcgggaccttccaacccgggtctgcttactctcaggctgcacctatgtgcccggcaccggggtggggtatccagtgcagcagcgtcagttaaacctacagaggaaggcccaagtggtctcagttatcataaggcatcaaacttcatgatcctctcctccctgatccctagtggggctggagggggcccgtgggcatggcctctgtcgcctctgcctccatcgctacagctgagtagcaaagacttggggagggggggtgggagggggtgcagtggctaggcccctaacctagcagaacctggtccttcctgctgtcacctccaggcagtccagaacgtgggcaacatggacacgccggcttccagggccaaggaggcttggatggagccgctgcagcccaccgtgcgccagggcgtggcgcagctgaaggacttcatcaccaagctcgtggacatcgaggagaaggacggtgagcgccgccctgcacagacccgcccacagcctactgctgacgtttgctccgcccttgagccccacggccccacccatcgctgtttgttcctctcgtggccccacccaccgcctgctgttggcatttgccaggcccccaggccatagacccacgcaccactgtttgtgcttcctgtgaccctgcccactgcctgccgttgacgtttgccccacccctagacccatggcctcacccccccatcatctgtgcctgttgacatttgctccatccttgagctccatagccccgccgccacctgctactgacgcgtgtcccgcctccaagcccatggccctgccttcctcagtccacctgtcaccccgctcaccaccagctgttgatgtttgctccgcccttgagccccatgactacgtccactgcctgctgttcagatttgctcagcccttgagccccatggcccctcccactgctccgctccccccagtcccgccctcattcactgggctctctattcccctccctccctggcctggcagagctggacctgcagcggacgctgagtttgcaggcgccacctgtgaaggaggggccactcttcatccacaggaccaagggcaagggccccctcatgtcctcctccttcaagaagctctacttctccctcactaccgaggccctcagcttcgcgaagacgcccagctccaaggtgggtaaggagggaggccggcaagtggggctctgagaggccggcaagtggggcacctgtccccttccttggagcccacttgaggtacccccggggtcagagaagaaagccaggtgtgtggcatctgtactgcttgtcagaacctaggagggccgggcacggtggctcacgcctgtaatcccaggactttgggaggccaaggcgggtggatcacttgaggttaggagtttgagaccagcctggccaacatggagaaaccccgtctctactaaaaatacaaaaaatcagccgggtgtggtggtgggtgcctgtagtcccagctactcgggaggctgaggcacgggaatcgcttgaacctgggaggcagaagttgcagtgagccgagatcgtgccactgcactccaacctgggcaacagagcaagactccgtctcaaaaaaaaaaaaaaatgaatatggaggaagttgatccgaccttaccaggttgttgaggattaaatgagatgatctccctaagggtcctgacccagggcctggcaggtagtactatttaggcaaatgatattattaaagatagtataacacctgggctgctagatgagtaggaggctagggcaaacaggggaggcttcctggaagaggcaggaatatagaagcacggaatcttggcgtgggaagggatctcaaagatcaccttgtacagccctctctgagtcatgggtcacctctcctgcaagctctcttctcccaggaagggctgaggacatacttcctccatggacctggtgactgcttgctgtacacctgcccccagtcatgcaggctatggggatgatcttccaggagtacccagcctagccctgggcaggtgagagcgggctaggagtaggtgaaggagctcatcacccaccctgttctcaaccagctcaggggtcccaccagatgaggggcccgccccttccgaccaaagacccctcagatgatgataattattttttgagacagggtcttgctctgtcacccaggctgtagtgcagtggtgcgatcatagctgaccgcagcctcaaactcctgggctcaagcaatcttcctacctcagcctcccgagtagctgggactacaggcacgtgccaccaagcccagctaattttctttaacttgtttttttgcggagatgggggtcttgctatgctgcccaggctgttctcaaactcctggcctcaggcaatcctcctgccccagcctcccaaagcactcagatgattattatacatcttccttgcccgggttgaaagatttgactacatgggcattatttaattctggtcccattttttttttttttttttgagatggagtttcgcttttgttgcccaggccagagtgcaatggtgcgatcttggctcaccgcaacctccgcctcccgggttcaagcgattctcctgcctcagcctcccaagtagctgggattacaggcatgcgccaccatgcccggctaattttgtatttttagtagacacggagtttctccatgtttgtcaggctggtctcgaactcccaacctcaggtgatccgccttcctcggcctcccaaaatgctgggattacatgtgtgagccactgcgcccggtcaggatatgactattagagcctgggactacaaaagcaagttggaaaattaataaatgcaaagtcacaaagccttggccacggccggattgactttgtagcccagggaatgctggctgtcccgacactaccccaaagctcacacctccgaggccttctgggagtgccccccagagaggccaggtcctcctctcccagttgctgggcacttggtcaccatcagtctgtgctctgccctggctgaggtcactctaggtctcccatgcctacccctggtgctgcagaaggggagactgaggcccagagatggggaatggaatgcccctggctaggtccctgagcctcctcctccctgcctgccccagaaaagcgccctcatcaagttagccaacatccgggcagcggaaaaggttgaggaaaagagctttggcggctcgcacgtcatgcaggtcatctacacggacgacgccggcaggccccagactgcctacctgcagtgcaaggtgcggggaggggagcgggtgctgtgggagtggcctgaacactgtgggagtggcttgggtgctgtgggagaggcctgggtactgtgggagtggcatgagtcctgtgggagtggcctgggtattgtgggagaggcctgagctctatgggagtggcctgggtgctgtgggagtgccctggatgctatgggaatgccctgggtgctgtgggaatggcctgggtgctatgggagtggcctgagctctgtgggagtggcctggctgctgtgggaggggcctgagtggactggatgagaaaagagttgattgagcctctcgccccgctaccagctacatcaggcaccgcagggtgtgtctaatctgggaggtgtcagggacaggtgtgtgtgtgttgtccaggggcctgagccccaggaggccatggcccatgtctttccctgggcatccatgtgtaggtctgtgtgtgggccagtgcacagacaggtgcatccccgtgatgtgaaatttgcacgttgcacccgtttgttggaaactatttccagataactgagatgggggccaggcacgctggttcacacggataatcccagcattctagccagggcaacagagcaagaccctttctctaaaacagaaagtctgagctggcacctgtgtggttctgtgtctgtatcaatgcctaataatcaaacattatgctgtgtgtggctctgggtgcatgttctcaagtaaccttctcatctgttccttcattaactcattcattcatttatttaaaaaatacttactgagcacctcctaggttccaggcatgattctaggtgaggggatacagtggcagatgaggcagagtcctgccctcatggagctgatatccctgggagaagatgggccaataaatacatgtttcaaatgtcggctcatgcctgtagtcccagtactttgggaggctgaggtgggaggatcactggaggccaggagtttgagaacagcctggccaatgtagcaagaccccatctctacaaaaagaaaattagccagccatgatggcatgcacctgtgattccagctacttgggaggctgaggcaggaagatagcctgaacccaggagttggaggctgcagtgaactatgatcacaccactgcactccagcctgggctacagagtgagaccctgtctcttaaaaaaaaaaaaaaaaaaaaaaagcaaattgtgatagtgacttgaagggaaccagaagggactaagggagcaagggagggaagagagtggggtatagcagggagcggtctgtcctattaagagtggtcagggagagtacaaaaagtagccgggcgtggtggcgcgtgcctgtagtcccagctacttgggggactgaggcaggagaatcgcttgaacctgggaggtggaggttgcagtgagctgagatcgagccactgcactccagcctggtgacagagcaagactccatctcaaaataaataaataaataaattagtaaattaattaaagagtggtcagggaggacctctgatgggtggcattcgagcagggaccttgtaggagggtgacccagatgtgtatctagggcagggacatgtgggacaagtaagaagcctgcagctggaggggggttggtttcttccgggcttgaccgtcctggcctgtggggaggaagtcacagacctgtccctctgtgcccttccctctaggagttcccttttgtgtcagggtccagagccactgggaaaagtagtgatatcagggccaccaaatatatttggcgggttctggaatacctacgagcgtggccaaggggccagcggcggctgaaatccagcccacaccagcctcctgggctcctaccatcccggtgccttccgtggggacaagtggagctgctgccaccaaaaagacgagacaggtgggagaggagaggatgaagtcttgctgtgttgcccaggctggtcttgaattcctgggctcaagcgatcctcccacctcggccccctataatcccagctgtagtcccagcactttgggaggctgaggtgggaggatcactggaggccaggagtttgagaacagcctggccaatgtagcaagaccccatctctaaaaaaaagaaattagccagccatgatggcattataggagtgagccactgggattataggagtgagccactgcacctgctctccaggccatgcgcccgggcatgggtcatgttccactggaggaagggcagcttctcctaattcactcaaagctgctgggttggtatggtggggaacatggcgtctggcgtggtacaggagctccgggttaggagggcttcctggaggaggtgacgtctgaacaggcctccccctccgtgtcccctgcagtgtgtgaatgagcttaaccagtggctgtctgcgctgcggaaggtgagcatcaacaacaccggactgctgggctcctaccaccctggcgtcttccgtggggacaagtggagctgctgccaccaaaaagagaagacaggtgggagaggaggcctgggtcccgggctctgcatccgtccactgcgagatcgggcctctggctgaacgatgggaccctgagccctgctgtgcacctgcagggacctaacccaaggaatgctggcccctccaggagctctgggcagaaagggtcccgtggaccaggtggtttgggaaatgccacgtgatgtgtgtgatgcatatgagtgaattcgctgaaggctctaaggaggcccgaaaacacgttagaatcccatttctttttatttcttcttcttcttttttttttttttttcagacacagactttcactctgtcccccagactggagtgcaatggcacgatctcagctcgctgcaatctccacctcccagggtcaagcaattctcctgcctcaacctccccagtagctgggatgaccggcactcgccaccaagcctagctaatttttttgtattttgactagagatggggtttcaccatgttagtcaagctgctcttgttttgttgttgttgttgttgttgttgttgtttgatactgagtctcgctctatcatccaggctggagtgcagtggtgcaatctcggctcactgcaatctccgtttcccaggctcaagtgattctcctgcctcagcctcccaagtactacaggcgcaagccactgcacccagctaagttttgtattttcagtaaagacggggttttaccatgttggccaggctggtcttgaactcccgacctcgtgatctgccctcctcggcctcccaaagtgctgggattacaggtgtgagccaccacgcccggcctagaattccatttctaacgtggtttaacccagcacttcccaaactcttttgacagggaacccttctcttccccaaggagcttcttacagaacaggtgttctcaggaacacattcgaggagccccctgctaatgagagccagagagcccctgggttcgcacactccaatgctggccatctgaatccggagctgtgggtgggaggggaccctgagccttgggcactagagggatggcatagaggagcttctagaaggactccatactgtgtagtactctaggttctagcacctgtggttcttgagcacttgaaatgtggcttgaggagctgaggggttttttttgtttaattttttaaaacagggtcttgctctgttgcccaggctggagtgcagtggcacgatcatagctcactgcagcctccaactcctgggctcaagcaatcctcctgcctcagcctctgagtaggctggcactaccggcatgcatcaccacacctggctcatttaaaaaaaattgttttagaggtggggtcttgctatgttgttcaggctggtcttgaattcccaggctcaagcaatcctcctgcctcggcctcccaaagtgctgagattgtaggagtgagccaccacatctggcctgagtttcacatttttaaaaatgttgttttggccgggtgtggtggctcacgcctgtaatcctagcactttgggaggccaaggtaggcggattgcctgagctcaggagttagagacgagcctaggcaacatggtgaaaccccatctctgctaaaatacaaaaaaaaaattagccaggcatggcggcgtgggcctgtagtcccagctactcaggaggctgaggcaggagaactgcttgaacctgggaggcagaggttgcagtaagccaagatggtgccactgcactccagcctggcgacagagcgagactccatctcaaaaaaaaaaaaacaaaaaaacaaaaaaaaaaacagaaaagaaacaaaaaacgttgttttaattttaattaactcaaatagcttcatgtggctagctgccgccctgtagaacagcacagttctagaactttcgagaccttctccctgttatccacacttactttacagagtagactcagcacttcgagtcccctgtccttcaggccaggccaaaccttggtccccagagcccagtgtggcagaggccatcgaaaactgacccacgcactctagcccagccctggatttacagccaagcactgtatagggatgggtgactcttttgtttttgtttttgttttgagttgggtctctcactctctcacccaggctggagtgcagtggcataatcatagctcactgtagccttgacctcctgggctcaagccatcctcctgcctcagcctcctgcagaactgggactacaggcacatgccaccacacccagctattttttattttatttttttgtagagtcagggtctcactatgttgcccagactggtcttgaactcctggcctcaagctatcttcctgcctcagcctcccaaagtgctgggattacaggtgtgagccactgtgcctggcctcttggtgactctttgcaagggcattgctggctggctgatatggcctgcagcctctgcctgtaaccatcagagcgatactctcattatcggcaaggtgggacccaccctggcccaagagacagggcctgttattccactgtatggaggagaagctgaggcttagggaaggcagatgacttggcaaggtcataaagacagcaagctgcaggaccagctcattctaaggcatgaaccccctgtggcccacctcaccatgatgttaacatttcagcctgctcccttccaggcagacagtcttccagaaagttacccggctccctggctgggcgcggtggctcacgcctgtaatctcagcactttgggaggccgagacgggcaaatcacgaggtcaggagatcgagaccatcccggctaacacaatgaaaccccgtctctactaaaaatataaaaaattagctgggcgtggtggcgggcatctgcagtcccagctactcaggaggctgaaacaggagaatggcgtgaacctgggaggcagagctcgcagtgagccaagatcgcac

SEQ ID NO: 1606 - DNA, 239 bp, Homo sapiens
ataggcgtgagccgctgtgcccagcctcaaacactttttctttcaacgacattgacctatagtgaatatcaaaagcatgcactgaaactcaagagctgcctcctctcctgtgccaggatgcactgtaacttttgtgagccctaggcatgtttgacttatatgggttaagatattcaaatacggctaggcacggtggctcacgcctgtaatcctaacactctgggagaccgaagtgggca

SEQ ID NO: 1607 - DNA, 283 bp, Homo sapiens
cttctgcatccctcacccaattgtccctcccggctaacaagccagctgcaccccccaggcagaggtcctgcagcagtcggtataggcagcctgggcagggggcttgtcatagatctgcctctggccacgagatcttctgctccccctacggctgctagccgcagctgtccactaccccttagctttattctctctattcaggggcctcctgctgcgcactccaagggggtgcacgtttccaaagagagatcaagggacatggggaaaggagaaaggtacagct

SEQ ID NO: 1608 - DNA, 199 bp, Homo sapiens
tgggagcctaggtgggtggatcacctgaggtcgggagttcaagaccagcctgaccaacatggagaaaccccgtctctactaaaaatacaaaattagctgggcatggtggtgcatgcctgtaatcccacctactcgggaggctgaggcaggagaatcgcttgaacccaggaggcggaggttgcagtgagccgagatcgtg

SEQ ID NO: 1609 - DNA, 101 bp, Homo sapiens
gatcacctgaggtcaggagttcaagaccagcctgaccaacatagagaaaccccgtctctactaaaaatacaaaattagctgggcatggtggtgcatgcctg

SEQ ID NO: 1610 - DNA, 250 bp, Homo sapiens
cctgtaaccattcactttagttagttatttgttttacagggtttttggcatattttttagtatttgtgtttaacatatattttatgctacttctttaaaaaaagattggccgggtgctgtggctcacacctgtaatcccaacactttgggagtccgaggtgggcagatgacctgaggtcgggagttcaagaccagcctgaccaacatggagaaaccctgtctgtactaaaaatacaaaattatctgggca

SEQ ID NO: 1611 - DNA, 250 bp, Homo sapiens; identical to SEQ ID NO: 1610

SEQ ID NO: 1612 - DNA, 250 bp, Homo sapiens; identical to SEQ ID NO: 1610

SEQ ID NO: 1613 - DNA, 470 bp, Homo sapiens
ggatactatgctaagcgcatataccagatactatgcttagtgcatatgccaggtactatgttaagtgcatacaatggatactatgctaagtgcgtatacgaggtactatgctaaatgcatacaccaggtactatgctgagtgcatacactggatactatgataagtgcattcaccagattttatgctgagtgcatacagtagatactatgctaaatgcatacaccaggtagtgtgctaagtgcgtacaccagtactatgctaagtgcatgcactaggtgctgtgcataaaccaggtactatgttaagtgctcattgccttatttcattcttagaactgaccaatgaactattattcttattcttattagcatttcacaggcaaggaagctgagtcatggtgcttgcaacaggaggagccagatttgaactcaagcagtgtgacccagcaggttcaattaactaccatgcg

SEQ ID NO: 1614 - DNA, 294 bp, Homo sapiens
atcattttcaggctcccagattaattgtagattgtcagagggccccaaaagttcatgtagtgtaaacagtgaaatatctgtgtgagttgtcaggtgacctgggcttaaactcctccagtgacaagacactcaactccttcactacttctgccactggactgatgggaacactggaaatagtggatacacctggtactatgccaagtgcatatactgggtactgtgccgagtccacacactaaatgttatgctaagtgcatataccaggtaccatgctaagtgcatacactggat

SEQ ID NO: 1615 - DNA, 144 bp, Homo sapiens
ctgggcgtggtggcgtgcgcttgtagtcccagctactcaggaggctgaggcaggagaatcacttgaacccaggaggcggaggttgcagtgagacaagatagcaccactgcactccagcctggcgacagagtgagactccatctc

SEQ ID NO: 1616 - DNA, 445 bp, Homo sapiens
tcatgaagaatagagacgacaaatgtatccatctttatataaagttaggagctagacggtgatccctgaaaacagtgatttttttttaaagtctgattttcactctagaattttatcttgaaaaataaaaatagtgtagatgaagtatgggtggaaaacattctgctgtttcttttttcatggtgagctttttttaaaatgatagattaataacacctactatggtgtaagtgctatgtaccatgctctgtactaaggaggcattttatattctgtgtatatcatgtagtttacaaccctgcaaggtaggtggtatttttcctacctactttacatataaggaactcaaagattgagattaggtaatttcatatttgtggctattgaccacctgtctatgaagtggcaaggccaggattcaaaccctcttctgcctgacttaaag

SEQ ID NO: 1617 - DNA, 406 bp, Homo sapiens
tcatgaagaatagagacgacaaatgtatccatctttatataaagttaggagctagacggtgatcctcgaaaacagtgatttttttaaagtctgattttcagctctagaattttatcttgaaaaataaaaatagtgtagatgaagtatgggtggaaaacattctgctgtttcttttttcatggtgagctttttttaaaatgatagattaataacacctactatggtgtaagtgctatgtaccatgctctgtactaaggaggcattttatattctgtgtatatcatgtagtttacaaccctgcaaggtaggtggtatttttcctacctactttacatataaggaactcaaagattgagattaggtaatttcatatttgtggctattgaccacctgtctatgaagtggc

SEQ ID NO: 1618 - DNA, 414 bp, Homo sapiens
cagaaatagttaactatatatgtgctgattttaatgtatgatcgatttgtcaaatatttgaaaattaattttcttgcattgtaaaaactagtcattattatacgtttgattttttaaaaaatatattaaaaagggaacaggccaggcgctgtggcttatacatgtaatcccaacactttgggaggccaaggtgggaggatcgcttgagcccaggaattcaagaccagcctaggcaacacggcaaaaccctgtctctgcaaaaaatacaaaaattagccaggtgtggtggtgcgtacctgtagttccagctactctggaggctgaggtgggaggatcacttgagcctgggaggttaaggccacagtgagccatgattgtggcactgcactctagcctgggcaacaaagcaagacc

SEQ ID NO: 1619 - DNA, 414 bp, Homo sapiens; identical to SEQ ID NO: 1618

SEQ ID NO: 1620 - DNA, 329 bp, Homo sapiens
tatgtttgtccacattcagatctaagtgtaccctgtagtgggcagttttgcctgtgtgtagattccatctcgacctagagaagcagccagcagtagctctgctcctgggacgactgcagtgctttgcccagggaagtggaaaggccacattgctctgtccctggtggtttatggcgatagagacttccagtgatggccttcaccggccaccacacaaccgtttcattaaagggacagcagggccgatgttgctggggtgcctcggtcccaactgtttggcatactgcccttctcccgttggctctgtgctcagccaacttgcctcttgt

SEQ ID NO: 1621 - DNA, 329 bp, Homo sapiens; identical to SEQ ID NO: 1620

SEQ ID NO: 1622 - DNA, 364 bp, Homo sapiens
ctgtgacaataagctgctgggtttcaggtagagcccctttctctgctcctgattgcacggatgtttctgcacagggatggttgagattccagctgccacctcatcctagctgactttaaaactgaggcttggctgacattgggttctcagaggaacgattagaagcctggctcactgagagggagtgagtgcagcctggaggagggcaggcggcagggcgagtcctgggctcggggaagggcatggggaagggagtggattccctggaggcagagcttgattgtgagggatgtggcccccaaggtccatccctgggaggcaggagagcggcctccggaggaccctagaaaggaggttctcagcc

SEQ ID NO: 1623 - DNA, 364 bp, Homo sapiens; identical to SEQ ID NO: 1622

SEQ ID NO: 1624 - DNA, 414 bp, Homo sapiens
caccagtctccttattgttatgtcccttctaaaaaaggtcagtccagtgtgcgtgattgagcagatggacaaatatctgggttggattgtgccagctactggctggagaagagccaggtctcctcccacctccctgggagttcgaaagtaaccccgggtctaaccaggctctgagttggaatctaactttgtactttaatatctaggctttcgacaagtgggcatctttgagtcatcctgcctttgcctggaaacttgaaactctgtaaaactgactttgtgtgatgctgcccagcccacgttggggaagaagggtgtggtggctgcctcgagctgtgggagaggaagcagccatgggggaaatggagagtgcgtctgaactgggcctcctcggaccatgcttggacaccccat

SEQ ID NO: 1625 - DNA, 309 bp, Homo sapiens
gtattgggtacagtgcagggcgtggagtttctctgagacaacacaggaataccccgagataatgtgagcagtatctccaaagtccaggctgagtcatatggtaggtgctgtttggaatatctagcctgcctgccttgcagattcaaatgcctcgggcaggagggtgagctagctgccgatcctgctctgctcctgggtttgctgtgtggcccttggtaagtctcttcacaactcttccgtttcagccagagtgtgtaaatatgtattgtggagctttgtggtctttaatatcctgggagatgccagaaa

SEQ ID NO: 1626 - DNA, 278 bp, Homo sapiens
ggtttttaatatattaggatataattattcttattgaatgaaccatgtttacttgagaagcctgtgtattttgctgttttggggtggaatgttctctacgtgtcagttaagccaactaattttgtttttgctttatgctcccacatcacatgtgtttatttttttttacaactttcattttaggtttgggggtacatgcacagttttgttcatgtataaattatgtgtcactagggtttggtgtacaaatgattttgtcacgcaggtagtgagcatag

SEQ ID NO: 1627 - DNA, 280 bp, Homo sapiens
ggtttttaatatattaggatataattattcttattaaatgaaccatgtttacttgagaagcctgtgtattttgctgttttggggtggaatgttctctacatgtcagttaagccaactaattttgtttttgctttctgctcccacatcacatgtgtttatttttttttttacaactttcattttaggtttgggggtacatgcacagttttgttcatgtataaattatgtgtcactagggtttggtgtacaaatgattttgtcacgcgggtagtgagcatag

SEQ ID NO: 1628 - DNA, 404 bp, Homo sapiens
tctcacatcagttagaatggctattataagaaagtcaaaaaacaacagatattggcgaggttgcagagaaagggaatgcttatatactgttgatgggaatgtaagttagttcagctgctgtggaaagcagtttggagatttctcaaagaacttaaaacagaactaccattcagcccagcagtcccattactgggtgtatacccaaaggaatataaattgttctaccaggaagacacaggtacatatatgttcattgcagcactattcacaatagtaaagacatggactcaacctagatgtccatccatggaggactggataaaaaaaatgtggtacatacactccatggaatactacactgtcataaaaaaatgaaaccatgtcctttgcagccacatggatgc

SEQ ID NO: 1629 - DNA, 411 bp, Homo sapiens
acatcagttctcacatcagttagaatggctattataagaaagtcaaaaaacaacagatattggcgaggttgcagagaaagggaatgcttatacactgttgatgggaatgtaagttagttcagctgctgtggaaagcagtttggagatttctcaaagaacttaaaacagaactaccattcggcccagcagtcccattactgggtgtatacccaaaggaatataaattgttctaccaggaagacacaggtacctatatgttcattgcagaactattcacaatagtaaagacatggactcaacctagatgtccatccatggaggactggataaacaaaatgtggtacgtacactccatggaatactacactgtcataaaaaatgaaatcatgtcctttgcagccacatggatgc

SEQ ID NO: 1630 - DNA, 423 bp, Homo sapiens
ctgaaactctgtacccattaaacaatagctcttcattactctatcctcccagtacctgggaaccatcattctacttctggtttctatgaaaatgacattctagatatctcatataagtggaatcatgcagtgttttttgtatccagcttctttcacttagccttatgtcaaggctcatccatatcgtagcatgtgtcagaatgtctctttttaaggctaagtaatattccactgtatgtctgtaccacattttgtttatccattcctctgtcaatgaatgcttccaccttttggctatcatgaataatgctgctatgcaagtgaatttgcaaatatctgttgaagtccctgctttcaattcttatgggtttaaacccagaagtggacttgatgactcacagggtaattctatgttccaatttt

SEQ ID NO: 1631 - DNA, 440 bp, Homo sapiens
ctgaaactctgcattctttaagcaatagcccttccttaatctcttctcccagtaactgggaagcatcattctacttttggtttctatgaatattacatgctagatatctcatataagtggaatcaggcagtattagttttttgtatccagcttctttcacttagcattatgtcaaagtccatccatgttgtaacatgcatcagaatgtccctttttaaggctaagtaatattccactgtatatctgtaccacattttgtttatccattcctctgtcaatgaatgcttccaccttttggctatcatgaataatgttactatgcacatgaatttgcaaatatctgttgaagtccctgctttcaagtcttgtgggtttaaacccagaagtggacttgctgactcatatggtaattctatgtttcatttttatttatttattta

SEQ ID NO: 1632 - DNA, 423 bp, Homo sapiens; identical to SEQ ID NO: 1630

SEQ ID NO: 1633 - DNA, 453 bp, Homo sapiens
ctgaaactctgtaccctttaaacaatagcccttcattactctctcctcccagtacctgggaaccatcattctacttttggtttctatgaatatgacatgctcgatacctcatataagtggaatcatgcagtattagttttttgtatccagcttctttcacttagtcttatgtcaaggttcatccatgttgtagcatgcatcagaatgtccctttttaaggctaaataatattccactgtatgtctgtaccacattttgtttatccattcctctgtcaatgaatgcttccaccttttggctatcatgaatgatgttgctatacacatgaatttgcaaatatctgttgaagtccctgctttcaattcttatgggtttaaacccagaagtggacttgctgactcatacagtaattctatgttccatttttatttatttatttatttttgagacaga

SEQ ID NO: 1634 - DNA, 3593 bp, Homo sapiens
gtctaacatgtaagtctttaatccatcttgaattaatttttgtatataaggtgtaaggaagggatccagtttcaactttctacatatggctagccagttttcccagcaccatttattaaatagggaatcctttccccattgcttgtttttgtcaggtttgtcaaagatcacatagttgtagatgtgtggtattatttctgagggctctgttctgttccattgatctatgtctccgttttggtaccagtaccatgctgttttggttactgtagccttgtagtatagtttgaagtcaggtagcgtaatgcctccagctttgttcttttggcttaggattgacatggcgatgcgggctcttttttggttccatatgaactttaaggtagttttttccaattctgtgaagaaagtcattggtagcttgatggggatggcattgaatctataaattaccttgggcagtatggccattttcacgatattgattcttccaacccatgagcatggaatgttcttccatttgtttgtatcctcttttatttcattgagcagtggtttgtagttctccttgaagaggtccttcacatcccttgtaagttggattcctaggtattttattctctttgaagtaattgtgaatgggagttcactcatgatttggctctctgtttatctgttattggtatacaagaatgcttgcaatttttgcacattgattttgtatcctgagactttgctgaagttgcttatcagcttgaggagattttgggctgagacaatggggttttctagatatacagtcatgtcatctgcaaacagggacaatttgacttcctctttttctaattgaataccctttatttccttctcctgcctaattgccctggccagaacttccaacactacgttgaataggagtggtgagagagggcatccctgtcttgtgccagttttcaaagggaatgcttctagtttttgcccattcattatgatcttggctgtgggtttgtcatagatagctcttattattttgagatacatcccatcaatacctaatttattgagagtttttagcatgaagggttgttgaattttgtcaaaggccttttctgcatgtattgagataatcatgtggtttttgtctttggttctgtttatatgctggattatagttattgatttgcgtatattgaaccagccttgcatcccaggggtgaagcccacttgatcatggtggataagctttttgatgtgctgctggattcggtttgccagtattttattgaggatttttgcatcaatgttcatgaaggatattggcctaaaattctcttttttggttgtgtctctgccaggctttggtatcagaatgatgctggcctcataaaatgagttagggaggattccctctatttctattgattgaaatagtttcagaaggaatggtaccagttcctccttgtacctctggtagaattcggctgtgtatccatctggtcctggactctttttggttggtaacctattgattattgccacaatttcagagcttgttattggtgtattcagagattcaacttcttcctggtttagtcttgggagggtgtatgtgtcgaggaatttatccatttcttctagattttctagtttatttgcgtaaaggtgtttgtagtattctctgatggtactttgtatttctgtgggatcggtggtgatatcccctttatcattttttattgcatctatttgattcttctctcttttcttctttattagtcttgctagcggtctatcaattttgttgatctttttaaaaaaccagctcctggattcattgattttttgaagggttttttgtgtctctatttccttcagttctgctctgattttagttatttcttgccttctgctagcttttgaatgtgtttactcttgcttttctagttcttttaattgtgatgttatggtgccaattttggatctttcctgctctctcttgtgagcatttggtgctctaaatttccctctacacactgctttgaatgtgtcccagagattctggtatgttgtgtctttgttctcattggtttcaaagaacatctttatttctgccttcttttcgttgtgtacccagtagtcattcaggagcacattgttcagtttccatgtagttgagcggttttgagtgagtttcttaatcctgagttctagtttgattgcactgtggtctgagagacagtttattataatttctgttcttttacatttgctgaggagagctttacttccaagtatgtggtcaattttggaataggtgtggtgtggtgctgaaaaaaatgtatattctgttgatttggggtggagagttctgtagatgtctattagttccgcttggtgcagagctgagttcaattcctgggtatccttattaactttctgtctcattgatctatctaatgttgacagtggggtgttaaagtctcccattattattgtgtgggagtctaagtctctttgtaggtcactcaggacttgctttatgaatctgggttctcctgtattgggtgcatatatatttaggatagttagctcttcttgttgaattgatccctttaccattatgtaatggccttctttgtctcttttgatctttgttggtttaaaatctgttctatcagagagtaggattgcaacccctgcctttttttgttttccatttgcttggtagatcttcctccatccctttattttgagcctatgtgtgtctctgcacttgagatgggtttcctgaatacagcacactgatgggtcttgactccttatccaatttgccagtctgtgtcttttaattggagcatttagcccatttacatttaaagttaatattgttatgtgtgaatttgatcctgtcattatgatgttagctggttgttttgctcgttagttgatgcagtttcttcctagcctcaatggtctttacattttggcatgtttttgcagtggctgttaccacttgttcctttccatgtttagcgctcccttcaggaactcttttagggcaggcctggtgttgacaaaatctctcagcatttgcttgtctgtaaagtattttatttctccttcacttatgaagcttagtttggctggatatgaaattctgggttgaaaattgttttctttaagaatgttgaatattgtcccccactctcttctggcttgtagggtttctgccaagagatccgctgttagtctgatgggcttccctttgtgggtaacccgacctttctctttggctgcccttaacattttttccttcatttcaactttggtgaatctgacaattatgtgtcttggagttgctcttctcgaggagtatctttctggcattctctgtatttcttgaatctgaatgttggcctgtcttgctagattggggaagttctcctggataatatcctgcagagtgttttccaacttggttctgttctccctgtcactttcagttacaccaatcagatgtagatagtcccatatttcacatagtcccatatttcttggaggctttgttcatttctttttattctttttattct

SEQ ID NO: 1635 - DNA, 539 bp, Homo sapiens
tccttttgcaaattggtcattttattttttaatttttttttgagacggagtcctgctctgttgcccaggctggagtgcagtggcaccatcttggctcaccacaacctctgcctcccaggttcaatcaattctcccgcctcagcctcccaagtagctgggattacaggcacccgcaaccatgcctggctaatttttgtaatttttggtagagacggggtttcaccatgttggccagggtgatctctaactcctgacctcaagtgatctcagccttccaaagtgcagagattacaggtgtgagcactgcacctggcccaaacaagtgtatcttaaaaggcaaggcagaaggcatgaaggcacaccagctctggggagctgcccacgtggacaggcgggaggcacgtgtggttctgcctcttcacgtgtgtgtaggtcgtgtcattaagaccggaggcggatgggggaattatgactgagggtgctgtctctgtgcccgtcttatttttcacaatttctataatgcacaagttacttttata

SEQ ID NO: 1636 - DNA, 1717 bp, Homo sapiens
tctaactcctgacctcaagtgatctcagccttccaaagtgcagagattacaggtgtgagcactgcacctggcccaaacaagtgtatcttaaaaggcaaggcagaaggcatgaaggcacaccagctctggggagctgcccacgtggacaggcgggaggcacgtgtggttctgccttttcacatgtgtgtaggtcgtgtcattaagaccggaggcggatgggggaattatgactgagggtgctgtctctgtgcccgtcttatttttcacaatttctataatgcacaagttacttttataatccaacaaggatatgttttcaaaatgacaaacttggccgggcgtggtggctcacacctgtaatcccagcactttgggaggctgaggtgggtggatcacctgaggtcagcagttcaagaccagcctggccaacatggtaaaacctggtctctactaaaaatacaaaaattatctgggtgtggtggcacacgcctgtaggcacagctacttgggaggcggaggtggaggttgcagtgagccgagatcacaccactgcactccagcctgggcaacagtgagacactgtctcaaaaaaaaaacttgtttgaaccacgtggacccacatatccatggtcagggactcgaatccctggtattcagagggctgccttttcctaagtgcaggttctgtagggtctttgcagggctaacttcgggacttcagtatgagcagattttggtaaggggtgggggggggcctggaaccagctgaggacaactgtatattgatccttacacacacagttttccttggttttgaacttattacagaataagaattatttattcttacttgaatttactgaagtattttttcattaggattgcttttcactgctgggtcatctcccgacatgcgggttgttattttttgggttctccgacatctctcctgatggcagcacttccttgggtttggtccttcagactctgcatctgtccggtcactgatggtcacaaccagcagttccttaaaaacctgaaattgggccgggtgcagtggctcatgcctgtaatcgcagcactttggaggctaaggcagtaggattgcttgaggccaggattttgacaccagcctgggcaacatagtgaggccgtctttaccaaaaactttttttttaatttattgatggaaacagtctcactcttatcaccatggctggagtgcagtggcgcgatcttggctcactgtaacctccacctccctagttcaagcaattctcctgtctcagcctcctgagtagctgggattacaggcatctgccaccacgccgggggtgtttttttttgtttgtttgtttgtttttttgactgagtcttgctcttgtcgcccaggctggggtgcagtggcacaatctcagctcactgcaagctcctcttcctggggtaaagccattctcctgcctcagcctcccaaatagctgggactacaggtgctggccaccacacccaactaatttttcgtattttcagtacagacggggtttcaccacgttagtgaggctggtctcaatctcctgaccttgtgatccacctgcctcggcctcccgaagtgctgggattataagcgtgagccatgacgcctgggtaatttttctatttttagtagagaggcaggttttgctatgttggccaggctggtctcgagttcctgacctca

SEQ ID NO: 1637 - DNA, 120 bp, Homo sapiens
ggccgggcgtggtggctcacacctgtaatcccagcactttgggaggctgaggtgggtggatcacctgaggtcagcagttcaagaccagcctggccaacatggtaaaacctggtctctact

SEQ ID NO: 1638 - DNA, 195 bp, Homo sapiens
caggggcacgtgacctgctttccagtcttcctcatacccatccccgccccaagagttgggggtgcgtgaaggtggctcatggggtctttggtactcagtcacgttggtagatgaaggctagagtagggcgtcagtgtgaatctgcccttccctgtgatggaaggaattcctgacttccccaggatctaggcagtt

SEQ ID NO: 1639 - DNA, 412 bp, Homo sapiens
tggagtttccagtgagctgagattgggctgttgcactccagcctgggcaacagagcaagactcaagtctcaaaaaaaaagaacagcgtagagtaaaatgccaagatagggtttcccttcgaagagaaaagtctgtcttgtgaagcgtttcagggcttgacagatgtggaggcagcacagggtgagtgggtctgcatgtccacatgtggcatttgtggactagcaagtgagatctctttgttcaagggtgtgagaaagatttccagagccagtacagcaatgcatacccccagaccctgggtatggacccctctcatatggagatgaattctagagaacagccatagctgtgacaatcagtattctatacaaccttagtgatacggcttcctttaagaatttgtaggccaggc

SEQ ID NO: 1640 - DNA, 433 bp, Homo sapiens
catgctctcaggaagcctcacccgggcccctggctcctgctgcacagccaggagggggttggattccggttccggtgacactgtcgggggctgctcctcacccccaggtgtgcacctggcacagccactgtcccaggatccctggaggctgattgcacacatatcccagcctgggaaggaccccctctaaaatgaaggccgcccctctggtggtcttagaatgtgtgcaccctccgcacggttcctgctggcttgcagctgctggcccacctgctggggccggttccacactcagatgagaaatcaaattccagaagggctgaggccggcaggtccctggtggggctggatcccagctctgcccacgaacaccccgtttgcatagactggggtgcaaactcacccctgccctgctgtgaggagggccctggaa

SEQ ID NO: 1641 - DNA, 2210 bp, Homo sapiens
ggctgtcccaccggtggaggctccagcggagatgagctgggcaggcctcgcggagcaagtgcaaactgcacccgcgtcctgggggcatctgcggggagacttaggggtcatgctttgtgccccaggccacccagaggagaaggccaccccgcctggaggcacaggccatgaggggctctcaggaggtgctgctgatgtggcttctggtgttggcagtgggcggcacagagcacgcctaccggcccgggtgagccaagccctagcctgggagtgctggggtggggggaccgggagccctcagcacctcctagaggcggccctcagcacctgtcggggactccctgggggctcctgctgagggtcctgccccggccacatgttcccatcattcttgggtcctgctctgggactcctgggctgaccccctctccacccccgcagccgtagggtgtgtgctgtccgggctcacggggaccctgtctccgagtcgttcgtgcagcgtgtgtaccagcccttcctcaccacctgcgacgggcaccgggcctgcagcacctaccggtgagtgccccaccacaccgagctcacccagccccagcctcccaagtcggccacacatcagcatgtcaggggcgaggcgggggtgaatcctgggacccaagatgggaaactgaggccagagccatgagagggctgcctgagatgggcgacccagggcggccggagccaaggggttccacgatcacctccagtgtcctaatccttgctcttgccccgacacgtctcaaaggaccgcacctctaagagcatccccatgtttagaggggtcacccatcctgtctgcacccctccacttccgggggactaacccctccctaccctggcatccctggctgcaagttcccatatacacagaatggtgcctgactcccctggtcccactccactgggcacccccctccacatgacggcccccagtgggcacagatgagaccctgaaatgtcctgtatgcccacacaaggggcacacacccctaagtctcagagtcctccttcctgggtgtgggagctccaccccctgctgggggaggggcctgggaattcagacttctggaggtttaagaagggctccgatgcccagggcccacactctgccgtgactcgccgtaggccgggcacaccctctcctctgggcctggatgcccccacagtaggagaccagataggtgggggcacacacaggcctggccactgcctctgctccatgcggagtgtggctgggccttcctgctgtggcttgagtcccggccagcaccggaaggcccaggcagggaaacggctgtgcagtgacccctcagtgccatcccttgaggagaagacccttgggggcatgctggggtgaccctgtgcactctgagaggggactctagatgcccagcaggtgactaagggggagtaggatgcccctctgagctgtcccacccaccccacagaaccatctataggaccgcctaccgccgcagccctgggctggcccctgccaggcctcgctacgcgtgctgccccggctggaagaggaccagcgggcttcctggggcctgtggagcaggtgagggctatgtccctcggcgcccggtgttaggagggcgactgttccccaatcttccagcaacgctcctgctgcttttcttgaaccccgagcaaagcaccaccttgccgcagagcacccactccctagcagctgcccccacagggtgctggggacccaactgagctggtgaccagcctcccccgcccacagcaatatgccagccgccatgccggaacggagggagctgtgtccagcctggccgctgccgctgccctgcaggatggcggggtgacacttgccagtcaggtgaggctggctctaccctggggggccctggaagggtcctgggcacctccttgcatgtcctggggttactgctggcccatgagtgggtggttgtgaagggagctgtgtgggcaggacccctcccgcaggcatggccgcctgacaccccgtttcctgcagatgtggatgaatgcagtgctaggaggggcggctgtccccagcgctgcgtcaacaccgccggcagttactggtgccagtgttgggaggggcacagcctgtctgcagacggtacactctgtgtgcccaagggagggccccccagggtggcccccaaccc

SEQ ID NO: 1642 - DNA, 395 bp, Homo sapiens
tgctgccgcaagtggtctgttgaagggtcagatgctggttgaacatgtagcaaattctctaggcctctgatttttccaaccacgttttgccttgctgtttttggttcttctgctgtgttctggcctgtagcctgctcttctgagaacctactatgcttctatttactgtcttcaaggagtaccttccctgtttcatttgcctggctgatttttactggtcttttatgttttgcttttctggatgtctacttctccttccagttcaagagttaggtgcttgacttctgtgctcccatgtaccctgcacttaacttttgtgttcttataatgccctgcacttgacttctgtattcccataaagccttgcacttgacttctgtgttcccataatgccc

SEQ ID NO: 1643 - DNA, 328 bp, Homo sapiens
ctgatgctctcataaattgtggtgcttctcaggactgtgtttacttcctcttagtattcaggggcctggtgcaggccttacaataagactatgaaaatgtttgttgagacgatagtctgcagataagcgcctttgggaactggaacaggtgatctgtacgggctgagggagccttaatgggagagtcggctctctgactgactctcatggtttgggcagaggagagaggaagttgtaggcattctgggtgaagctgttggcagtgcactgaagagagagggaatgcaatgtcacctctcaatgcaatgtctctctcttcagtgcactg

SEQ ID NO: 1644 - DNA, 475 bp, Homo sapiens
  SITE (217): n equals a,t,g, or c
  SITE (430): n equals a,t,g, or c
aaagtcccaggtagaagggaggagctgtccccagcagcctggggtctctagccccggtccaccatcacagcacccttggagtgagtgtcagggagtgtgggatatttgcccaagtccagccaccacccctgtccgagtagagcccacacagtattggaaagagaaatatagccactgctttcactcctgggagtaggggtgccctggttgctttcanccagcctgcaagagtatagtcagggtgaggtgctggagaacatcaacaacgatctgggttcaaatcccagctttgccacttattagccatgttgctgtgtcaacttctctgagcttcagtttattccactgttgtgtaaagataatgcctcttagggctgttgtgagcattagcacagtgcctggcatatagtaaatactcaatatatggtangccatattattataattgtaattgttactaccaccactgtcgtct

SEQ ID NO: 1645 - DNA, 6638 bp, Homo sapiens
  SITE (460): n equals a,t,g, or c
  SITE (713): n equals a,t,g, or c
  SITE (1057): n equals a,t,g, or c
  SITE (1343): n equals a,t,g, or c
  SITE (1357): n equals a,t,g, or c
  SITE (1390): n equals a,t,g, or c
  SITE (1392): n equals a,t,g, or c
  SITE (1687): n equals a,t,g, or c
  SITE (1945): n equals a,t,g, or c
  SITE (2014): n equals a,t,g, or c
  SITE (2022): n equals a,t,g, or c
  SITE (2355): n equals a,t,g, or c
  SITE (2631): n equals a,t,g, or c
  SITE (2680): n equals a,t,g, or c
  SITE (2938): n equals a,t,g, or c
  SITE (3148): n equals a,t,g, or c
  SITE (3193): n equals a,t,g, or c
  SITE (3218): n equals a,t,g, or c
  SITE (3309): n equals a,t,g, or c
  SITE (3312): n equals a,t,g, or c
  SITE (3344): n equals a,t,g, or c
  SITE (3505): n equals a,t,g, or c
  SITE (3543): n equals a,t,g, or c
  SITE (3552): n equals a,t,g, or c
  SITE (3622): n equals a,t,g, or c
  SITE (3625): n equals a,t,g, or c
  SITE (3673): n equals a,t,g, or c
  SITE (3764): n equals a,t,g, or c
  SITE (3815): n equals a,t,g, or c
  SITE (3905): n equals a,t,g, or c
  SITE (3960): n equals a,t,g, or c
  SITE (4162): n equals a,t,g, or c
  SITE (4164): n equals a,t,g, or c
  SITE (4179): n equals a,t,g, or c
  SITE (4210): n equals a,t,g, or c
  SITE (4266): n equals a,t,g, or c
  SITE (4564): n equals a,t,g, or c
  SITE (4593): n equals a,t,g, or c
  SITE (4648): n equals a,t,g, or c
  SITE (4732): n equals a,t,g, or c
  SITE (4744): n equals a,t,g, or c
  SITE (4746): n equals a,t,g, or c
  SITE (4823): n equals a,t,g, or c
  SITE (4870): n equals a,t,g, or c
  SITE (4910): n equals a,t,g, or c
  SITE (4964): n equals a,t,g, or c
  SITE (5126): n equals a,t,g, or c
  SITE (5157): n equals a,t,g, or c
  SITE (5206): n equals a,t,g, or c
  SITE (5213): n equals a,t,g, or c
  SITE (5233): n equals a,t,g, or c
  SITE (5447): n equals a,t,g, or c
  SITE (5583): n equals a,t,g, or c
  SITE (5621): n equals a,t,g, or c
  SITE (5832): n equals a,t,g, or c
  SITE (5938): n equals a,t,g, or c
  SITE (5990): n equals a,t,g, or c
gctgccagcggggaggctgcagccgcgggttgttacacgtgctggagcagcagcggcccccgctcccgggaaccgttcccgggccgttgatcttcggccccacacggtgagcccggaaggaaccaagaggccccagggctacgggaggggcgggagagaaggtgggggctgctggggaggcgccccgggctggagagacgggggcagagggagtggggggtggagggagtgcatcagccgagggggtgcatcggctggggaggtggccaaggaataaagtgcgagcgggaggccgggggtggaacgtcgggaggagcgcctcggctaggggtgggaggcggggagcggctcggcttcggggataaacgtttggctgcctccagggctgggtgaacgcgtggagatggctgtggggtcccggaccggaccgggttccgagtgcgaagacccaggctggggnaacagagcgggacccctccccccggccccgcacccgaggtctcactcagaaaaccccaacaacagtgaggactccgcctcttcgctcctcctctcctgtgcttagtgcgggttcgcctgggcactcgctttccgctcctaccgccctcccccagtcggggtggctgggccaaagttgagaggttatcagctgtggtcctgcagcttggggggtgggcggaatggacatggcattgtgacgtgctgccccgganctccccgttggggtccccatccaggcctggatgttttgtgctcctcttccagaagacaggaggtttgctgttgtgagggctgctctttcctgggggagggaatgggaagggctcacctggtggctgccctggtggtgctcagccttggcttgagtgtctggcatactggctgggcccggatatttgtatgtggagccaagagggtggggcgggaaggagggggaaagagctaccagcaaaaaagtggttaacacaacagagttgctgcaggctctggtttgaggcaggttatgaaaccacatcagggcccagcactaagcagccacctgccagctatggcagcnagaagttttcggctcaactcctgtagacctagtcgacctctgccagcctcttctctctgtttctccccatctagggtaggggccagttggttgttttactaatggaagtgatatgtatccatagtcacacgaaagtctcaagagtgtttcctcattgccagtctttttgttagtttattgatctcttctttttcaggggtctctggtggtttcctgctctcagggcacctagtgtttaggcttcaggaagaagcttctgagggtgttggctaggacctaggtctanggcttttcctaggnctcatcaagttttgttggctgccctgtgaaagncncagaaaggcgtatggggtcctgtgatctgggattccccaaggcttttggcactcctggacaaatactaggaagggttagtggactttctataccagcacccctgtaggtgcgggttacagagaggtgatggggtggcagtttcaggtcagacttgggaagctctttccctctccttagtcagagttaagtccttcagagccctcacttgtcagccacatgccgccctcccctctcaggtggaggcttttgcgtagcagctgtcccaggggctgctagagtaactgaagccccaanggccctgggaagataaacaatctgagccagctctggctttctagatacttgaatttctgttaggctcaattatccagcctagtgggctgcgctgatgggtcccaggagcatctcttcaatcagaatgcgccccaggctggcgcacgggtgtttgcttgttgggatggcgtgttgtgggtcacattttctctgaggtctctaagcttggagctgtctgagaagaggaaacttgctcctgttatcctggaagtaaataanctggcccctgaggactcagtctcctgtgcaggtttggctaggatcctagtcagagatagatagcatctngggtctgnacggggttgctgcaggggcgtgagggaggtggccttctgggtacttctagaatatctccatctgggactcttttctgcattcccaggaaagatggggctgttaccatggtgatgaccttacggtctttagcaagcaggaccctatctcagatagggaggtgagccagtacacaggtgccatctgtctccactttctcctggtcacagggccctcagggatctggggacagccaaactctggataaggggcagatcattccaccccttccttctctacttccctctgctcactgtgggttgcggccacctcctggttcctcctgctgcaggacntcctaccgttggtgctgggcaggggaaggcatggtgctaatatacacctggaaacaggtgctgagaggggagactgaggtgaggatgggcaggacagagaagaacgggggcaggagggaggccacaggttcgagtctgtgcccttaggagacatatgttgaggtggattccagctctctatgggagttacaggtgttggccacgttctctatcctcgcctctcttgtggggaaaagggccctggtggtttggcagtggagtgggtagcatcacaangggttggcctgagtggctgccaaatggagaaaacatccggatgggttgnttttgtgtcacccaggaggggtgccttctaggtctgggcaaaggttgtccctagtctgttgttttctcctttcttcctcccttcctccctccccacttccctctttctacctgatcagtcctcctaagttggggtttggggagatccagaattgaaaaaatcagaggaggtgagtggatgcagtgacctcaaaatagttcatccactgctgcctgtacccacaggcctcacttcctttccctcctgatgggaagagcnttaagagcagatgtcccacattaggccttcagtgagacacagtccagcaggggttgtgctgagtgagaattctctccctggggctttgtcggcagagggtcctcatgggagtgccatagggggtgaggctgggggatgggccttgacttctctgccctggggctgcgtgcctcttgatgacctgtcctccgatgccctgccagggccctngtcccaatgggatgatgcatggggcagcctgttgtttatcccagncccagcagcaggaaatgagtagagnctaagtccacatggactttctccactttccatgcttcagaatcaaaagagtggaactgcctggagttctcagggaaacaagggcctgcctnccncagcgggatccgagggtgagagggggcagggnaaagcagtgtgacctgtctgacctgtgctgcttgtttgcagaacagcagagaggggcagcaggatgaatgtgggcacagcgcacagcgaggtgaaccccaacacgcgggtgatgaacagccgtggcatctggctctcctacgtgctggccatcggtctccntccacatcgtgctgctgagcatcccgtttgtgagtgtnccctgtcgntctggaccctcaccaacctcattcacaacatggtgagagcctgtctgctgcctgcccctgcccctgcccnctngccctgtgggctgccctttggcagggctgagggataggaggagcctgntcgggcctggcccaggtgtcagggtgatgtactgacgacatctgcctccagagcccaggcctagcccttacctctctgccttgctcccccnttctgggttcctgccctgtgtaccatgacaggaatcaaatctgcagatttnttccacatctctagggtggggtggctgttggcctggaagatgtgctcctgagagctgaacaaagggctccagagagttcccaggacccgnagagtcctggtgcctaggctgatacagaaatgcccctttctcaagttagcttctncgaaccgtcttccacttttgcccttctctgctccctcaccacttgctaccttgcactctttgtcgggtaagcagggcttagtcccatcgcttgcctcctcccaacaggcacagggggctatgagtggcctggaggggggcagcatctcggtgcctatcttgtggccaacttccaccgtgcattctcatgccaggcctagccncngtcccccagggagtnccccttgttcttctcctgccatactcccagnctgctccatcctgacctccagcccatatccccctgcccagcagagggaggctccangatcactgggagttacttgtgtctgtgactgggtggaggagctgggcaggggggcctttcccttttgtatcctctaacaaagacttcttcctccagggcatgtatatcttcctgcacacggtgaaggggacaccctttgagaccccggaccagggcaaggcgaggctgctaacccactgggagcagatggattatggggtccagttcacggcctctcggaagttcttgaccatcacacccatcgtgctgtgagtgcctgggctacaggaagacaccagcaggcagggcaaggcctggnaggaccccagggcccagccatgcttattnaaccctgccgtggctcctggtgtagggatgaacagaggaagttggaatattcctngggtcttacactggactcaggctttgggcctccctggccccatctttcctccattggagcttccttcctgctagtgagataggncctacaggcttngngggtgaagctgggaggtgggggcggtactgggccaggaggggcccctttagcctgagagctcttgcttcttacgctnggtctgggaacctcttctgtaactccttagctgttgggattctgccntttcccctcccaggaagtgagggaggaaggggtcctcccnaacagtcttttatatctctccccacccttcccctcccaggtacttcctcaccangcttctacactaagtacgaccagatccattttgtgctcaacaccgtgtccctgatgagcgtgcttatccccaagctgccccagctccacggagtccggatttttggaatcaataagtactgagagtgcagccccttcccctgcccagggtggcaggggaggnggtagggtaaaaggcatgtgctgcaacactngaagacagaaagaagaagcctctggacactgccagagatgggggttgancctctgngcctaatttcccccctcgcnttcccccagtagccaacttggagtagcttgtagtggggttggggtaggccccctgggctctgaccttttctgaattttttgatcttttccttttgctttttgaatagagactccatggagttggtcatggaatgggctgggctcctgggctgaacatggaccacgcagttgcgacaggaggccaggggaaaaacccctgctcacttgtttgccnctcaggcagccaaagcactttaacccctgcatagggagcagagggcggtacggcttctggattgtttcactgtgattcctaggttttttcgatgccacgcagtgtgtgcttttgtgtatggaagcaagtgtgggantgggtctttgcctttctgggtagggagctgtctaatcncaagtcccaggcttttggcagcttctctgcaacccaccgtgggtcctggttgggagtggggagggtcaggttggggaaagatggggtagagtgtagatggcttggttccagaggtgagggggccagggctgctgccatcctggcctggtggaggttggggagctgtaggagagctagtgagtcgagacttagaagaatggggccacatagncagcagaggactggtgtaagggagggaggggtagggacagaagctagacccaatctcctttgggatgtgggcagggagggaagcaggcttggagggttaatttacnccacagaatgtgatagtaataggggagggaggctgctgtgggtttaactccntgggttggctgttgggtagacaggtggggaaaaggcccgtgagtcattgtaagcacaggtccaacttggccctgactcctgcgggggtatggggaagctgtgacagaaacgatgggtgctgtggtcctctgcaggccctcaccccttaacttcctcatacagactggcactgggcagggcctctcatgtggcagccacatgtggcgttgtgaggccaccccatgtggggtctgtggtgagagtcctgtaggatccctgctcaagcagcacagaggaaggggcaagacgtggcctgtaggcactgtctcagcctgcagagaagaaagtgaggccgggagcctgagcctgggctggagccttctcccctccccagttggactaggggcagtgttaattttgaaaaggtgtgggtccctgtgtcctcttccaggggtccaagggaacaggagaggtcactgggcctgttttctccctcctgaccctgcatctcccaccccgtgtatcatagggaactttcaccttaaaatctttctaagcaaagtgtgaataggatttttactccctttgtacagtattctgagaaacgcaaataaaagggcaacatgtttctgtttccctgtgtctggccttcgcttcctggaaggctga

SEQ ID NO: 1646 - DNA, 482 bp, Homo sapiens
gaactcctggcctcaagtgatctgcctgcttcggcctctgaaagtgttgggattacaggcatgaaccaccacgcctggcctgtcatcccttcaaatgttctttcagaactgaggcatgcagaggctggaagacaggctgggctcaccggggtggttatctctgagagaggacatgggtgaggtcagaggcctctccctggagaaggaggtaggtggagaagccagatggcatccagataaggaagaccagcatctccttgagagtgtacacgggagcacgagatggggagggaggctgagtgctccttacaggcccaccctgttgcctccaggtgttagctgctgttgtcctgggtcttcagtgttgaccgtcgcatggcatttgggcagctggttctgctgggttatggtcctcatgtccctggcacagacacagccattgcctgctggcacttgatacctactcatattccatttctcta

SEQ ID NO: 1647 - DNA, 10758 bp, Homo sapiens
cacagcaaagggagacgtcatttgctactatgggaaccgaggggagcctgatcctatcgttttgacgccaggtgagcctgccctggcagcctgatggggtgggggactgtttctatgcagaggtcacccttgtgctttttagagaccaggcacttgtcatattactcttctgagatgactttgtggccatttaagtgccttatggtctgtgggcaccttgccctgcacctggacacttcagagagccctggctccctgctcaccccctccccatgggcttttcctgctgagcaaggtgcgcccctgttctgggcttcccaccgcagccctgcagcccagccggccacccccagcctcacttcctgtgccgtcccagtgtgccctgtgcctgttccttctcagaacctctggagccatcaccacctggggttcttgcctggtctgctccctgacgcacaagtacacaccccactcaagccccacacagatgcacgcctcctgcacccagtccccagtctgatccccggtccccatcctcagggcctcgagcccctctgcgccaggtcacactccacggctgggcccttcctgccctggctctgcaccactgcccaggctgtgcctcctgctacatgcccttcctttccccctcctcgggtgctgcgatttcctggaagcttcctctgccagtgccccaacctggagagaatgtgtcacattgcccccctctgcagccatgttctgggagggaggtctgcatcttgtcccaggtctggtgccaggacaaagcagcactcctgggaaatggcatttcccctgggtgcacaaaactgtagggaccatagcctaggttccggggactgctggctcactcactcccacactcgctgcccacagacactcctcgctggtggcatcgtggaactctgtgccttaaacgcccgctctggtccctctactcaagctgctggctcacacagggtgttccggcgcctggggagtgtgtcagtgcccttagcgccacccacacccctctgtgagggggctccctcacacccctggctcctctgaagctccatgcccacgtcacacagactttcttttgcatttggcacaaatcaccaagtgaggttgcaggtcacaggtgcacaccttcccactgggtgtacacggtggaactgaagccccaggcgtccctggaggggcccgagggagatgataagcagtccccaggacagctgagtggccccatcccacctgcatcttagggggctggtggtgctgacgggctcatcatgagtcctgtggtccttgcctggcccacactggagctggcttccagcttcccacgtctgcccagtgatgtttcatccacagataggcccagcccccatttgctagggtggtgcccagacccgaacccctgggctagttgggatctccagaggaggcatctgcctggagggtggcttccagtgtgtcccacccactgcccccacgcctaccagctggtgccctctcctccacctggggcttatccttccggccaccctctgtgaccctggtcttcccctccctaccttggatacaactgtgggcagcccacctgagctcccaagagctgggcagtggcacagacacagagactaccagcgaggcagggatgtggccccagaaggtcctgagcttgcaaaggattgttctggctgtctcagccagctcttgctgttccacctgccccagaacctccgcatcagttgagggtcgtggggttggaatgtgtggcgaagtaggtctgtggcagtggagttgggccatgctgagcctgtgactgcccaggagagaattggaaactaaaaggtgcaaaagcagtcagagactccctaccaccccctcactgtgaacattggcccagcggcctctggggcagtcgctgtaaccatccacgtggcaccctcggttctcagaggctgagacctccgtggctggagatgcttattttctgctcagttgttgttctgtagaacttatttctgtctacatcctgcctcatccctgagcctgccccacctggtccacattgcctttttttttttgataaagttttattgagatatgactgactagcggcacagttcacccatttaaagtgtatcattcagtaggtttcgtttcattcacagagttgagcaactgtcatcactacctaattccaggacatttcttgatccccaaagaaagccatacctgtcagcagccactccccattccccgtctcttcagcgcctgcaacctttaatctgctttctgtctctggatttgcctattctggacactttgtataaagggaatcctataatatgtagtttaggggactgacttttttcacttagtgttgtcgtctaaaaactcaccagtggcgaggcacggtggctgacgcctgtaatcctagcactttaggaggccaaggcgggcagatcacgaggtcaggagatcgagaccatcctggctaacacggtgagaccccatctctactaaaaatacaaaaaattagccgggcgtgttggcaggtgcctatagtcccagctacttgggaggctgaggcgggagaatggcgtgaacacaggaggcggagcttgcagtgagctgagatcgcgccactgtactccagcctgggcgacagagtgagattgcatctcaaaaaaaaaaaaaacaaagaaaaactcaccagcatggctaaatgatagaaaggagagttttatttgccatatcagtttgcagacccggaagagagagtctctagcatggactgaggtgctctctttgaagaggggaagggcagtttgagttttatgcctcccaaggtccatatcacacaatagagtcatacatattcagcaggtttggggaaaagccatacatatttatgaggggacccgagaacatatgcaatagataaacatacatgtaacatacatcccatgttcactttggggcagggttttagcattaaaatgaggtagaatctggatctttccatcagaaggtgagctctaggacacagttggagtgcagcctctatgaactgctgaaactggcttatggtctgtagttgcttatcagaaaagagtgtttgaaggctggttctctgtccagtcagggttgtggtggtctgggctgtcaagagttaggagggtctgataacgtgtgtgatctctactgttgtgagggagtttatcaagactgtggtttttcttgtagctgtaggaatttagggagttgctgagacagctgccctgaaccctcgagccagttggtactttttgtttcttccctttatccattaatggacacttgagttttttccaccttttggctgttggaaacagtgctgctcacagtgtgacctcacagcatttgtgtggtcatatgtttttatggctctcatgtgaatacgtaggaatggagttgttaagtcgtatggtaaccctgtttaaccttttgaggaacatccaaactgtttgccaaagcagccgcagcattatacattcccaccagcagtgtatgcgggttgcagcttctctgaatcctcaccaaaacttgctatgttctgtgtttttgatgatagccacgatagtgggtgtgaagttgtgtggactcgtggtttggtttgcgtttctctgatggctatgatgttgagcagctattctcatgctcgttggccatttgtatgtcttctttggagaaatggttattcagactgggttgtctttttgagttataggagtgacttatacattcattctagctacaagtctcttatttaaagcacaaagcttaaaatttttaagtcctatgtctctctctttttttttcttttgttgctcatgcttttggtttcttatctaagaaaccattgcctaatctaaggtcatgaagctttccccaatactttcttcttagagttttatagcttttgctctttcacttaggtctttggtttgacttaagttaactatttttttttttttgagacagggtctggctctgtcacccaggctggagtgcagtggtgcagtcatggcccactgcactgtcaacctcctgggcttaagagatcctcccagccgggcgcggtggctcacgcctgtaatcccagcactttgggaggccaaggcgggtggatcacaaggtcaggagatcgagaccatcctggctaaaccggtgaaaccccgtctctactaaaaatacaaaaaattatccaggcgtggtggcgggtgcctgtagtcccagctacgtgggaggctgagacaggagaatggcgtgaacccgggaggtggagcttgcagtgagccgagattgcgccaccgcactccagcctgggcgacagagtaagactccgtctcaaaaaaaaaaaaaaaaaaaagagatcctccctcccaagtagctgggactgcagatgtgtgccaccatgttcagctaacttttatgttttgtagagataaggcctcactattttgctattttgccgaggctggtcttgaactcctgggctccagtgatcctcctgccccagcctcccgatgtgctgggattataggagtgagccacctctcttgacctgagttaacttttgtgtatggtgtcaggtagagtccaactcccttctttgcccatgactatgcagttcaatggtcttccatgttgttcatgatggaaaaagcactgtgacacctggggctggcggcttggctctgggggccccagcagagccaggctgtctccctgggaaatgcctcggccaagatattctcctggaagtctgacagggagagggtggtgtcttggtctccctggtgcatcatttggggtgcttggctcccatcaagcccacccctgctgccctggcctctagagaagagcctctgaggtgaggtgcttctccacctcaagtccctgcccttcactttctgtgacatgagaaacccttttcctgttggccatgccttctgccaacactctgggagcttgttcagagtctgtgcagagccccccggctctcctaacctggggcctggctggtacgcagaggtgggccatgctctgctgaggcccagcctacacctgtgcccactgtgtggcgctgttgggggttccccaaacagggacatgattgtggtgggtgcctcctggcctctggtggctaattctcccactcttgaacttctcaggtggccccccaacctggcgtgaggtgaagaggttccctcttggctgtcccctttgcctgtgagatctcaggttgctcatttcttattcatccatccatcgaggctgctgggcatctgtgccttgtggtctcctgtgggtgcccgcttccgcctactgctgagttctcctctccttgccatgccatcaggtcaggaatgagcatggggaaggagctggagcatggagcggcttggcctcagtctggcctgatttcatggtccccagctgtaccccgtgttaggtgggtggcaggtggcaatttgccctgacatggcacagcagggcctctgcatggcccgctgattgctcctcacaggcacctacgggctgagcaacgcgctgctggagactccctggaggaagctgtgctttgggaagcagctcttcctggaggctgtggaacggagccaggcgctgcccaaggatgtgctcatcgccagcctcctggatgtgctcaacaatgaagaggcgtgagtgggcgggtcctgctggggtgagccccagtgtcccgccaccagggcagagggaaaggcaggccctgctgccccgggaggcccatggaagtggccaggctgggtccccagctgcagggaagctgatggatatcctgtcctccctgcctgtccccttgagccagctgaggtttccaacaccagggacttttgatgacagaagatgggcccaggcccaggcccaggcccaggggaggctcagtgcacccagaggcttgatgcagccacgtggggcccagagcagatggatgctcccctctgcatgccgagagcttgtgggaagttccagaagattctagacactcagcaaacccaggcggaagagacacatcatggaaatgagtggctagggtcagcacgctcagggttgatgggcttcccgcaagcggtctgtccccagcgaccctgggctgagtgctgggcagggacttgcagttccgggaactgcctgggtgtaggagctcccacccacttccttgcccgtaggcctcaaggcccctcaggggccaggcactggggtcttcgttgccccagccgggggtcctggtgcttgccatgccagcctttctcccactgggcgagatgccccacccatccctcgctccccacccaggtcagaccactgccctgcccaggtgatccagcgtccactcccaccctgtccagcttgcccccttcagagaagcacccatggaccatctcccactcctccccctggggcccctttctgccccctgcctaccctccttctcctctgggcctctgataggcggcctcgtccttcagcctcagcatcgctgcctcactggaagagccccacctgggcatgcccagcagcccctcccagctgtaagtccacacagcccccatcaatgtgccatctggggcaggccgaggaccggccctggctgccctcactgatggctggagccccgatgctagctacaatggctggcttgagtggacttctgtcacagaggcaaatgcccacagggcacctcttggggcaggcagggagcttgtatgtgccatctggggccaaagctccacgattgagtcataagttaagggtagatggagattttccgccttgagcagaaacgtggaggaaacacgcctggtgtgtgactcacgcctgtaatcccagcactttgggaagccgaggtgggcggatcacctgaggtcaggaggtcaaaaccaacttggtcaacatggtgaaactctgtctctactaaaaacacaaaattagatggctgggtggtgcacgcctgtaatcccagctgacggctggagccccgatgctagctacaatggctggcttgagtggacttctgtcaggagaattgcttgaactcgggaggtggaagttgcagtgagccaagatcgtaccattgcgctctagtctgggcgacaagagtgaaactcctcctcaaaaaaagaaaataagagaaaagagaagagaagaggaaaaagaaaagaagaaaagaaacaacccttgcagttccccggccactccccagagccagttaggccaccaggtgggctggggctagacccggctgcgggcgggccacagagggactaatggccaccacttctctccatcctgcaggcagctgccagacccggccatcgaggaccagggtggggagtacgtgcagcccatgctgagcaagtacgcggctgtgtgcgtgcgctgccctggctacggcaccaggtattgcagcaccgtgggtgcgccacctcctatcccatgtcccacctcccacgctagagggccggcaaagaagccaagtgcccatagccagagccaggcttcttcctcgcctgagtggattccagagcttctgccctgtccagacgcagctgcagggtgagcagataccacaggctcccggggccccacaggctgggcttaaggagccagtacacagccacacagggccaggatggcttcagggctgcctgcacattggtggatccctgcgggcaaacgccccggcaccatggcactaggcctgcaggctgtacccttgggtggtggctgctggccagcctttcctgcctggggctggctggcccattggcaggtgcagggtgtcatttccttcagcccctcctctgtcataggctcatcttcctgtgtgtgaggggaaggcaagtgccaactccactccctggcaggccgcatagccgctgggtcccaccccacggggtgcactgcgtatgtgtctgccctgggaaccagcctgtgctggggctgttgggggatccagggccaccctccgtctgcaaagcccacggcagagagggttggaggagaggagagtgtgctgaatgtttgcttcaggtgggctggcatggcctgggcagtggaagagagggcacaggagggaagccttccagacagaggaggcctgggccccaagtggtcaacagcttgacctcttggaagaaccaagcatggctgtgtctgggaacctgggcctccaaaggggaagtgtgtggtcagcccgcaggctgccctatgccttggctcatgctacacggggagagcagggcagggtggggtggttcccagtgaaggtggcaggactcagcaagtgtgggcctgtggagccagccaagagctcacacgccactgatggcccctcatcatccccaagactgaggctgctgctctctgtgacttggcacagcctccaggcatggggttcctaactctacctgcctgcattcttgccctatttgtggctgtgacaggcagggcagggctgagggacaccaggtgaacgagggcccctgctctctttcagaaccaacactatcatcctggtagatgcggacggccacgtgaccttcactgagcgtagcatgatggacaaggacctctcccactgggagaccagaacctatgagttcacactgcagagctaaccccacctctgggcctggccagtgggctcctggggggccctgccttgaggggcactgtggacaggaaaccttcctttgccatactgcattgcactgcccgtggcttggccagcatcccccggatcagggccctgtggtttgcgtgttacccatctgtgtccccatgcccagttcagggtctgcctttatgccagtgaggagcagcagagtctgatactaggtctaggaccggccgaggtataccatgaacatgtggatacacctgagcccactcttgcacatgtacacaggcactcacatggcacacacatacactcctgcgtgtgcacaagcacacacatgcaagccatatacatggacaccgacacaggcacatgtacgtgcacaggtgtgctacacatgtgcacacatgcacagttgcacagacacacacacacaggtgcacacacacgatgccgaacaaggcagaagggcgactctcacctctcatgtgcttctggccagtaggtctttgttctggtccaacgacaggagtaggcttgtatttaaaagcggcccctcctctcctgtggccacagaacacaggcgtgcttggactcttgacaagcagacctgctcctgcagaggagacagccacatttggaattgggcaccgagaagacctgagaaaaacccactctctcttttttttttttttgagacggagtcttgctctgtcacccaggctggagtgcagtggcacgatctcggctcactgcaacctccgcctcccaagttcaagcaattctcctgccccagcctcctgattagctgggattacaggcgtgtgccaccatgcccagctaatttttgtgtttttagtagagacggggtttcaccatgttggtcaggctggtcttgaactcctgacgtggtgatccacctgcctcggcctcccaaagtgctgggattacaggcgtgagccaccacgcctggccgaaaaacccactctcataacagaagtgcagactcattgctagattcagtgcccttgagtgtgccagaggtcctctgtgtttgagacaatcctgtgtgtgccaggaggctccgtgtgcaccaggggctctcagaatcccgcttacccagctggagaccatgcctctggcagccccatctcagccagccctgctctctccctcttccctccaggtgaggcaaacttcataggaatctgtacctgaatgtgagctcctgataataaaactctgaggctttggtgagcgcatttcgaggcctttcccttgtatgcagggtgccagtgggagctgctatgtctcctgtgcagccagacaccctggacgaggcccttcccacctccccctttcctcacggcttcttcagcaccacatgtggatgcctgtgggtcagtccatctgtccatgggcaggggccgctgtgagagaccccatgcgcgtgggatgtggtagatgctgattatggggccagccacccatacaggtctatcaggtcgcaatggaggccccactggagcgggaggcaggctggcctggacttctgttggatgatgggggccaggggatggtaggaggggcaggagagcaggtctgcatctgtctcagccccaggagctcctggtttggggccagctctaaggagcttcatccctgagcctggccgagtataagggggtcccggatatccaatgctgagacctagacttttctaagcctctgcacccaacccctaacttggccttttcagacccatgagagtgcagggtgggtgtggacctgcgccagggcttcccagcctgattgtgacatgatgtgagtccacctagggaggagcaggggcctccccgtctcttccccttcttgcccagaccactttgctgggctcagagccttccatggctcactttgaactcagaagagtttcccagctgcgacccaggctgcacccccaggcctgaggagaaactgaggccccacatcccatacgtgtcctctgagtcaggacaacaggctcccggctgggg

SEQ ID NO: 1648 - DNA, 334 bp, Homo sapiens
gtgtcttggtctccctggtgcatcatttggggtgcttggctcccatcaagcccacccctgctgccctggcctctagagaagagcctctgaggtgaggtgcttctccacctcaagtccctgcccttcactttctgtgacatgagaaacccttttcctgttggccatgccttctgccaacactctgggagcttgttcagagtctgtgcagagccccccggctctcctaacctggggcctggctggtacgcagaggtgggccatgctctgctgaggcccagcctacacctgtgcccactgtgtggcgctgttgggggttccccaaacagggacatga

SEQ ID NO: 1649 - DNA, 10759 bp, Homo sapiens
cacagcaaagggagacgtcatttgctactatgggaaccgaggggagcctgatcctatcgttttgacgccaggtgagcctgccctggcagcctgatggggtgggggactgtttctatgcagaggtcacccttgtgctttttagagaccaggcacttgtcatattactcttctgagatgactttgtggccatttaagtgccttatggtctgtgggcaccttgccctgcacctggacacttcagagagccctggctccctgctcaccccctccccatgggcttttcctgctgagcaaggtgcgcccctgttctgggcttcccaccgcagccctgcagcccagccggccacccccagcctcacttcctgtgccgtcccagtgtgccctgtgcctgttccttctcagaacctctggagccatcaccacctggggttcttgcctggtctgctccctgacgcacaagtacacaccccactcaagccccacacagatgcacgcctcctgcacccagtccccagtctgatccccggtccccatcctcagggcctcgagcccctctgcgccaggtcacactccacggctgggcccttcctgccctggctctgcaccactgcccaggctgtgcctcctgctacatgcccttcctttccccctcctcgggtgctgcgatttcctggaagcttcctctgccagtgccccaacctggagagaatgtgtcacattgcccccctctgcagccatgttctgggagggaggtctgcatcttgtcccaggtctggtgccaggacaaagcagcactcctgggaaatggcatttcccctgggtgcacaaaactgtagggaccatagcctaggttccggggactgctggctcactcactcccacactcgctgcccacagacactcctcgctggtggcatcgtggaactctgtgccttaaacgcccgctctggtccctctactcaagctgctggctcacacagggtgttccggcgcctggggagtgtgtcagtgcccttagcgccacccacacccctctgtgagggggctccctcacacccctggctcctctgaagctccatgcccacgtcacacagactttcttttgcatttggcacaaatcaccaagtgaggttgcaggtcacaggtgcacaccttcccactgggtgtacacggtggaactgaagccccaggcgtccctggaggggcccgagggagatgataagcagtccccaggacagctgagtggccccatcccacctgcatcttagggggctggtggtgctgacgggctcatcatgagtcctgtggtccttgcctggcccacactggagctggcttccagcttcccacgtctgcccagtgatgtttcatccacagataggcccagcccccatttgctagggtggtgcccagacccgaacccctgggctagttgggatctccagaggaggcatctgcctggagggtggcttccagtgtgtcccacccactgcccccacgcctaccagctggtgccctctcctccacctggggcttatccttccggccaccctctgtgaccctggtcttcccctccctaccttggatacaactgtgggcagcccacctgagctcccaagagctgggcagtggcacagacacagagactaccagcgaggcagggatgtggccccagaaggtcctgagcttgcaaaggattgttctggctgtctcagccagctcttgctgttccacctgccccagaacctccgcatcagttgagggtcgtggggttggaatgtgtggcgaagtaggtctgtggcagtggagttgggccatgctgagcctgtgactgcccaggagagaattggaaactaaaaggtgcaaaagcagtcagagactccctaccaccccctcactgtgaacattggcccagcggcctctggggcagtcgctgtaaccatccgcgtggcaccctcggttctcagaggctgagacctccgtggctggagatgcttattttctgctcagttgttgttctgtagaacttatttctgtctacatcctgcctcatccctgagcctgccccacctggtccacattgcctttattttttttgataaagttttattgagatatgactgactagcggcacagttcacccatttaaagtgtatcattcagtaggtttcgtttcattcacagagttgagcaactgtcatcactacctaattccaggacatttcttgatccccaaagaaagccatacctgtcagcagccactccccattccccgtctcttcagcgcctgcaacctttaatctgctttctgtctctggatttgcctattctggacactttgtataaagggaatcctataatatgtagtttaggggactgacttttttcacttagtgttgtcgtctaaaaactcaccagtggcgaggcacggtggctgacgcctgtaatcctagcactttaggaggccaaggcgggcagatcacgaggtcaggagatcgagaccatcctggctaacacggtgagaccccatctctactaaaaatacaaaaaattagccgggcgtgttggcaggtgcctatagtcccagctacttgggaggctgaggcgggagaatggcgtgaacacaggaggcggagcttgcagtgagctgagatcgcgccactgtactccagcctgggcgacagagtgagattgcatctcaaaaaaaaaaaaacaaagaaaaactcaccagcatggctaaatgatagaaaggagagttttatttgccatatcagtttgcagacccggaagagagagtctctagcatggactgaggtgctctctttgaagaggggaagggcagtttgagttttatgcctcccaaggtccatatcacacaatagagtcatacatattcagcaggtttggggaaaagccatacatatttatgaggggacccgagaacatatgcaatagataaacatacatgtaacatacatcccatgttcactttggggcagggttttagcattaaaatgaggtagaatctggatctttccatcagaaggtgagctctaggacacagttggagtgcagcctctatgaactgctgaaactggcttatggtctgtagttgcttatcagaaaagagtgtttgaaggctggttctctgtccagtcagggttgtggtggtctgggctgtcaagagttaggagggtctgataacgtgtgtgatctctactattgtgagggagtttatcaagactgtggtttttcttgtagctgtaggaatttagggagttgctgagacagctgccctgaaccctcgagccagttggtactttttgtttcttccctttatccattaatggacacttgagttttttccaccttttggctgttggaaacagtgctgctcacagtgtgacctcacagcatttgtgtggtcatatgtttttatggctctcatgtgaatacgtaggaatggagttgttaagtcgtatggtaaccctgtttaaccttttgaggaacatccaaactgtttgccaaagcagccgcagcattatacattcccaccagcagtgtatgcgggttgcagcttctctgaatcctcaccaaaacttgctatgttctgtgtttttgatgatagccacgatagtgggtgtgaagttgtgtggactcgtggtttggtttgcgtttctctgatggctatgatgttgagcagctattctcatgctcgttggccatttgtatgtcttctttggagaaatggttattcagactgggttgtctttttgagttataggagtgacttatacattcattctagctacaagtctcttatttaaagcacaaagcttaaaatttttaagtcctatgtctctctctttttttttcttttgttgctcatgcttttggtttcttatctaagaaaccattgcctaatctaaggtcatgaagctttccccaatactttcttcttagagttttatagcttttgctctttcacttaggtctttggtttgacttaagttaactatttttttttttttgagacagggtctggctctgtcacccaggctggagtgcagtggtgcagtcatggcccactgcactgtcaacctcctgggcttaagagatcctcccagccgggcgcggtggctcacgcctgtaatcccagcactttgggaggccaaggcgggtggatcacaaggtcaggagatcgagaccatcctggctaaaccggtgaaaccccgtctctactaaaaatacaaaaaattatccaggcgtggtggcgggtgcctgtagtcccagctacgtgggaggctgagacaggagaatggcgtgaacccgggaggtggagcttgcagtgagccgagattgcgccaccgcactccagcctgggcgacagagtaagactccgtctcaaaaaaaaaaaaaaaaaaaaagagatcctccctcccaagtagctgggactgcagatgtgtgccaccatgttcagctaacttttatgttttgtagagataaggcctcactattttgctattttgccgaggctggtcttgaactcctgggctccagtgatcctcctgccccagcctcccgatgtgctgggattataggagtgagccacctctcttgacctgagttaacttttgtgtatggtgtcaggtagagtccaactcccttctttgcccatgactatgcagttcaatggtcttccatgttgttcatgatggaaaaagcactgtgacacctggggctggcggcttggctctgggggccccagcagagccaggctgtctccctgggaaatgcctcggccaagatattctcctggaagtctgacagggagagggtggtgtcttggtctccctggtgcatcatttggggtgcttggctcccatcaagcccacccctgctgccctggcctctagagaagagcctctgaggtgaggtgcttctccacctcaagtccctgcccttcactttctgtgacatgagaaacccttttcctgttggccatgccttctgccaacactctgggagcttgttcagagtctgtgcagagccccccggctctcctaacctggggcctggctggtacgcagaggtgggccatgctctgctgaggcccagcctacacctgtgcccactgtgtggcgctgttgggggttccccaaacagggacatgattgtggtgggtgcctcctggcctctggtggctaattctcccactcttgaacttctcaggtggccccccaacctggcgtgaggtgaagaggttccctcttggctgtcccctttgcctgtgagatctcaggttgctcatttcttattcatccatccatcgaggctgctgggcatctgtgccttgtggtctcctgtgggtgcccgcttccgcctactgctgagttctcctctccttgccatgccatcaggtcaggaatgagcatggggaaggagctggagcatggagcggcttggcctcagtctggcctgatttcatggtccccagctgtaccccgtgttaggtgggtggcaggtggcaatttgccctgacatggcacagcagggcctctgcatggcccgctgattgctcctcacaggcacctacgggctgagcaacgcgctgctggagactccctggaggaagctgtgctttgggaagcagctcttcctggaggctgtggaacggagccaggcgctgcccaaggatgtgctcatcgccagcctcctggatgtgctcaacaatgaagaggcgtgagtgggcgggtcctgctggggtgagccccagtgtcccgccaccagggcagagggaaaggcaggccctgctgccccgggaggcccatggaagtggccaggctgggtccccagctgcagggaagctgatggacatcctgtcctccctgcctgtccccttgagccagctgaggtttccaacaccagggacttttgatgacagaagatgggcccaggcccaggcccaggcccaggggaggctcagtgcgcccagaggcttgatgcagccacgtggggcccagagcagatggatgctcccctctgcatgccgagagcttgtgggaagttccagaagattctagacactcagcaaacccaggcggaagagacacatcatggaaatgagtggctagggtcagcacgctcagggttgatgggcttcccgcaagcggtctgtccccagcgaccctgggctgagtgctgggcagggacttgcagttccgggaactgcctgggtgtaggagctcccacccacttccttgcccgtaggcctcaaggcccctcaggggccaggcactggggtcttcgttgccccagccgggggtcctggtgcttgccatgccagcctttctcccactgggcgagatgccccacccatccctcgctccccacccaggtcagaccactgccctgcccaggtgatccagcgtccactcccaccctgtccagcttgcccccttcagagaagcccccatggaccatctcccactcctccccctggggcccctttctgccccctgcctaccctccttctcctctgggcctctgataggcggcctcgtccttcagcctcagcatcgctgcctcactggaagagccccacctgggcatgcccagcagcccctcccagctgtaagtccacacagcccccatcaatgtgccatctggggcaggccgaggaccggccctggctgccctcactgatggctggagccccgatgctagctacaatggctggcttgagtggacttctgtcacagaggcaaatgcccacagggcacctcttggggcaggcagggagcttgtatgtgccatctggggccaaagctccacgattgagtcataagttaagggtagatggagattttccgccttgagcagaaacgtggaggaaacacgcctggtgtgtgactcacgcctgtaatcccagcacttcgggaagccgaggtgggcggatcacctgaggtcaggaggtcaaaaccaacttggtcaacatggtgaaactctgtctctactaaaaacacaaaattagatggctgggtggtgcacgcctgtaatcccagctgacggctggagccccgatgctagctacaatggctggcttgagtggacttctgtcaggagaattgcttgaactcgggaggtggaagttgcagtgagccaagatcgtaccattgcgctctagtctgggcgacaagagtgaaactcctcctcaaaaaaagaaaataagagaaaagagaagagaagaggaaaaagaaaagaagaaaagaaacaacccttgcagttccccggccactccccagagccagttaggccaccaggtgggctggggctagacccggctgcgggcgggccacagagggactaatggccaccacttctctccatcctgcaggcagctgccagacccggccatcgaggaccagggtggggagtacgtgcagcccatgctgagcaagtacgcggctgtgtgcgtgcgctgccctggctacggcaccaggtattgcagcaccgtgggtgcgccacctcctatcccatgtcccacctcccacgctagagggccggcaaagaagccaagtgcccatagccagagccaggcttcttcctcgcctgagtggattccagagcttctgccctgtccagacgcagctgcagggtgagcagataccacaggctcccggggccccacaggctgggcttaaggagccagtacacagccacacagggccaggatggcttcagggctgcctgcacattggtggatccctgcgggcaaacgccccggcaccatggcactaggcctgcaggctgtacccttgggtggtggctgctggccagcctttcctgcctggggctggctggcccattggcaggtgcagggtgtcatttccttcagcccctcctctgtcataggctcatcttcctgtgtgtgaggggaaggcaagtgccaactccactccctggcaggccgcatagccgctgggtcccaccccacggggtacactgcgtatgtgtctgccctgggaaccagcctgtgctggggctgttgggggatccagggccaccctccgtctgcaaagcccacggcagagagggttggaggagaggagagtgtgctgaatgtttgcttcaggtgggctggcatggcctgggcagtggaagagagggcacaggagggaagccttccagacagaggaggcctgggccccaagtggtcaacagcttgacctcttggaagaaccaagcatggctgtgtctgggaacctgggcctccaaaggggaagtgtgtggtcagcccgcaggctgccctatgccttggctcatgctacacggggagagcagggcagggtggggtggttcccagtgaaggtggcaggactcagcaagtgtgggcctgtggagccagccaagagctcacacgccactgatggcccctcatcatccccaagactgaggctgctgctctctgtgacttggcacagcctccaggcatggggttcctaactctacctgcctgcattcttgccctatttgtggctgtgacaggcagggcagggctgagggacaccaggtgaacgagggcccctgctctctttcagaaccaacactatcatcctggtagatgcggacggccacgtgaccttcactgagcgtagcatgatggacaaggacctctcccactgggagaccagaacctatgagttcacactgcagagctaaccccacctctgggcctggccagtgggctcctggggggccctgccttgaggggcactgtggacaggaaaccttcctttgccatactgcattgcactgcccgtggcttggccagcatcccccggatcagggccctgtggtttgcgtgttacccatctgtgtccccatgcccagttcagggtctgcctttatgccagtgaggagcagcagagtctgatactaggtctaggaccggccgaggtataccatgaacatgtggatacacctgagcccactcttgcacatgtacacaggcactcacatggcacacacatacactcctgcgtgtgcacaagcacacacatgcaaggcatatacatggacaccgacacaggcacatgtacatgcacaggtgtgctacacatgtgcacacatgcacagttgcacagacacacacacacaggtgcacacacacgatgccgaacaaggcagaagggcgactctcacctctcatgtgcttctggccagtaggtctttgttctggtccaacgacaggagtaggcttgtatttaaaagcggcccctcctctcctgtggccacagaacacaggcgtgcttggatttttgacaagcagacctgctcctgcagaggagacagccacatttggaattgggcaccgagaagacctgagaaaaacccactctctcttttttttttttttgagacggagtcttgctctgtcacccaggctggagtgcagtggcacgatctcggctcactgcaacctccgcctcccaagttcaagcaattctcctgccccagcctcctgattagctgggattacaggcgtgtgccaccatgcccagctaatttttgtgtttttagtagagacggggtttcaccatgttggtcaggctggtcttgaactcctgacgtggtgatccacctgcctcggcctcccaaagtgctgggattacaggcgtgagccaccacgcctggccgaaaaacccactctcataacagaagtgcagactcattgctagattcagtgcccttgagtgtgccagaggtcctctgtgtttgagacaatcctgtgtgtgccaggaggctccgtgtgcaccaggggctctcagaatcccgcttacccagctggagaccatgcctctggcagccccatctcagccagccctgctctctccctcttccctccaggtgaggcaaacttcataggaatctgtacctgaatgtgagctcctgataataaaactctgaggctttggtgagcgcatttcgaggcctttcccttgtatgcagggtgccagtgggagctgctatgtctcctgtgcagccagacaccctggacgaggcccttcccacctccccctttcctcacggcttcttcagcaccacatgtggatgcctgtgggtcagtccatctgtccatgggcaggggccgctgtgagagaccccatgcgcgtgggatgtggtagatgctgattatggggccagccacccatacaggtctatcaggtcgcaatggaggccccactggagcgggaggcaggctggcctggacttctgttggatgatgggggccaggggatggtaggaggggcaggagagcaggtctgcatctgtctcagccccaggagctcctggtttggggccagctctaaggagcttcatccctgagcctggccgagtataagggggtcccggatatccaatgctgagacctagacttttctaagcctctgcacccaacccctaacttggccttttcagacccatgagagtgcagggtgggtgtggacctgcgccagggcttcccagcctgattgtgacatgatgtgagtccacctagggaggagcaggggcctccccgtctcttccccttcttgcccagaccactttgctgggctcagagccttccatggctcactttgaactcagaagagtttcccagctgcgacccaggctgcacccccaggcctgaggagaaactgaggccccacatcccatacgtgtcctctgagtcaggacaacaggctcccggctgggg

SEQ ID NO: 1650 - DNA, 10758 bp, Homo sapiens
cacagcaaagggagacgtcatttgctactatgggaaccgaggggagcctgatcctatcgttttgacgccaggtgagcctgccctggcagcctgatggggtgggggactgtttctatgcagaggtcacccttgtgctttttagagaccaggcacttgtcatattactcttctgagatgactttgtggccatttaagtgccttatggtctgtgggcaccttgccctgcacctggacacttcagagagccctggctccctgctcaccccctccccatgggcttttcctgctgagcaaggtgcgcccctgttctgggcttcccaccgcagccctgcagcccagccggccacccccagcctcacttcctgtgccgtcccagtgtgccctgtgcctgttccttctcagaacctctggagccatcaccacctggggttcttgcctggtctgctccctgacgcacaagtacacaccccactcaagccccacacagatgcacgcctcctgcacccagtccccagtctgatccccggtccccatcctcagggcctcgagcccctctgcgccaggtcacactccacggctgggcccttcctgccctggctctgcaccactgcccaggctgtgcctcctgctacatgcccttcctttccccctcctcgggtgctgcgatttcctggaagcttcctctgccagtgccccaacctggagagaatgtgtcacattgcccccctctgcagccatgttctgggagggaggtctgcatcttgtcccaggtctggtgccaggacaaagcagcactcctgggaaatggcatttcccctgggtgcacaaaactgtagggaccatagcctaggttccggggactgctggctcactcactcccacactcgctgcccacagacactcctcgctggtggcatcgtggaactctgtgccttaaacgcccgctctggtccctctactcaagctgctggctcacacagggtgttccggcgcctggggagtgtgtcagtgcccttagcgccacccacacccctctgtgagggggctccctcacacccctggctcctctgaagctccatgcccacgtcacacagactttcttttgcatttggcacaaatcaccaagtgaggttgcaggtcacaggtgcacaccttcccactgggtgtacacggtggaactgaagccccaggcgtccctggaggggcccgagggagatgataagcagtccccaggacagctgagtggccccatcccacctgcatcttagggggctggtggtgctgacgggctcatcatgagtcctgtggtccttgcctggcccacactggagctggcttccagcttcccacgtctgcccagtgatgtttcatccacagataggcccagcccccatttgctagggtggtgcccagacccgaacccctgggctagttgggatctccagaggaggcatctgcctggagggtggcttccagtgtgtcccacccactgcccccacgcctaccagctggtgccctctcctccacctggggcttatccttccggccaccctctgtgaccctggtcttcccctccctaccttggatacaactgtgggcagcccacctgagctcccaagagctgggcagtggcacagacacagagactaccagcgaggcagggatgtggccccagaaggtcctgagcttgcaaaggattgttctggctgtctcagccagctcttgctgttccacctgccccagaacctccgcatcagttgagggtcgtggggttggaatgtgtggcgaagtaggtctgtggcagtggagttgggccatgctgagcctgtgactgcccaggagagaattggaaactaaaaggtgcaaaagcagtcagagactccctaccaccccctcactgtgaacattggcccagcggcctctggggcagtcgctgtaaccatccacgtggcatcctcggttctcagaggctgagacctccgtggctggagatgcttattttctgctcagttgttgttctgtagaacttatttctgtctacatcctgcctcatccctgagcctgccccacctggtccacattgcctttttttttttgataaagttttattgagatatgactgactagcggcacagttcacccatttaaagtgtatcattcagtaggtttcgtttcattcacagagttgagcaactgtcatcactacctaattccaggacatttcttgatccccaaagaaagccatacctgtcagcagccactccccattccccgtctcttcagcgcctgcaacctttaatctgctttctgtctctggatttgcctattctggacactttgtataaagggaatcctataatatgtagtttaggggactgacttttttcacttagtgttgtcgtctaaaaactcaccagtggcgaggcacggtggctgacgcctgtaatcctagcactttaggaggccaaggcgggcagatcacgaggtcaggagatcgagaccatcctggctaacacggtgagaccccatctctactaaaaatacaaaaaattagccgggcgtgttggcaggtgcctatagtcccagctacttgggaggctgaggcgggagaatggcgtgaacacaggaggcggagcttgcagtgagctgagatcgcgccactgtactccagcctgggcgacagagtgagattgcatctcaaaaaaaaaaaaaacaaagaaaaactcaccagcatggctaaatgatagaaaggagagttttatttgccatatcagtttgcagacccggaagagagagtctctagcatggactgaggtgctctctttgaagaggggaagggcagtttgagttttatgcctcccaaggtccatatcacacaatagagtcatacatattcagcaggtttggggaaaagccatacatatttatgaggggacccgagaacatatgcaatagataaacatacatgtaacatacatcccatgttcactttggggcagggttttagcattaaaatgaggtagaatctggatctttccatcagaaggtgagctctaggacacagttggagtgcagcctctatgaactgctgaaactggcttatggtctgtagttgcttatcagaaaagagtgtttgaaggctggttctctgtccagtcagggttgtggtggtctgggctgtcaagagttaggagggtctgataacgtgtgtgatctctactgttgtgagggagtttatcaagactgtggtttttcttgtagctgtaggaatttagggagttgctgagacagctgccctgaaccctcgagccagttggtactttttgtttcttccctttatccattaatggacacttgagttttttccaccttttggctgttggaaacagtgctgctcacagtgtgacctcacagcatttgtgtggtcatatgtttttatggctctcatgtgaatacgtaggaatggagttgttaagtcgtatggtaaccctgtttaaccttttgaggaacatccaaactgtttgccaaagcagccgcagcattatacattcccaccagcagtgtatgcgggttgcagcttctctgaatcctcaccaaaacttgctatgttctgtgtttttgatgatagccacgatagtgggtgtgaagttgtgtggactcgtggtttggtttgcgtttctctgatggctatgatgttgagcagctattctcatgctcgttggccatttgtatgtcttctttggagaaatggttattcagactgggttgtctttttgagttataggagtgacttatacattcattctagctacaagtctcttatttaaagcacaaagcttaaaatttttaagtcctatgtctctctctttttttttcttttgttgctcatgcttttggtttcttatctaagaaaccattgcctaatctaaggtcatgaagctttccccaatactttcttcttagagttttatagcttttgctctttcacttaggtctttggtttgacttaagttaactatttttttttttttgagacagggtctggctctgtcacccaggctggagtgcagtggtgcagtcatggcccactgcactgtcaacctcctgggcttaagagatcctcccagccgggcgcggtggctcacgcctgtaatcccagcactttgggaggccaaggcgggtggatcacaaggtcaggagatcgagaccatcctggctaaaccggtgaaaccccgtctctactaaaaatacaaaaaattatccaggcgtggtggcgggtgcctgtagtcccagctacgtgggaggctgagacaggagaatggcgtgaacccgggaggtggagcttgcagtgagccgagattgcgccaccgcactccagcctgggcgacagagtaagactccgtctcaaaaaaaaaaaaaaaaaaaagagatcctccctcccaagtagctgggactgcagatgtgtgccaccatgttcagctaacttttatgttttgtagagataaggcctcactattttgctattttgccgaggctggtcttgaactcctgggctccagtgatcctcctgccccagcctcccgatgtgctgggattataggagtgagccacctctcttgacctgagttaacttttgtgtatggtgtcaggtagagtccaactcccttctttgcccatgactatgcagttcaatggtcttccatgttgttcatgatggaaaaagcactgtgacacctggggctggcggcttggctctgggggccccagcagagccaggctgtctccctgggaaatgcctcggccaagatattctcctggaagtctgacagggagagggtggtgtcttggtctccctggtgcatcatttggggtgcttggctcccatcaagcccacccctgctgccctggcctctagagaagagcctctgaggtgaggtgcttctccacctcaagtccctgcccttcactttctgtgacatgagaaacccttttcctgttggccatgccttctgccaacactctgggagcttgttcagagtctgtgcagagccccccggctctcctaacctggggcctggctggtacgcagaggtgggccatgctctgctgaggcccagcctacacctgtgcccactgtgtggcgctgttgggggttccccaaacagggacatgattgtggtgggtgcctcctggcctctggtggctaattctcccactcttgaacttctcaggtggccccccaacctggcgtgaggtgaagaggttccctcttggctgtcccctttgcctgtgagatctcaggttgctcatttcttattcatccatccatcgaggctgctgggcatctgtgccttgtggtctcctgtgggtgcccgcttccgcctactgctgagttctcctctccttgccatgccatcaggtcaggaatgagcatggggaaggagctggagcatggagcggcttggcctcagtctggcctgatttcatggtccccagctgtaccccgtgttaggtgggtggcaggtggcaatttgccctgacatggcacagcagggcctctgcatggcccgctgattgctcctcacaggcacctacgggctgagcaacgcgctgctggagactccctggaggaagctgtgctttgggaagcagctcttcctggaggctgtggaacggagccaggcgctgcccaaggatgtgctcatcgccagcctcctggatgtgctcaacaatgaagaggcgtgagtgggcgggtcctgctggggtgagccccagtgtcccgccaccagggcagagggaaaggcaggccctgctgccccgggaggcccatggaagtggccaggctgggtccccagctgcagggaagctgatggatatcctgtcctccctgcctgtccccttgagccagctgaggtttccaacaccagggacttttgatgacagaagatgggcccaggcccaggcccaggcccaggggaggctcagtgcacccagaggcttgatgcagccacgtggggcccagagcagatggatgctcccctctgcatgccgagagcttgtgggaagttccagaagattctagacactcagcaaacccaggcggaagagacacatcatggaaatgagtggctagggtcagcacgctcagggttgatgggcttcccgcaagcggtctgtccccagcgaccctgggctgagtgctgggcagggacttgcagttccgggaactgcctgggtgtaggagctcccacccacttccttgcccgtaggcctcaaggcccctcaggggccaggcactggggtcttcgttgccccagccgggggtcctggtgcttgccatgccagcctttctcccactgggcgagatgccccacccatccctcgctccccacccaggtcagaccactgccctgcccaggtgatccagcgtccactcccaccctgtccagcttgcccccttcagagaagcacccatggaccatctcccactcctccccctggggcccctttctgccccctgcctaccctccttctcctctgggcctctgataggcggcctcgtccttcagcctcagcatcgctgcctcactggaagagccccacctgggcatgcccagcagcccctcccagctgtaagtccacacagcccccatcaatgtgccatctggggcaggccgaggaccggccctggctgccctcactgatggctggagccccgatgctagctacaatggctggcttgagtggacttctgtcacagaggcaaatgcccacagggcacctcttggggcaggcagggagcttgtatgtgccatctggggccaaagctccacgattgagtcataagttaagggtagatggagattttccgccttgagcagaaacgtggaggaaacacgcctggtgtgtgactcacgcctgtaatcccagcactttgggaagccgaggtgggcggatcacctgaggtcaggaggtcaaaaccaacttggtcaacatggtgaaactctgtctctactaaaaacacaaaattagatggctgggtggtgcacgcctgtaatcccagctgacggctggagccccgatgctagctacaatggctggcttgagtggacttctgtcaggagaattgcttgaactcgggaggtggaagttgcagtgagccaagatcgtaccattgcgctctagtctgggcgacaagagtgaaactcctcctcaaaaaaagaaaataagagaaaagagaagagaagaggaaaaagaaaagaagaaaagaaacaacccttgcagttccccggccactccccagagccagttaggccaccaggtgggctggggctagacccggctgcgggcgggccacagagggactaatggccaccacttctctccatcctgcaggcagctgccagacccggccatcgaggaccagggtggggagtacgtgcagcccatgctgagcaagtacgcggctgtgtgcgtgcgctgccctggctacggcaccaggtattgcagcaccgtgggtgcgccacctcctatcccatgtcccacctcccacgctagagggccggcaaagaagccaagtgcccatagccagagccaggcttcttcctcgcctgagtggattccagagcttctgccctgtccagacgcagctgcagggtgagcagataccacaggctcccggggccccacaggctgggcttaaggagccagtacacagccacacagggccaggatggcttcagggctgcctgcacattggtggatccctgcgggcaaacgccccggcaccatggcactaggcctgcaggctgtacccttgggtggtggctgctggccagcctttcctgcctggggctggctggcccattggcaggtgcagggtgtcatttccttcagcccctcctctgtcataggctcatcttcctgtgtgtgaggggaaggcaagtgccaactccactccctggcaggccgcatagccgctgggtcccaccccacggggtgcactgcgtatgtgtctgccctgggaaccagcctgtgctggggctgttgggggatccagggccaccctccgtctgcaaagcccacggcagagagggttggaggagaggagagtgtgctgaatgtttgcttcaggtgggctggcatggcctgggcagtggaagagagggcacaggagggaagccttccagacagaggaggcctgggccccaagtggtcaacagcttgacctcttggaagaaccaagcatggctgtgtctgggaacctgggcctccaaaggggaagtgtgtggtcagcccgcaggctgccctatgccttggctcatgctacacggggagagcagggcagggtggggtggttcccagtgaaggtggcaggactcagcaagtgtgggcctgtggagccagccaagagctcacacgccactgatggcccctcatcatccccaagactgaggctgctgctctctgtgacttggcacagcctccaggcatggggttcctaactctacctgcctgcattcttgccctatttgtggctgtgacaggcagggcagggctgagggacaccaggtgaacgagggcccctgctctctttcagaaccaacactatcatcctggtagatgcggacggccacgtgaccttcactgagcgtagcatgatggacaaggacctctcccactgggagaccagaacctatgagttcacactgcagagctaaccccacctctgggcctggccagtgggctcctggggggccctgccttgaggggcactgtggacaggaaaccttcctttgccatactgcattgcactgcccgtggcttggccagcatcccccggatcagggccctgtggtttgcgtgttacccatctgtgtccccatgcccagttcagggtctgcctttatgccagtgaggagcagcagagtctgatactaggtctaggaccggccgaggtataccatgaacatgtggatacacctgagcccactcttgcacatgtacacaggcactcacatggcacacacatacactcctgcgtgtgcacaagcacacacatgcaagccatatacatggacaccgacacaggcacatgtacgtgcacaggtgtgctacacatgtgcacacatgcacagttgcacagacacacacacacaggtgcacacacacgatgccgaacaaggcagaagggcgactctcacctctcatgtgcttctggccagtaggtctttgttctggtccaacgacaggagtaggcttgtatttaaaagcggcccctcctctcctgtggccacagaacacaggcgtgcttggactcttgacaagcagacctgctcctgcagaggagacagccacatttggaattgggcaccgagaagacctgagaaaaacccactctctcttttttttttttttgagacggagtcttgctctgtcacccaggctggagtgcagtggcacgatctcggctcactgcaacctccgcctcccaagttcaagcaattctcctgccccagcctcctgattagctgggattacaggcgtgtgccaccatgcccagctaatttttgtgtttttagtagagacggggtttcaccatgttggtcaggctggtcttgaactcctgacgtggtgatccacctgcctcggcctcccaaagtgctgggattacaggcgtgagccaccacgcctggccgaaaaacccactctcataacagaagtgcagactcattgctagattcagtgcccttgagtgtgccagaggtcctctgtgtttgagacaatcctgtgtgtgccaggaggctccgtgtgcaccaggggctctcagaatcccgcttacccagctggagaccatgcctctggcagccccatctcagccagccctgctctctccctcttccctccaggtgaggcaaacttcataggaatctgtacctgaatgtgagctcctgataataaaactctgaggctttggtgagcgcatttcgaggcctttcccttgtatgcagggtgccagtgggagctgctatgtctcctgtgcagccagacaccctggacgaggcccttcccacctccccctttcctcacggcttcttcagcaccacatgtggatgcctgtgggtcagtccatctgtccatgggcaggggccgctgtgagagaccccatgcgcgtgggatgtggtagatgctgattatggggccagccacccatacaggtctatcaggtcgcaatggaggccccactggagcgggaggcaggctggcctggacttctgttggatgatgggggccaggggatggtaggaggggcaggagagcaggtctgcatctgtctcagccccaggagctcctggtttggggccagctctaaggagcttcatccctgagcctggccgagtataagggggtcccggatatccaatgctgagacctagacttttctaagcctctgcacccaacccctaacttggccttttcagacccatgagagtgcagggtgggtgtggacctgcgccagggcttcccagcctgattgtgacatgatgtgagtccacctagggaggagcaggggcctccccgtctcttccccttcttgcccagaccactttgctgggctcagagccttccatggctcactttgaactcagaagagtttcccagctgcgacccaggctgcacccccaggcctgaggagaaactgaggccccacatcccatacgtgtcctctgagtcaggacaacaggctcccggctgggg

SEQ ID NO: 1651 - DNA, 1172 bp, Homo sapiens
gccctgccctcatgaagagccccccggatgttcacctctgcccagagacccggcctgcccaggaagagcagtctctgctcttgtgtgggtccctctgcccccaccctgcccagggctccccagcagcctgaggcccctaaggaagaacagccctcaatggtgattctattggtgttatgagttgtgtccccaaagagatatatcagtgtcctgacccacagtacctcagaatgtgactgcatttggagatagggttcttccaggggtaaccaaggtagaatgaggtcgttagtgtgggccctaatccaatatgacggctatccttataaaaagaggaacatttaggctggatacagtggctcatgcctataatcccagcaccttgggaggctgaggcaggaggactgcttgagctcaggagttcaagaccagcctggggcaacatgtcgaaacgctgtgtctaccaaaaaaaaaaaaaaaaaatacaaaaattagctggccattgtgactcacacctgtagtgcgaggctgaggtgggagaatcgcttgaacccaggaggcagaggttgcagtgagccaagattgcactactgcactctgcctgggcaacagagggagactctgtctcaaaaaaacaaaaaaggaagatttgggctgggcgcagcggctcacattgtaatcccagccctttgggaggccaaagctggaggactgcttgagcccagattagcctgggcaacatagcaagaccccatctctaaagaaaaatgaaaattaaaaaattagcagggcatggtggtacacacctgtagtcccagctacttgggaggctgaggtaggaggatcacttgagctcaggaggtggaggctgcagtgagccgtgattgcaccactgcacttcagcctggatgatggagaaaaaccctgtctcttaaaaaaaaaaaaaaaggaaaaagaaagatttggacacggacggatacgcgcacaggaagaacaccgtgtaaagactggaattctgctccacgagccaaggcatcaccagaagctgggagaggggcctgcttcagagcctctcttagagccttcagagggagcagacctgctgtcactctgatcatggacttccagcatccagagctgtgtgacaataaatgtctgttatcttaagtggt

SEQ ID NO: 1652 - DNA, 1175 bp, Homo sapiens
gccctgccctcatgaagagccccccggatgttcacctctgcccagagacccggcctgcccaggaagagcagtctctgctcttgtgtgggtccctctgcccccaccctgcccagggctccccagcagcctgaggcccctaaggaagaacagccctcaatggtgattctattggtgttatgagttgtgtccccaaagagatatatcagtgtcctgacccacagtacctcagaatgtgactgcatttggagatagggttcttccaggggtaaccaaggtagaatgaggtcgttagtgtgggccctaatccaatatgacggctatccttataaaaagaggaacatttaggctggatacagtggctcatgcctataatcccagcaccttgggaggctgaggcaggaggactgcttgagctcaggagttcaagaccagcctggggcaacatgtcgaaacgctgtgtctaccaaaaaaaaaaaaaaaaaaaatacaaaaattagctggccattgtgactcacacctgtagtgcgaggctgaggtgggagaatcgcttgaacccaggaggcagaggttgcagtgagccaagattgcactactgcactctgcctgggcaacagagggagactctgtctcaaaaaaacaaaaaaggaagatttgggctgggcgcagcggctcacattgtaatcccagccctttgggaggccaaagctggaggactgcttgagcccagattagcctgggcaacatagcaagaccccatctctaaagaaaaattaaaattaaaaaattagcggggcatggtggtacacacctgtagtcccagctacttgggaggctgaggtaggaggatcacttgagctcaggaggtggaggctgcagtgagccgtgattgcaccactgcacttcagcctggatgatggagaaaaaccctgtctcttaaaaaaaaaaaaaaaaggaaaaagaaagatttggacacggacggatacgcgcacaggaagaacaccgtgtaaagactggaattctgctccacgagccaaggcatcaccagaagctgggagaggggcctgcttcagagcctctcttagagccttcagagggagcagacctgctgtcactctgatcatggacttccagcatccagagctgtgtgacaataaatgtctgttatcttaagtggt

SEQ ID NO: 1653 - DNA, 1172 bp, Homo sapiens; identical to SEQ ID NO: 1651

SEQ ID NO: 1654 - DNA, 15425 bp, Homo sapiens
ggctgctctagaggccccatagccagggcccggctctgagggccccacgggccagcttctcagggggctgtgttcttcctgggccaaggctgcgtgctcagcaggtatgttctgggcaggtggagcaggagggcatggggtgctgtgggcgggcttgaggaccattccggctctgcgtgtggccttccaggccaagggcctcactcagagcccaggccgaccaggccagagggccagcgcaaatcacagtggacacacacacacccgatacacaggcagacacactcaggtagaaagcacagatagacagacacagaagacaccaagatgggcatgcaggcacagacacagactcagaagcactggcagaccctctggggacactccagggcagagtcatgcacatacagggagacactctcaggccaacacacagatgtgcaaaaccgacgcccagaaaagtgtgtatatgcccgcgcgctcaagctcaggcatcagattcactttcctggtttccccgggaaagtgccgagtactagccatggctgggggctgagtcaggctcactccctgccttgcgggtctcctggtctccaggctctgtaactgtccctccgtcatggcaggtgtgcccagggctgggatcaggcccacagcaggaggtgccgaacatggtatgggctcagctggtccgggaaggcttcttgggggaggagccatttctgctgagccttcaatgagttgacaactgaagaaggaggggctgaggtcattgtaggcagagaggatggcctgtgcaaaggtgtggaggagaggtgggtacttctgagtgatcagagtgagggaatgagttgggactgaagccagaggggtcattaggagaggccttgaatgccaagctaaggatggagctgtgcttcttccgagggcagcagcggctcagggggcttatgctttgttgctactgtgaagggaagtcttttaagtgtctctttctaataggctttgctagggtataggaaaggtgttgcttgtatttacataatcaatgcacaaaatttactaaacccttttattagctccaataattttcagcctcagattttctaagccaacaatcatatcacctatgaataatgacagtttaatctgctccttcccagtgtttacatctcttatttatttttctttccttattgccttaactagttcttccagccaaatgttgaggagtaagaatggtgagaacaaacatccttgtcattttccttatttgcaggggctggaaggaaaaggaaagcttgcaaggaaagctttcaaaggaggtttatagggccgggcatggtggctcactcctgtaatcccagcactttgggaggctgaggcaggaggattatttgaggccagaagtttgagaccagcctgggcacacataatgagacccctgtctctacaaaaaatataaaaattagccaggcatggtgttgcgcacctgtagtcccagctacttgggacgcttaggtgggaggactgcttgagtccaggagtttgaggctgtggtgagctatgatcgcatccctgcactccagcagtgggtgaagtgacacagcgagacctcgtctctaaaaacaataaacaaaggaggttgacgttttggcaagattctttttttttttgcaattgtaagatttagtagagtgaaaacagagctcctatacaaaaggaggggacccaaagagggtagctgttgccagctcaaatgcctgggtttatatcccgatcattgtccctcccactgtgctctcaggcgatagatgattggctatttgtttacctcctgtttttgcctaattagcatttctgtgagctctctttaatacctgattggtcgggtgtgagctaagttgcaagccccatgtttaaagatggatgcagtcaccttcccagctaggcttaggcattcttagtcggactaggaaatccagctagttctgtctcagtcccccctctcaacaggaaaacccaagtgctgttggggaggttggccaacgaccgtctaagtgctaggcaagattcttatgactgatccgaggaggcagcattgagggggcctgggaaggagagcagctcggaggctgtgatcaggtgaaggtggatggcaggtggggaagtgagaggggacaagccccgcacagggcttcggcccagggcacagtacaggcagtcacctgcaagaggctcctttggagcgttgaggagtggagcgatggtccagtcccagcgtagttggggaggctggggagtgggtgagcactgcagagtgattgggaggatgaggagcagctacgggagggaaggtctaggggaaagcggggagtagaagctgaggctgggggtagggagggtggggaagttcggacttgacttctcggacacagctagggtggcccagggtgggagctctcagtgactgtgtctctgggtggtttcttgcccctgctgctggccccacaaagggtgtattagcctgacctggggagagtgggacccggggctcaggccgggcgtcagtctctggggccttgcaatcagggagcggcagcataggagccggggccccctggactctccgggcactggggacagagagacgcagagagaaaagagagccagagagagtccatgggggtgtggggaggcaggcacagggacaggccaggcgagagccttgggaggtggaggggggagttgagaggggccttcaggtctcagccccgcaggcgccagcatggcagcaggcaggccagccgggggtggcagggcgaccctgataccgatgttccgcctgcttccaggctgtgctcaggggtgaccggggtagatggacagaggctgccagcccagtgcaggagggccacatcatcacagggacagtgccgagtacccactgagcagatagatggtgacggccggtggtgcaaggcatctgaaccccgaggtcctgaaacccaagtcaggtttggagaacaaacaggggccaggaaagggaatggccggaggggaagctggaggctgggcgtgcagccgggaggacagagaagaagctgggtggggtgcaggttgtccgtgaaccccaggggaagctggtgaggtgtcatcagcgggaggtggggggtggaggaaggaggttccaggatggatgcccggctgtggggctcgggcaggagggaaccatggaagggcttaaagcaggggagtgacctggctggacttttgctttgggaaggtcgagaatagcttgggaagctgttgggagctgcagggtcgaaggtggcatggctggaggctgaggggccatctggggacctcactggcccttcagcgaagttctggtttgggacaaaagcaggctgagtgacccccaagcctctgcctatgtaacctcctaagagattcaccgcacagctgcccctccttacccggcgctcgtctgggcttcctgggagagaacctccacatctgaccccactctgggacctgctgacaccttgggtctctccgccgggaggggagcttctgggcggcagttctgagtccctgggggtggagacgtggcaggtcccgcctctgctcccagctccaagcaggctccccagcctgagtgcgcggccaggggcagactctgtccctctgtgagcctcaggttcctcatctgtgaaatgggcaaatgacaacccctaactttgatgtcacagtagctgatctgtgtcaggcatcgagctgggcacacagtaggtgcttactaagtgtgagttctcccaaacaagaaggcggggcctggcttgtccttccccacatccccgcctccgtcctcttgacagcggtggatgcagcatgtgctgaaccgttctcttcacaacacccctgccctgctgggcgccggcccccatgccaagcatgaaggggcaccggggagagagaagcgagtggaggctgggacagatggtgccctgaagtgtgggtcaagtccgaatcaggcagggtccctgaaccctggcgctgggggaagtcgccgacctgtggccagggcggggctgataaagctccatcaatcacttgactgtctctccttcctcgggcctccatccagctgcttagccgcctctgggaacctcaaggaaggtaggtaggctgcagctgggcccagcaggcaccttgctggagggcgagggtgggtgggggtctgggccctgcccactttggtgtcattccaccgcagcaaactggggcctggggaggcacacttcctgcccgatgtcacccaagggttgggtggtgggtcaggcgggtgctttggtcctggcacctgggtggggggccctggggctgggctaggggcaggtccagcccttctttggccccagtttctcccagaggaaagtgaggttttgctggcctaatgccctcccccacccatggcccagcttgtgcaatggggtgggtgggaggcccctcccctctcccaacctaaagccaggaaagcaaacacagctcctaacgctggaagggggtgtgggtggagcctggcaggccacggtgccgagggccctgggggagcaggagcagccgcagctcagccacccccatgtccctgggacaccccctccattccctgtgttggggaggggccagagcatgctatggtggagagggagaggagtggggggaggaggagaggcaatgggtgggaaacagcattgagaacccccccagtccctggttaaatatagacccgaggctcctccttctgccgcccctgtggctgcatggccatgataagccgcagggtggccttggccactgccctcaggccccacacctcctcggcgggctctgtgacacccagggaagggggtgggctcccatgggggtccctgccctccccgttgagccaaagtagtcaggccttttgggctgaaggcgggtgagctgagggacctggagggcagtgaaggagctggtgggggctggggggagggttttaggcctcaggacctaacatctgggaaggcctagatgtggctgctggtcctgccctcgggtgttgtgagctgtggtctggactgggccccagaactgcatgtcagtgccctcctccaattctaatgggagggtctggcctggcagaggccgagtgacggtgggcacctgcggagaccctttttgggggatggtctcaggaaaggctcctgatggaagcagctgtctatatctccgtgcccagctgcggcctggcacactgagggctctcgccaagagagtggcctggtgatgcttccttttgacagcctgagggctgcctcctctggagagccttccttgaccaagcccctgggtgtggccaggccccacagggccacaacaggtttctgcatctgctcctatggccactccttcttgcccccagctctcctgctgccaagatgccatcaccacagacagacactcctgggccggagctgcagagtcccaaggaggctgaggagccacagactccagctcagggctcccggcgaacaagcagcaggaaagagcccaatgcccaccgcaaggatggcacaaggctgggcctgggctccctgaggcaggccttctcccgggccagccagcgggctttgacccaggtctccaaggaagatacgggcctgttccggcgaagctcctgctccctgttccggtccttccggcaagccctgaatgacggcccagctaccggccattcccaggccactcctgaggtgccctcgggggtcatgaatggtgtcagccagcaggcatccactggggcagcgtctgaggaactgaaacccgaggcaggtaagggcctcagaaacaacacgaagcatgaaaggaaacgggccagaggtcagggcagctcagctgaggtttccggaaaggctgtcctccctagctccccaaaccctgcccccgaacatgtgcaattctttatttatttgagacagggtctccactctgtcacccaggctggcatgcagtggtgcaatcacagctcactgcgaccttggcctcctgggctcaagcgatcctcccacctcaactttctgagtagctgggactacaggtgtaagccactgcacccggctaattttttttttttttttttgacactgactctcactctatcacccaggctggagtgcagtgacgcaatcttggctcactgcaacctccacctcccaggttcaagtgattcttctgcctcaggcccccaagtcactaggactacaggtgcgtgccaacacacctggttaatttttttttttgcatttttagtaagacggggtttcaccatattggccagcctggtcttgagctcctgacctcgcgatccgccccctcagcctcccaaagtgctgggattacaggcgtgaaccactgtgcctggcctaattttttaaatttgtttttatttttttgtagagatatggtcttgctatgttgcccaggctggtctcaaactcctgagctcacccaatcctcctgccttggcttcctgaagtgctgggattacaggcgtgagccaccatgcccagctggacaattgcactttaaattcttgcagcatctctgcaatgggagcccccccattgggcagataagaaaagtgaggctcagagaggtggagtgacttgcctcaagtctcacagcgtggagaatgggacctgaacccagatatgcatggccctagatccccacctctccatggcctttcacagcctggctcctggtcaaactagggccatgcacacagctgatcacagggttgcagagggtgcaaggctcgcagaggtaccaggaggggaggtcagggggattgcccagaggaggatacactggggtgggaagagggggacatggaggtggagagctcttgtcgggtggaggctggcggagagtggggagcagcaggaatgtaaagctggacacgggcaggacacgccctgcctgagctccgaccctattagacctgcaatcagggctgagcatgaggctatcaggtccggctcagccgggagtggaaggtgggtgtgggatccaggcggaaggtaggggttgacccaaattgctctgttcagccaggcttggggccccaggttctgcctcttcaaaggtgactctaagggagggctcctggcagctggggcctgttgttcctggagcaggccttcagctgtgctggggcatctggcagaggacagacaatccagccccgatggattgagccgtggcctgcaggtcttcgtccaggttcgggtcttggggcggtccctctcaccgcccttctcgcccgcctgtgcagaaggcaaatccgtggccgacctcattactgaacggcaactgctggcggccttcgaacagcttctgcgcctggagacgctgctggtggccgagaaggcctcgcgcacctttgagcaggaccctacggccttcgcgcggcgcgctatggacgtgtgcctgctttacgacgggctggcagccgagatcggcgccatcgtgcgcgagacgctggacagcgacggtgtggacgcggccgcgctggccgagctggcccgcgtggtgagcgcggaggaggaagcccacccttctccccccgacgacggcgacttcctgcgcacgccgcgccgctggcgccagcactgggaggaggcggtgcggcgaagcgctcaggagcgcgtgcggcggccgggcgcggggtgggccttcggggaggcggagggcgcgtcgggtttggcccagcttctggccgagctgggtggcttggttcgccgcgacctgcagaaggtgcggcaggaggtgcagcccgcgtatgcggcggccggcttcccagcgtgggaggtctatctgcgtgccttccacagcgccgtggcccagcgcctccaggagctcgcgcgcgacgcccgcggctgcgagcagctctatatcctgctggactgggccgccaacgtctacggcaggtgagtctcggccagggcgcccagtggcgaggacagctgccgcttcctccgcaggccttggggagccggctttgaggagcaccggacctttcttctctgttccctccctgggagagggctgagagccgagggcttcgacatgctttcctcggcgggttaggccgtggggcgctcccgccccaggttttctaggggtcacccatacacagttccagaatttgaaaagtttccgcggggaggttcccatgggagcagggcctgtgctggttccaccaggtgcctttgggcgcatcagaaaagggcacatcttggccaggcgccatggctcacgcctgtaatcccagcattttgggaggctgaggcggccgatcacctgaggtcaggagttcgaaatcagcctggccaacacggtgaaaccccgtctctacaaaaattagccgggcatggtggcacgcacctgtaatctcagctattccggaggctgaggtaggagaatcgcttgaacccgggaggcggaggttgcagtgagccgaggtcgcgctattgcactccagcatgggcgacagagcaagactctgtctcaaaaaaaaaaaaaaaaagaaagaaagaaagaaaagaaaaaagaaaagggcaccccgttaggccagacgggcatctgggttcagggtacagcctgcggggagcggccacctcccgctctctgcctgggatgaggatggattgccttccccgcggagcggttcccagccccaccggcaggagcgcccacggaggtgggggaggttgcctgaagtcccgcactccttaaattgctccttaaattgtgtggggtcagacccgtgtccgccctgctgtgggcctccgtgctgcgggttggagggtggccgattcctgagctgtgtttgaggagagggcggagtgccatctgggtagccgtccttcagcgttctgcaggaaggcaggaacccagctgtcagaggcttcccgggagggggtgtggcatggcagcctagaggcgcgcgcgcgtgtgtgtgtgtgtgtgtgtgtgtgtgtgtgtacagatgcccaggttcgggattggcgttagactttgagcctggccagaagaggggcagcggctgccgcatcagagccgctcccgcccccagccccctgccctgtcttccagtcctgacttcctgggcgccccggggctggcgctgcccgccgagccgctgcctccgctcctggcgccggacgtgtgggcccgactggagagcgactacaccagcttcctggaggtcaggccgggcgggtcaggctgggcgggccaggctggagggggcgggccctggggggatgtgcggcgcccaggctatcggcggccagagctggctctggttcaccctgtggcccccggcgcgggcttgtgacccgacagggcggccctcatcccggacggcgcgggacggggtctgggagggtctcaccacggcccatcccttctccccccaggccaagatcgcaagctgcttcgacagcatcttgcagctggagcagagtcactgggcggccgccgaggtccccgaggtgctgcagggcctctaccaggcgccgctgtccatggacgtccatatggtgcggcccgggagcaggggctgagaaggggcgtctgttcaagcctcacgcacacggtggcgatttccagaacgaattcctatccagtcccaaccaacccttccgttagatgggagcctgaggccccacgcggggggaaatcggggacccccggcgcgccgacgggcagggaggctgctggatgggagtttgcgggagttgactctccagttgggcggctgaaagctggaggggccaagactgacaggcacagcggggcgggctggaggcgcagcgggggctaccaggggacccgcggcctcaggtcgggggctgggaggcacgctcagtgcgggcttcgctcgcagctcgtggccgagcacgtgaaggcggccggcgccatctccgcggagctggaggccaccaccctgcgaatctgcacgcgggcgctcggcctcttcgtgcccaggtgcggacgcatcctcagtaggggagcgacctggccgggtgcgctctgcaggtgggagggaggagtctgcgtagggacctgattgggagggtggacccagggtcatcgcgcagctagggagggtccccaaaggctctgtgtatcccgccccaggtttgaaaaggcttttctggcgtcggaggcggtgagcgagccgcacctgggcgcctacatcaacgcctgcgaggagctcaggtagggctcgcccgctcctgtgcgggcgcagcgtggccagcagggggcgcgcgagcgccgggaacctggatggaggggagtgcgcgcgcgtggagggggcagaggtgaggagtgtgtgtgtgtgtttgtgtctgtgtgttggtggatctgaggggtgtgtgtgcgtgtgtgtgtagcagagttggggggtgtgtgtgcgtgtgtgatggagctgagggtgtgtgcctgtgtgtgcatgcgtggagagctgaggctgtgtgtgtgcgtgtttggcagagctgagggctgtgtgtgtgtgtgtgtgtgtgtgttggagctaagaggtgtttatgcatgtgcgtgtaggggtggagctgagtggtgtgtgtgtgtcagagcctagatgcgtgtgtcttgtgtgtgtgtgtccatccgagcaggggccctgggggagtgtggatggctcttcaaggctgagcagaggccgaggggttccagctccctgcctgctgccctgggctccatttttccctcccttcatcccaggcagcatttcttccatcttgggacacctccttctctgggaagcctccctcagcctgcaccctgggctttgctggggtgaggtctgggtctctgtgtccccagaaggcagacgccctccctgtgggctggcagtagctgttggccttccgtgccctcagctccaggccaggcctcagcagatgcggcagcgccagaggcacagactgagcctccccatctgggtttatccttttttaaaagtgtgtaaattttagtgtcccgaagtacttctcatttgtctgacttcaaagaacagctgtgccacctgctggctgtgtgctccgggacaagccacctcccctctgtggctcttttgccacctgtcaaataggatcagagcacctgctccctggggtggtgtgggacctctgtgcctcaggggactcagttcccattggctctttgtgagcacttctcagtgccaggcactttgtgggtgccttccctgcctgacacgtctcatcccaagcgcagtatacccacgcacaggtgcagagcacaggcctggaaaggaggtgccacttgcccgtggccacgtagccaggaagtggtggagctgggacttgaactaggcctgcctaaatccaaagcatgaccatcaggcactgcttctccaacactctcgtccttaatctgtgccaggcttgtccttggtgctgggaccctggggtttcagctccagggagcgttctctgccccttggtaggcagcctctggccaaacccttgatggaactccagcctgctctactgtgtccctggctgcggggactgcgtatagcctggccctcagtttcctcaacagtgaaatagggacatggtcaccttcagggggcagttataaggctcagggtagggtatgttccaggcatggctatgccgcactgtttatcaccaagagggatggaaggtctgtcccagagctgccagaggggaacgggtcagccacccctgacccacccctttgtgactggctccctgggcttctgtgctgtcccccacttgactctgctcgcagacagctacaatggggagccccacgggctgcccttcacattgtagtctaagtgagtggagctgtgtgcccggctctattccccagcctggtctcccttgcccacctcatcgctggtcctggcccctccccaggaccagtcttctctccaggttcccaggaacccaagaggagctggagaagcccctggtgacggccacctgcagcttccagaagcacttgcttcagggcttgcagcgtgagttgcaggtgactgtgataggccctctctccctacttcccatgcccagcaggcaccccctatttcctagagcctgggggcccaggtcacagcattcatttattccagggtgagctcatgggtgtgtgtgtagggtagtgggcaggggacccaggtgaggtcccagctgagcaggggcggctgggagacgcctgccttctcacttcagtctccagctcttagtggtcacccccgaagcctgggatggtgggtccacggatccaggcccagggtcctcacccagtccctcaaggcttctccagggcatgccctgagcagatctgactgcacagactcaaaccctgcccctagagcttggggcctgggagaggcattctgggaaagggctcgtgacataacctgtggctaggagagggaatggcaccccaaacccaggagggaaggggtcaggagtggcacactgggcttcgagggaggggttacgttgcgggcgtagtgcacatttgcagactcccagcccctctgtccccagccgctcttcagggttgtgtgcaccagggactggctgacgcaggactggctgcatcccctcatggacaaggtggtgaccttcgccggtcatctccagcgtgtggcccggccgcgggcacaggtaccacaagggggagggccctggcagggctgtgcccaggattggggctgttgaccctgaccctgaccctgaccctgggccgcccaggagactctgcaggaggtgcaccggttcgtggtccgcgagtacctggcgcgggcgctgaggccacgggagcggttccggggcatggagcgcatgcatggctcccagaagatgagcctggatgcccaggccatcagcgacaccttccagggcctggtaggggcggcatgactgcccttcggtgctcgcctctgtgtggggagtggtggcagtgactagggccttagcgccgggagggcttttggcaggagtggttctccccactctggatcaggtggaacagggactggggcgcctgtggggctggggggtggagggaaccaggtgggagggcggcactttgcatacatttgcatacagtttgcaggggtgcggggaaggggcgagggtcacagccccatctcacggtcagggcctttgggaggtgtcccccacctcaggccagagccctcagagtggaggcaccagcgcccctgcacacccctcgtctgccccctagcagtgctttcaggctggcctcggttttcctgtccaagcaggatgggatcggaggggagatgaaggctgtgtagccagcccatgagccctcggtgcccaggcacgctcccgttctgttttgggggaggcagtcccggcaccgagccagagtgactacaggagggctgacgctgcgggagggctgacctcgcactgacctcgcgctcttgcaggagttggagcagcggtggggagagggctgttggggcaggcggtggctctgtctcgcagggttccgaggccacatggttggaccaagccatccagtgcgtggctgagatcctgggcgagacctacaaagatgacatccagcggcacctggagactcttatccggagctaccccgacatcaggtgtgtaccccacctgcttccactagcttcctaccagagcttcagggccaagggggctggtattggagcaaccccagcccagacctgactgcccaggggcctgaagaccagaggcaggaggtaggccttggaccctcagaccctcaaggctggagggggaatggagagagccccttctcctaatctgctcttggccatcctccatcagccccaccaggggtgggcacgcctccagtcctggaatctgagggggaggcggaccccccacccctggggagaaagccctctctgaaagccaggggattctgagacctggtcaggaggaaggaggttttgatcccgggttgtgctggggggtcggtgagtcatccaagcctttggaaatcccagctcgaatctctccaagtccattcttttggagattctgggatgtggagctcacagaaagcccctggttcatccccttccccaggccaccctgccatggggtggggaaggattccccatccccagcaggcctgtcttccaggctgtggctcagagagagtggcccttacatcaccctgggagttcccctccaactactccccaaccccgttggccccgtcacccgcagctgcatcaccccctccctccctctccaccacctgtcccccggtctccctctctccctcgccaccctgtccccatgtctccctccctccctccctctccaccctgtccccgtgtctccctcctccctccctctccaccctgtccccatgtctccctccctccctccctctccaccctgtccctgggtctccctctctctccagcctgggtctctccacccggtccccaggtctccctccacgcctttgcgtggctctttcccactctgcacacccctctcctgtgccccttcaagcccagctatggtgtcccccaggcccacgccctgccccctcccccagcacagctcttcctggcctcagtcaatctgacctccctgaccatcctggaatgcagagtgactcatactaactcccaagcccgtgggttcgcctcatgctggggctgggggtgttgcggaggtgtaggtctgcagtgagtgcccgcatgtctctgcaggcgggaccacatactggccattctggcgctgcgccgactgggccgccagcggaaccagcatctcttgcagcacactcaagacctgctgagagctgcggccggggcggcgggtgcggaggcccctcggggccgcgtgctcttcgaggagatcaaggtgcccagtgccatggctgtgctgatcacctgcgtctagttctctctggctcgagggggggccggccgctggcagggagctgtggtcagtgggggtcagccaggagcccagggagtcactctgggccctgcccccaactctgacactgcagttagggaatttttgtcgtcagcagccaagcgcagctgtcaggccagaaggagcagccgtgcaggaggcatttcaggcatcgttgaggggagtgttttggggccgcagagctctcaatgctgcctatcgggcgggggggggcctcccgcccgactgtccagcttcaccctccagtctgaaagtgaagagcagagtatttatttaaaaaataaatgtgaattaaaatgg

SEQ ID NO: 1655 - DNA, 795 bp, Homo sapiens
caaagacttatgccttcagtggtcccttggtcagaattagtactcagcaaagtaagtagaacatgctctgttctgatacataaaccaaatacacagtatgatttaaataggaaatgagattttttgcaagactaagtgctcagtgaatgctttagtgtatgcactaaatcttaaatcacatgggatatgagaaactaaccaggaaaactagccctcattgaagcattaagccaggaaaaaaaaaatgtgtttcttgtttttcctattagcatccatttaacaactgggctattattaccctatgtagagtgatactttccacgcatttgcatgcctgagagttggaaccaacaaagtaacaggactgccattaagtgatttcttttgttttctctttcagcaaatgttcccagcaggccacaggtaagagttaatggcttggttggctctatgttactgatcccaacctagagtaagcagattatccacgactgattttattcctactttattctccatgtaaataagtaaacttacttgacatttaaatgttagttgattctgtacaacagtttgtcagtctgggagtggggggtggctcccaagccacagataccaaaaataccatgtgtttgatcctttgtgttctaacagctttttaatggcatcttatgtgctacataaagtcactctagatagatttgaccaccactgctctctcaaatgtctacttaaggtggctatcacagaacattgacctaaaaaaaaaatgactggtaccacagaggtggtttt

SEQ ID NO: 1656 - DNA, 2533 bp, Homo sapiens
caggtggactcggtccgtggcttcggaggcaagtttggtgtccagatggacagagttgatcaggtgagtgatgtggcactgggactggggcaggttggggcaaggggggcgttccccgtagatctgagccctgttgggccacttgtagtagcaggcaggtgccctccagctctgggggactgcagagaggggcatctgcctcccaggatgctctgagagcctgggctctcagagagaggaagcaggatgcggcgggcttgctgtagcagtccctgcggtcgctcttcactacgtgcctcagtactggatggccctgtgtctgtcccaatgtgccagcagggaccgtttccacccgtgtttctcacatgtgtgttactgtgacagagtgacatcagagcctataccgggggggcaggatgcgctcgtgtccaggacccaggctttgcgtccaggtgttgttgcagtcatcctaggcccgagcctctttgattctcttcggctcgggtctgttggctcttttgtttaatagaggagcgatcaggagcctggagggagcagggagctgatgctgtcgcagattgtggctttgtgacatattagccacggttctgaatttatgtgtctgtgaaaggaggatgatcatacctatctcacgggtgtttgctcagatgcccatcgcagtgcctggctggtgggagtgcacccctggtggccactgctattctcattactaatactaatgttctcagcatgacttatttgagaagcgagtttttgtgaagcccgtggaatgaatcagctgagcattccctgctgccgcatgctggggagggcaggtcaccagggatatggcttggcctgcgccgcccactgggccttgcagtgggcctgtccgtttaggatgccagagctcttgcgtcactgccacctgcacctggcttaggaacccagaggtcacagcatcatgtgtttcatatttttttaaatgtcatgtcatgaattcagagagattgtttcagggacattggaaagtatttctccccactttttcatgtgtttttggtcgtcacagtctgctgtaggctttgaataccaggggaagactgagaagcatgcctcccagaaaggtaagacgcgaaaggtgcagaaagagcccgctccgggggccccgatggggagagtcacagccacctgaagccgtttccccgcgctccgggggccctgatggggagagtcacagccacctgaagccgtttcctgagcggtggctgttgccacaaggaggactctgccctcctcttcatgtttctggatcatctggataccacatgatggatgtattccccgttacacatccccctcggagccctggcatctgctgtcattgtggggcttctcccccttgtagcggaagccgccttcccttcatctgggcagcgctcctcctggaaaagagagctcacagattgatcggcagaaagctaacttccccccaaggctagaaaccagagttgttaaattcttgttttccttatacacatacggtcttaactgctggtgattaatcttgattacatcatgcagtctcttttttgaaagaccaaagcatatcgccaccttaaagttctcagtttattttttgcaagcttatttagttcttcctcctttgtgtcattgcatcatccgcggaacaagctctcagtccttacgcagtctcggtgcagtctaggtggaggtagctgtggtgtgggcaggcggaggatcagggtcttgtctcccatgttcagctgcatggctttcttcatatgaggctttctctttccatttttttcattttgttttgtttgtttgtttgttttgagacagagtctcgctctgttgcccaggctggagtgcagtggcacgatctcggctcactgcaacctgcgcctcctgggttcaaacgattctcctgcctcagcctcccaagtagctgggattacaggtgtgtgccactacccctggctagtttttctattttttagtaaagatggggttttgccacgttggccaggctggtctcaaactcctggcctcaagtgatccgcccacctcagcctccaaagtgctggttctttgtatgaagctttccagcttttacctgagcagttgattttcaaagtgggcatgcagcgtcatttctgactacacaaaggaactgccctgtaacagctgacagggcccagaacccccccatgcacctgttgtgaaacagggtccagcgtcacctgtatggagcagtgggtggcttgttgtacattttaaaatgtgcgcttgatgtgtttgtgagttgtaacccctacacacttttgcttagtttaacaaaaggaacagtgtagttcgtcctcaggcccccgtgctaattgctgccctgtctctccagactactccagtggttttggcggcaagtatggcgtgcaggccgaccgagtagacaagagcgcggtgggcttcgactaccagggcaagacggagaagcacgagtcacagagag

SEQ ID NO: 1657 - DNA, 13176 bp, Homo sapiens
agcatacacaagctgagggagaatgtctttcaagagcatcagacccttaaggagaaggaacttgaaacaggaccaaaagcttcccatggctatggagggaaatttggtgtggaacaagaccgaatggataaggtaagtggcccgcggctgcctatgccaggctcctggtgtgcttggaccactagactgggtggcagagtcgtccctcagtctttccttagatcagcagttttgagtccatctgctgaggttgcgatttgcccggagtagacccctgttgattggacttactcatgaagtactctagctttcttcaaagctctttaggaatcctcagaggtgctggagcacgggtgttagtggggaggcccagagagggagattggccctcagaggcagccttgtgataggacagaagtccagaagcatcctggctctaggtgtcatcactgtcaatgcctgtggttccagtctgtagcctaagtcatgccagtccgaagaccaaagtcaaatctgtaggtccccatggttcacagcacacacggaatccagccaaaggcctggctaacatccttcatgcgttcagtgaccatcagagcagtctccctcgtgtaaattcggcgcgtaccaggctggggacagtgctcactctattcgagaggtctgggcaagcctcccagcagctgtcattgatgggatgcagactgccacgcagacgttgattgaggacgttggccaaatgcatccggctgcacccgtgctttaggtcctctctaccttaagaaagggagccacgttagctcaggagggctaccttttccttcctggagagaagatggaagagatcgcagtgtgtttgcatgtttcttcagtaaaacagacatcctggaggtgaacttttgagtctgagcaacataagcttgttctgacctgacagatgcttgcctttactctgtggaaagaagtgtgttagccagtgtcggattccagccggtaattccatacccctctcccacctcatgcaccagccagatgaacatttgagctgggcacgggatgatgttgccgtgtcacagtgagctgcaccttgctctgtcccccgcagagtagatgatgtggtgggccggcagggcaccccaaaccacgaccataaatagcctgggggaggagtggggtgagggaccttctgcaggaaagagacatggatgttgctgcgtcactaccacagagatgccctgacaccgagaagagcaatgtgtgcagaatcatcatctttggagtctaaaaaaagtctggtagcttttaggagtgtaaacaggcagacggacccctgagttcagtgcagcgagcgaagcaagtgcacacggacagacggaatccatgtgttcagtgcagcgagcgaagcgtgtgcacacggacagacggaatccatgtgttcagtgcagcgagcgaagcgtgtgcacacggacagacggaatccatgtgttcagtgcagcgagcgaagcgtgtgcacacggacagacggaatccatgtgttcagtgcagcgagcgaagcgtgtgcacacggacagacggaatccgtgttcagtgcagcgagcgaagcgtgtgcacacggacagacggaatccatgtgttcagtgcagtgaacgaagcaagtagataggagcctttcccactgcagactgaggcgagccctgtgcttagggggcttgtggggagttagcgcagagagacgtttattctaaaaatggggctccctgctgtgggttgggaaaattacatattggggaaaagaaaggcaacgtgtcaggagagcctggtagggaagctgctgtggcttctctgctgctgctcggcctgcaccttttttcagcgcgaatctcgctcaccctagaacctgcagctcaggccttcccgagtgccaggagctccctggaagagccctcacttccctctctcctgtgcggtctccacagcagcctctgcttccctcatgagctgtccttgcctcatcctgctgtccttcccagggagactcccctccgggctgggcttttcaagggtcgggacttgtcatcctcaccttgtgcctggctcagtgccacgtgccccccccttaggccagtgctctcatggaaccaaggaggcttatggagccttgctctcacctctcagccggcaagttggagagctgtcctagcagggcgagtccagcaagggatgctgctgctgctcagtcccagctggcatcggggccaggttagcgctcagctcaggtcagcaccatgggacagatacgttgtcaaaaataactcagggccaggtacgggactggcacctgtaatcccagcattttggaaggccgaggcaggatgatcttatcagcccaggagtttgagaccagcctgggcaacatagcaagaccctatctctacaaaaacataattaactgggcatggtggtgcacacctgtagtcccagctgcttgggaggctaagctgggaggatcacctgaacctgggaggtggagactgcagtgtcctgtgatcgcaccattacagtccagcctgggcgacagagagagacgctgtctcaggaaataaatagattaaactcagattccaaaccgaaggggaaacggcttaagttatttgtaacttgcccactccagaaactaaaaaaaaaataaaaaattgaaatctctgcgttaagacttgaggaatatgtgctagagacttccagaacaaaagaagacattgaggacaagcacacgcgagaggagcctggacgggctgtcaggattctgtttatgctggggcctgagcacactgcacctttcccttgcggccagcggtggctgcatccatcacgcggggcaggcttccttcttgatcccttgtctccttgcatcccgtagccctgagtctacatattcaggcttcaagatacaatctccccagcgtgattgtttaataacagattttgtcaatgtgaaatcgaaggcaattttggagatgaatccctttcaatcaaaaagctggaaactttgcctagttgtcattctgggcatgtctttagatcagttttcctgtaacttccttctgatgaaaactcatgctggggaatccctttggcacgtctgcctctgccactccttcatctctgttttctgggtgagaccccggaggacacggatgggcagtctctgccacagagggtttggaggtgatggctcatgtggaaagagagtcagctgccaacctcaaaacaaacgtgggaagaagagggcgcagcacaggcccaaggcttagggcaagacctgctttttcaataggggaaatagtggacactctctgagttgcctgctgcgtcagcaccggtgtgggatgctgcttgggttagcaggttagcatgagtggctccacatgctagagggagtgagaagaggggtcccgatgtgccgtggactttctccacgccctctgctgggccatgtgcccgcactgtctgtgaaggagtccttgacccggctctgctgtgaggagggagcctcagaaccctggggcctcggtgtcaggactggagcagggccagtgctttgaggtaggagatcttttccactttgtggaccagagggtctctcaatagaactgccgaacggagttgctgaatcacacaagcagctgtggacagcacacctgtgaatggctgtggctgtgtcccagaggcgttatttacagaagagctgggtgccgggtctggaaagcccaggggaaccttgggctttacctgctggctttggcgaacagaaggtccccaaacctgtgtgcgctgatgggggctgacgacattaatgatgctgaaatgagctggcatgggagccggcagctggctcctgcctgaacagggtgctgctcagcggaaatccagtgtgagcctgtgtcttgcagactatttttgtttatagtctattagaacaaaatagtttgctggcagactattttttgtgccgattctttggtcatgtgattcacagaggtcccacttcagtagatgccagcagtctccacaccagcgggtctcacggatcctgccacaggctgccagctctgtgtaccttcttcatgcccggtcgtgtcagaaatccccactggtggccccgacctgtgtccagggttcgtgtgcagcttccaggagcccaagggctggggtgggccgtgaaagcctgcaccaagggctgggcgcggtgtctcacgcctgtaatcccagcactttgggaggccgaggcgggtggatcacaaggtcaggagatggagaccatcctggctaacacggtgaaaccccgtctctactaaaaatacaaaaaattagccaggcatggtggcgggtgcctatagtcccagctactcgggaggctgaggcaggagaatggcgtgaacctgggaggcggagcttgcagtgagccgagaccccgccactgcactccagcctgggcaacagagcaagactccgtctcaaaaaaaaaaaagcctgcaccaaggacccgggcctcccaggagtcgtgtcgccttcctgggctccccagatgggtgtgttatgtaaggtttccctgcactgaccaggatgtggcctcccccagccctgctctgggaggaagtgaagcgccgcagtgttgttggtgtctaatgctttgtgtttgaaccctgttccagtcagctgtcggccacgaatatcagtcgaaactttccaagcactgctcgcaggtggactcggtccgtggcttcggaggcaagtttggtgtccagatggacagagttgatcaggtgagtgatgtggcactgggactggggcaggttggggcaaggggggcgttccccgtagatctgagccctgttgggccacttgtagtagcaggcaggtgccctccagctctgggggactgcagagaggggcatctgcctcccaggatgctctgagagcctgggctctcagagagaggaagcaggatgcggcgggcttgctgtagcagtccctgcggtcgctcttcactacgtgcctcagtactggatggccctgtgtctgtcccaatgtgccagcagggaccgtttccacccgtgtttctcacatgtgtgttactgtgacagagtgacatcagagcctataccgggggggcaggatgcgctcgtgtccaggacccaggctttgcgtccaggtgttgttgcagtcatcctaggcccgagcctctttgattctcttcggctcgggtctgttggctcttttgtttaatagaggagcgatcaggagcctggagggagcagggagctgatgctggtcgcagattgtggctttgtgacatattagccacggttctgaatttatgtgtctgtgaaaggaggatgatcatacctatctcacgggtgtttgctcagatgcccatcgcagtgcctggctggtgggagtgcacccctggtggccactgctattctcattactaatactaatgttctcagcatgacttatttgagaagcgagtttttgtgaagcccgtggaatgaatcagctgagcattccctgctgccgcatgctggggagggcaggtcaccagggatatggcttggcctgcgccgcccactgggccttgcagtgggcctgtccgtttaggatgccagagctcttgcgtcactgccacctgcacctggcttaggaacccagaggtcacagcatcatgtgtttcatatttttttaaatgtcatgtcatgaattcagagagattgtttcagggacattggaaagtatttctccccactttttcatgtgtttttggtcgtcacagtctgctgtaggctttgaataccaggggaagactgagaagcatgcctcccagaaaggtaagacgcgaaaggtgcagaaagagcccgctccgggggccccgatggggagagtcacagccacctgaagccgtttccccgcgctccgggggccctgatggggagagtcacagccacctgaagccgtttcctgagcggtggctgttgccacaaggaggactctgccctcctcttcatgtttctggatcatctggataccacatgatggatgtattccccgttacacatccccctcggagccctggcatctgctgtcattgtggggcttctcccccttgtagcggaagccgccttcccttcatctgggcagcgctcctcctggaaaagagagctcacagattgatcggcagaaagctaacttccccccaaggctagaaaccagagttgttaaattgttttccttatacacatacggtcttaactgctggtgattaatcttgattacatcatgcagtctcttttttgaaagaccaaagcatatcgccaccttaaagttctcagtttattttttgcaagcttatttagttcttcctcctttgtgtcattgcatcatccgcggaacaagctctcagtccttacgcagtctcggtgcagtctaggtggaggtagctgtggtgtgggcaggcggaggatcagggtcttgtctcccatgttcagctgcatggctttcttcatatgaggctttctctttccatttttttcattttgttttgtttgtttgtttgttttgagacagagtctcgctctgttgcccaggctggagtgcagtggcacgatctcggctcactgcaacctgcgcctcctgggttcaaacgattctcctgcctcagcctcccaagtagctgggattacaggtgtgtgccactacccctggctagtttttctattttttagtaaagatggggttttgccacgttggccaggctggtctcaaactcctggcctcaagtgatccgcccacctcagcctccaaagtgctggttctttgtatgaagctttccagcttttacctgagcagttgattttcaaagtgggcatgcagcgtcatttctgactacacaaaggaactgccctgtaacagctgacagggcccagaacccccccatgcacctgttgtgaaacagggtccagcgtcacctgtatggagcagtgggtggcttgttgtacattttaaaatgtgcgcttgatgtgtttgtgagttgtaacccctacacacttttgcttagtttaacaaaaggaacagtgtagttcgtcctcaggcccccgtgctaattgctgccctgtctctccagactactccagtggttttggcggcaagtatggcgtgcaggccgaccgagtagacaagagcgcggtgggcttcgactaccagggcaagacggagaagcacgagtcacagagaggtggggcggaccccacggtctgtaatcacgcgtttgctccagaaacacccacgagggcattttctctctgcacacgtgattgttgtagattttttaactgaaaatgtttggtgttcttttcataccagtgtatgtgggcttttcctaattcgaatggctgcacagttccccatcgtatgaggattccatagtccaagtaaccattccttttttgaatgtggaatttaggttatttatttatttatttatttatttttggtagagatgaggtcttgccgtgttgcccggactggtcttgatctccgtggtctcaagcaatcctcccccaccttggtttccttaagtgctgggattacaggtgtgacctgtaaattttttttttttttcttttagacggagtctcgctccgttgcccaggctggagtgtagtggcgtgatctctgctcactgcaacctccacctccctggttcaagcaattctcgtgcttcagcctcccggctagccgggattacaagcacacgccaccacgcccagctaatttttgtatttttagtagagacggagttctgccatgttgcccaggctggtcttgaattcctgacctcaggtgatcgccctgccttggcctcccaaagtgctgggattacaggtgtgagccactgcgcccagctgaaacttgactgcagggaacattcttgtacctgtgttttgttcacaagtgattattcaaaagaatcaactcctagacatggaattgctgggtcgaaggctattgaatgtaaaatttccatagatactgccaagttgtccttggaggctgtgctgagttcttccttccccactgcatagcctgtacaccatcactcagagcgtttcccagggctgcagaggctgtggcctgcctgtttccctgtgcctcttgtttggcctgcacatttaaatttttaaaaatatttgccaacatttgaaaagtgagagcttgactatttaaaaactcaaaaaaaaaaaaatttaccccaaagcaagaaacaccactggaagatccgaccatgctggcttggcatttccctgaggaaagtgccggtggcctggagggcagcttggcttgtagtttgtcgcggcctggcctggcctggccttcctgccggtcaggccttgcctgccgcacagagctgcttgcctctgctctctgcctctttcctgggaacagtccattcctcctcttcccgacaccacacagttgtgagcagcgcatgctccgcgaagctgcatgagtgtgtgactccagggagccagggagcacaggccgagcacctgggcagacgcaaggctccttggatgcttcaggccttctctcccaggccttgatcctctgccttgtgctgttagtgggtccatgagagagtcatgttttggtgtcacagtgacatgctaaatggcttcattctgagtagaactgaagtttctggaggatgctgtgtgtgtcctatttcctggcatccccctgcgtgcttcagtttgtgaagagtggcctttgaaagccttgcccttctgctgcctcctgagcttagagccttatcataaactctcatctcctgctagcttctggatgcaatggatgatgttacaggaattcatctgctgtactttatttcttttttttttttttttgagacggagtctctctctctcgccaggctggagtgcagtggtgcgatctcagctcagtgcaacctcctccttccgggttcaaacaattctcctgcctcagtctcctgagtagccgggattacaggcatgcaccaccaagcccagctaatttttgtatttttagtagaggcggggtttcaccatgttgcccaggatggtcttgatctcttgacctcatgatccgcccaccttggcctcccaaagtgctgggattacaggtgtgagccactgtgtccagcctctgctgtactttaaaaaaaaaaactttttttcttaattcttttttttttttggagagggagtttcactcttgttggcctcaggctggagtgtgcaggtggcgcaatctcggcctcactgcaaccttcacctccgtgggtctccagtgattcttctgcctcagcctcccgagtagctgggattacaggtgtgggccaccacgcccaggctaattttgtattttaagtagagatggggtgttcataagtgcttggtcagagcataggacgtaaacccctgacttcagatgattcacgccacatcgacataccaagtgctgtgattacaggcgtgagccccctcccccagcctgttttttgaatttttaaaatattagctaatgatttaacttagagatggggtcttgctatgttgctcaggctggactccgcctcctgggctcaagtgatcctcccttctcagcctcctgagtagctgggctgcaggcacacacccccacctctggttaccactgtttgtgtttctgttattacacataaatagcacctttaaatactgtctgtattattcagtggtcctacagtggacctgaaagatttttgtttttttaatcaaaggataaaatacttgcatgttcactgatttcgttgctccttttaaagtagtccttttttgtttgtttttagattactccaaaggtttcggcggcaaatacggtatcgacaaggacaaagtggataagagcgccgttggctttgagtatcaaggcaaaacggagaagcacgagtcccagaaaggtgtcttccgttttatcttaccctccagccagcagctagtaatgtgacaggtggtagccacaccggaaaaggaaaaacaaagcgttattgatagcccttaacgtagatgtctctttttcatgaaatgcccaacttgaaaacggcacatccagaaacacagctgctaaataggaactcgcagcttgagtgttatggcgctccagccccagcggcgttgcttatcgtggtggccacaccccgcacgtctgtgttgcccgtgtgagcctgtgctgtctcatggtgcgggtggaagccgcatgcgtgggagcttccatggggtcctgtctggcttagtcacgatgctgaggtcatagactaggttatttcctgccactctccaaggagggcctcttcatggatgttatctaaagtattaccaaagatccggaagggaagagtagattgagtgaatcatatgcgtttaactgtattgaaaacatactttccacctgtgacctgcactacctgttaatgatgggttctggcctttcattgtgcatgtagactatgtgaaagggtttggaggaaaatttggtgtgcagacagacagacaagacaaatgtgcccttggctgggatcaccaggagaaattgcagctgcatgaatcccaaaaaggtacattcactctgcctgtatgcgagatggttttagaagtttgtttttgttccttgcggggtcagttggtatgtgttgtgtctgcgtgtgcctgctgcacattgttttgtcttcactgtttgaagttgtcctgtgtgcccccccaatcccccagttccctccagctagtgtagtcacaaaccctccctgctgacacggggtggtaccccagagagctgggtttacctggaagtgggttgcacgggccaagcctgcagcagggggctgggtttacccaggagtggggacatgggtcaagcctgcagcggggggctgggtttacccgggagtgggggcatgtgtcaggcctgcagcggggggctgggtttacccgggagtggggacatgggccaagcctgcagtgctcctcatccaggcttcttgtctataaagtgggccacggtttttggcaggagatacttacttttgaaccgaaagtgttttcttgttggaatgggtgccccttccctggaaaaaggagcctgagggggctgaaagcctctcagtgtgacccagccctgagagaagcaggagcggggctaatggggctgcagcgccctccgaatctgcagggtctctcctcccgtgtacacagatacgcacactcgtctgcagtgtgcgtaggacgctaagaatgaactgcacagccgggagtgcctttactgaattatttgaagtacagttcttaggctgttccagatcttcgctgaatgttcagattttaagttcattctttaacgttgacctctggagccaccttctggcgctgagcctgggagtaggatctcaaaggccctaagctcaggagagcccttgctttctggaaactgtgtttgatttttgcgcatgctcatgcaattctaacccaactgtgtttcctcttttggttgttttccccaccgttgcttgtggattttcagattataagactggttttggaggcaattcggtgtcagtcggagaggcaggactccgctgctgtggggtttgattacaaggagaagctggccaagcacgagtcccagcaaggcacagttgccaccagcctcctaccctccccccgaccctcctgtgcggccacttctagcacagacttcagggctcaccgtcagcacctgcaacacagtcctcctgtgtcaccacttgtcagctgtcaggctgttcggcactttaaacccatttctagtagagcgacactgattttgagtggttcactttcttccctgtgaacttgtgatctgtgtatggcaggatgcgccagttagtgtgtgggtgccatctttctaacccggtgacccatccagtctctggactggggcatctccggtctccagcagcattctgcccgaggctgttctgctgttattggtgactgccgtgagccactgagtcaggccttccagatgaggagagaggtgttggttcaaccaaaccactggccatttgaccaggggcttcgtagcagcaagggccaggagacaggcgtgttctgtgtggtttctgtgtttcatttgtggtggtgtttttggccggggttgggaggttttttgtttgttctgtttgatgacaccatatgtgtgtaacatctccacacagagccacacagtatgtacgtgaagccagctctgcatccttccttagagcagttatgttgttaccttcaaaatttggacttggttattagaacctgaacacataattggaaaaacagtaattccctaaccttgcagggaagactctaggctttccacctgcagcgttagaaacacacagcagtgttcaggtgtgggcaggtagacacacctggggtggtcccgcagactgcatggagatggcagtggctctccgtggcatcactgctgcatgacagtgtgactttcatgtggatctgtgttgctgcaacggaagtctttggctggtagaatttccacatggattttttttttctcttaaaaagcaagagaacaaactgcgattgagcctctttttagcgctcagtagagcaggcgcacaggaagcagatgagaataagcccgtgctggtgcggaagactgtgctattgaagtggcgcgttgcaaaggcctgtccgtgccctctttcctcgcttagctcctgcctgctgcccgccgcccctcctgcccctcctgcccctcagggaatgctgaagcctctgcccctggcctgtgctctgcttctcactgcctgtgtctcacgaccatgggtggaagcaaaacttgccttgcaagtgaagcctcgcttggccattctcgtttcttcccgctgtggtgcaccttcttgggctgtttctggatctgtctgcatgcacccacggccacccccatgctcgcctccacctcagagtaagtgttgtgttttgccacgtttcagactactccaaaggattcggcgggaagtatggggtgcagaaggatcggatggataag

SEQ ID NO: 1658 - DNA, 295 bp, Homo sapiens
gggctgggcgcggtgtctcacgcctgtaatcccagcactttgggaggccgaggcgggtggatcacaaggtcaggagatggagaccatcctggctaacacggtgaaaccccgtctctactaaaaatacaaaaaattagccaggcatggtggcgggtgcctatagtcccagctactcgggaggctgaggcaggagaatggcgtgaacctgggaggcggagcttgcagtgagccgagaccccgccactgcactccagcctgggcaacagagcaagactctgtctcaaaaaaaaaaaag

SEQ ID NO: 1659 - DNA, 441 bp, Homo sapiens
catacctcttctcatctcttctgttccctgtggcttcaaaacatgtctcggagggtggcttggagaaaaaacaactctccagtacaaaacccttgggctggttaggattcagagaggaacacatggggaataagcccattcttcatgctctggggccttcccaggttttaggagtggtgtctttctttctcctgctcataagggtattgggcggtttccaagcctggtttgtatttcatcttcaattctaggattgtcgtccagatgtcaaaggtggcgtcctggtgtctcctgggcagaaagtccgaatgccaaagtggccttcttatcactctggggtctctcaatgacagctgtgtctggcctaccagatttgagcaaaccttgtcatctgtttcattatctgctgtattaaaattttttaatggcatttagatgtta

SEQ ID NO: 1660 - DNA, 3773 bp, Homo sapiens
  SITE (2234): n equals a,t,g, or c
ttcttgctcctcccctccacccccccttcatcctccggccgccgcgggggcccccatcgccttcccgcccgcccctattgttccgcccccggcctaccgcccttccccttcccgcccgctccccttttcccctcagtcgcctcgcgcctgcaggtaagcctaaaaatttcccttgcgcccccggctatggctacaatttccacttttgtcttcttcttagccggctcgggtcctagtcacgagccgcggtctcgcgtagtcccgcgtgagcgcctaccacctcactgtgccaggccggtcattcacgcgaggccctggctctggcgcggcctagtaggcctcgcgcaaggcctattcccccctccccccgccttttcccggtggcggctgcgcaggagtcagggagggcgcgcgcgcggtagggggggcggcggtggatttgttggttgtggggggttgggggaggcgatggccggcttgctggccgggcgggtgagcgcggctccccgcgggggtcaggcgctggcgcagccacacggggaggcgctattagtccggcccctccccctgtatcgcagcgcccccccccgaccgaaccgtttattttttcccccctctttctagtcgagggaagggggggctttttttcttaagtggaaaatgcttggataaccgaggggagagggggctgcggagttaaagaaagggtagacgggctcccagttgccgagttaatcaggacgtttctcggggtaacgaatttttaaattacaaaatgcctgccgatgtaatcccagaccgagctatttatggaaggggtattggacagcagtgttagcagctggattgctggaatggggtacctttatcttgacctagtcaggagggaaattcgacaaatttcttggattacttggtttggagttagaaatgcatctttgtactttacctcaagaaatggcttcaaataggtttcctgttttgttttttttttttttgccttttcgaagttgcgttattgtgatatttgtaaagggcttcctattacatctgcaagagggtaaggaattaaactaccaggtctttaccacatcttattaaaaaaagaaagtcattcttacagacctaacgcttcttcccccaccaagcactatttttccatgagtgaaaagtgttgaattctgggattttgccagcaattaattgtattctgaaaatggggaaatgatgtgctttggggatgcacttatataatcacttacattcttggagtagccagaggacagtttgccatatacagaatggtgtgacagacacttaagcacctaagatatttagggtatgggctttgtgttagaggaaagttaacacagtggctggttttgtgaaggaggaaatctagctgtgggaggagagagatgacatgttgagttttaaaaggatggatacttaaaatgtcattggggacattctacaacttgggagaggtcctttctaaagctgttacgattaggtgctaaaggaggtattgaaggcaaaggcatatccaaaaaaacaaattttctttctacacataactagttactctaaagcagaaatgttaggaacaatgttaggaattgtttcataggtgggaaaagggccatcttgtataggaaaggtgcatttgctgctgttcttaaaaacaaaaaattttagcaatgccagttttattttgattgttttctttggaaggaaatttaagatttaatagacttgaaataaaaactggatggtaaacacaaaagcaaggaaaacatctcaaatctgagtaacaagttgggttggaaggaggaataggagaaaaagactcaagtgtacttaatgtatcgagtcattttctaaaggggaatatggaaccccagcctgcgtggaaggcatctcagataatgccttttcagtgagggtgttgatctaaatcttttagaaatcatttggtgttagccatcaacggttgaaatttgtaatgtgggatacatctcaatttccttatctacaaattgctactacaaagaaaatttacatgtgttctctctagttttcaacttaaactgctccccagcagggaaacaaaaggtcatttgccctcgctgtagttggagatttgcactcatgatttccaggtgtttctgaattcttgaagcttttctgctgaggacaagtggtgcacgttcagcagttccttagacccatgncaatgaaaagaccctgttcatcctgagagtcagcggaaaccctgtcattaatgagaggaactggaaagttgccttctatactgtgtaacagaacctgagctgtatattttgtcatgcagttgtgcttggtgtgtatataagtctgacatactgtcatttaaggaaaagtgtaaagtagaaaatattgataaggtgaaaataacttgggaaataataaccttgttgttttcctcctctgattttggtcatgtttgcattttagtttttggctttcacccccaaccagtgaccaaagacttgaccactcaaagtccagctccccagaacactgctcgacatggacaccggtgtgattgaaggtggattaaatgtcactctcaccatccggctacttatgcatggaaaggtatgctctagcttgggaaatggggtcatagtaactgctaggggaggggccaggaagagcagacatgcatcttggagctcatcagattagcactgtggggcatctggctttagcacatttccctaatggagtagaagtgagtgtagtgggaaaatggacagacttgactaggaagctccactgagcaggaaaggcataattagaggctggagccaaaaactctccatacctggatggtaaggtttttctcatggtgattgcttatagcaagtccactccccccaataaatcttcaaatctttccaatcttttggggtaataattagcatagatagcagtctgttggctagacagttaaaattccttttcataatgaatacttcattagaacatgtagaaaaaggaaaaataaaatatatttttaaaaaggaatacttctgagtttcctcttactgacgttagttttctccattgcaggaagttggcagtatcatcggaaaggtaagacaatttcacttcaacttcaattaccatttagtaattctggattgaagtagcagttggagctcatgcttgacttttcctttacagaaaggagaatcagttaagaagatgcgcgaggaggtaagttatgaaagactgagattgttaactttgggaagtaaaaaacctttaaaacaagtgaaaattctttttcagaaattaggaaggtctcaataagggaaatatgtattttttttcggcttggttatttgtagtgataatctggggagtgtattttttttttcccctttttgggaagtgtggttttgacaagtcagaattctttcaagacttaaggcagctgctgtaggctatctttgaggatagtcatggagcagtagtgtttggaatgatgctgactttgctttgcatcaggatcatgtacattggcagtcttataagggactgtagatcctgtacatactcagatcttctttgttttaacttcttttggatcttgtttcctatctagagtggtgcacgtatcaacatctcagaagggaattgtcctgagagaattatcactttggctggacccactaatgccatcttcaaagcctttgctatgatcattgacaaactggaagagg

SEQ ID NO: 1661 - DNA, 914 bp, Homo sapiens
gggctttttttcttaagtggaaaatgcttggataaccgaggggagagggggctgcggagttaaagaaagggtagacgggctcccagttgccgagttaatcaggacgtttctcggggtaacgaatttttaaattacaaaatgcctgccgatgtaatcccagaccgagctatttatggaaggggtattggacagcagtgttagcagctggattgctggaatggggtacctttatcttgacctagtcaggagggaaattcgacaaatttcttggattacttggtttggagttagaaatgcatctttgtactttacctcaagaaatggcttcaaataggtttcctgttttgttttttttttttttgccttttcgaagttgcgttattgtgatatttgtaaagggcttcctattacatctgcaagagggtaaggaattaaactaccaggtctttaccacatcttattaaaaaaagaaagtcattcttacagacctaacgcttcttcccccaccaagcactatttttccatgagtgaaaagtgttgaattctgggattttgccagcaattaattgtattctgaaaatggggaaatgatgtgctttggggatgcacttatataatcacttacattcttggagtagccagaggacagtttgccatatacagaatggtgtgacagacacttaagcacctaagatatttagggtatgggctttgtgttagaggaaagttaacacagtggctggttttgtgaaggaggaaatctagctgtgggaggagagagatgacatgttgagttttaaaaggatggatacttaaaatgtcattggggacattctacaacttgggagaggtcctttctaaagctgttacgattaggtgctaaaggaggtattgaaggcaaaggcatatccaaa

SEQ ID NO: 1662 - DNA, 913 bp, Homo sapiens
gggctttttttcttaagtggaaaatgcttggataaccgaggggagagggggctgcggagttaaagaaagggtagacgggctcccagttgccgagttaatcaggacgtttctcggggtaacgaatttttaaattacaaaatgcctgccgatgtaatcccagaccgagctatttatggaaggggtattggacagcagtgttagcagctggattgctggaatggggtacctttatcttgacctagtcaggagggaaattcgacaaatttcttggattacttggttggagttagaaatgcatctttgtactttacctcaagaaatggcttcaaataggtttcctgttttgttttttttttttttgccttttcgaagttgcgttattgtgatatttgtaaagggcttcctattacatctgcaagagggtaaggaattaaactaccaggtctttaccacatcttattaaaaaaagaaagtcattcttacagacctaacgcttcttcccccaccaagcactatttttccatgagtgaaaagtgttgaattctgggattttgccagcaattaattgtattctgaaactggggaaatgatgtgctttggggatgcacttatataatcacttacattcttggagtagccagaggacagtttgccatatacagaatggtgtgacagacacttaagcacctaagatatttagggtatgggctttgtgttagaggaaagttaacacagtggctggttttgtgaaggaggaaatctagctgtgggaggagagagatgacatgttgagttttaaaaggatggatacttaaaatgtcattggggacattctacaacttgggagaggtcctttctaaagctgttacgattaggtgctaaaggaggtattgaaggcaaaggcatatccaaa

SEQ ID NO: 1663 - DNA, 3748 bp, Homo sapiens
tcctccgcccgcccgcggggcccccctcgccttcccgcccgcccctattgttccgcccccggcctcccgcccttccccttcccgcccgctccccttttcccctcagtcgcctcgcgcctgcaggtaagcctaaaaatttcccttgcgcccccggctatggctacaatttccacttttgtcttcttcttagccggctcgggtcctagtcacgagccgcggtctcgcgtagtcccgcgtgagcgcctaccacctcactgtgccaggccggtcattcacgcgaggccctggctctggcgcggcctagtaggctcgcgcaaggcctattcccccctccccccgccttttcccggtggcggctgcgcaggagtcagggagggcgcgcgcgcggtagggggggcggcggtggatttgttggttgtggggggttgggggaggcgatggccggcttgctggccgggcgggtgagcgcggctccccgcgggggtcaggcgctggcgcagccacacggggaggcgctattagtccggcccctccccctgtatcgcagcgcccccccccgaccgaaccgtttattttttcccccctctttctagtcgagggaagggggggctttttttcttaagtggaaaatgcttggataaccgaggggagagggggctgcggagttaaagaaagggtagacgggctcccagttgccgagttaatcaggacgtttctcggggtaacgaatttttaaattacaaaatgcctgccgatgtaatcccagaccgagctatttatggaaggggtattggacagcagtgttagcagctggattgctggaatggggtacctttatcttgacctagtcaggagggaaattcgacaaatttcttggattacttggtttggagttagaaatgcatctttgtactttacctcaagaaatggcttcaaataggtttcctgttttgttttttttttttttgccttttcgaagttgcgttattgtgatatttgtaaagggcttcctattacatctgcaagagggtaaggaattaaactaccaggtctttaccacatcttattaaaaaaagaaagtcattcttacagacctaacgcttcttcccccaccaagcactatttttccatgagtgaaaagtgttgaattctgggattttgccagcaattaattgtattctgaaaatggggaaatgatgtgctttggggatgcacttatataatcacttacattcttggagtagccagaggacagtttgccatatacagaatggtgtgacagacacttaagcacctaagatatttagggtatgggctttgtgttagaggaaagttaacacagtggctggttttgtgaaggaggaaatctagctgtgggaggagagagatgacatgttgagttttaaaaggatggatacttaaaatgtcattggggacattctacaacttgggagaggtcctttctaaagctgttacgattaggtgctaaaggaggtattgaaggcaaaggcatatccaaaaaaacaaattttctttctacacataactagttactctaaagcagaaatgttaggaacaatgttaggaattgtttcataggtgggaaaagggccatcttgtataggaaaggtgcatttgctgctgttcttaaaaacaaaaaattttagcaatgccagttttattttgattgttttctttggaaggaaatttaagatttaatagacttgaaataaaaactggatggtaaacacaaaagcaaggaaaacatctcaaatctgagtaacaagttgggttggaaggaggaataggagaaaaagactcaagtgtacttaatgtatcgagtcattttctaaaggggaatatggaaccccagcctgcgtggaaggcatctcagataatgccttttcagtgagggtgttgatctaaatcttttagaaatcatttggtgttagccatcaacggttgaaatttgtaatgtgggatacatctcaatttccttatctacaaattgctactacaaagaaaatttacatgtgttctctctagttttcaacttaaactgctccccagcagggaaacaaaaggtcatttgccctcgctgtagttggagatttgcactcatgatttccaggtgtttctgaattctttgaagctttttctgctgaaggacaagtggtgcacgttcagcagtttccttagaaccattgccaattgaaagaaccttgttcatcctgagagtcagcggaaaccctgtcattaatgagaggaactggaaagttgccttctatactgtgtaacagaacctgagctgtatattttgtcatgcagttgtgcttggtgtgtatataagtctgacatactgtcatttaaggaaaagtgtaaagtagaaaatattgataaggtgaaaataacttgggaaataataaccttgttgttttcctcctctgattttggtcatgtttgcattttagtttttggctttcacccccaaccagtgaccaaagacttgaccactcaaagtccagctccccagaacactgctcgacatggacaccggtgtgattgaaggtggattaaatgtcactctcaccatccggctacttatgcatggaaaggtatgctctagcttgggaaatggggtcatagtaactgctaggggaggggccaggaagagcagacatgcatcttggagctcatcagattagcactgtggggcatctggctttagcacatttccctaatggagtagaagtgagtgtagtgggaaaatggacagacttgactaggaagctccactgagcaggaaaggcataattagaggctggagccaaaaactctccatacctggatggtaaggtttttctcatggtgattgcttatagcaagtccactccccccaataaatcttcaaatctttccaatcttttggggtaataattagcatagatagcagtctgttggctagacagttaaaattccttttcataatgaatacttcattagaacatgtagaaaaaggaaaaataaaatatatttttaaaaaggaatacttctgagtttcctcttactgacgttagttttctccattgcaggaagttggcagtatcatcggaaaggtaagacaatttcacttcaacttcaattaccatttagtaattctggattgaagtagcagttggagctcatgcttgacttttcctttacagaaaggagaatcagttaagaagatgcgcgaggaggtaagttatgaaagactgagattgttaactttgggaagtaaaaaacctttaaaacaagtgaaaattctttttcagaaattaggaaggtctcaataagggaaatatgtattttttttcggcttggttatttgtagtgataatctggggagtgtattttttttttcccctttttgggaagtgtggttttgacaagtcagaattctttcaagacttaaggcagctgctgtaggctatctttgaggatagtcatggagcagtagtgtttggaatgatgctgactttgctttgcatcaggatcatgtacattggcagtcttataagggactgtagatcctgtacatactcagatcttctttgttttaacttcttttggatcttgtttcctatctagagtggtgcacgtatcaacatctcagaagggaattgtcctgagagaattatcactttggctggacccactaatgccatcttcaaagcctttgctatgatcattgacaaactggaagagg

SEQ ID NO: 1664 - DNA, 172 bp, Homo sapiens
gccgccctccacccgccccggggtctctttcccccttcctcctcctcctcctccacccccccttcctcctccgcccgcccgcggggcccccctcgccttcccgcccgcccctattgttccgcccccggcctcccgcccttccccttcccgcccgctccccttttcccctcag

SEQ ID NO: 1665 - DNA, 88 bp, Homo sapiens
ggaggcggaggttgtggtgagccgagatcacaccactgcactccagcctgggcaacagagtgagactctgtctcaaaaaaaaaaaaaa

SEQ ID NO: 1666 - DNA, 88 bp, Homo sapiens; identical to SEQ ID NO: 1665

SEQ ID NO: 1667 - DNA, 246 bp, Homo sapiens
agaggcagcagccggagcagccgcagcctgcgccctctcccgctcgcccgccctccgcccgcccgaccgctctccgccgccctccacccgccccggggtctctttcccccttcctcctcctccttctgcaaccccccttcctcctccgcccgcccgggggcccccctcgccttcccgcccgcccctattgttccgcccccggcctcccgcccttccccttcccgcccgctccccttttcccctcag

SEQ ID NO: 1668 - DNA, 10434 bp, Homo sapiens
ctcaggaggaggtctgcgatttgctccatgccgcacccttccaaaacatcttgcctagagtctacatcaaaggtaagaaaccactacagcagctgaatagccaactggcgtttgaaccttattctcacttcctaattgcagtcaactcagatctagtcagcaagggggaaggttaaagctttggacacctattgaatagccacagaatcacaaattggaagatggacctagccacctgcattgagcctgctgacctcatgaccaaccagacagactctgaggcctattatctttgattctgtcattcattcaaattcttcaacaaattccttataagattatagaaatgacactccaggccctgtcccttgttccttctaacatatctctagtatagtgatatctagacttggaatttaaatatatatattaatatattaaaccactatactagagatattctagaaggcagacgattccattcttggacaaatcatagaacatttttccttgtaaaaactactcacactttccagaacgaaggagagcagttccacacactccatcccatttttggaatgcagatacatcatcaggtcctttgggagtttttccttccccagttgccctgtgttccctgagtctcattttctgctctgcgactccttttgcagagggggagcgcctggaggtccggatgaaacgtctggaagccaagtatgccccgctccacctggtccctctgatcgagcggctggggacccctcaggtaccaatcttatataataaatgggctctgatcactgacaggaacttgagagcatttgaccaaaccccctcattgtacaggtcaggaaactgaggctcagagaagggaagacaatgtccaatacccaaaaactggttaatattaatagcaacagcaggtctggaatgagatttgctgactctcaggcctgagtgtttcttctgtagcctgtatcatgtatcctgccaacaagtcgtctgcttatttaaacaagtatctactgtgtccctggtagatatcaagaatctgttactttgcctctgaaaattaaaactccacatactctgtgagccagcagttcacttctggatacttttgctaaagaaacacttaacggaacactagatgcttatgtaacattgtttgttaaagcaaaaactagaaacaacccaaacatctaatagtaaagcattgattaaataaaatgccaggttattgcatatcacgtatgtacttaatacataatgaaaaggcaaaattagatcttgttgcatcagtgtggatagatcataggcacagtcaattggatgaagcaagctgcactacagttcatgcaggatgatggctttttttaaatgcacacaacaaaaccatataaaactcttctgaaaatgtctggaatgatgtctacctagtttatcatggtggcaacctctgaagagagatgagatagaatagagtgggagagaaagaagacttcagccttttctgtagtgttctaacaagggtgaatgagcttatatgttattctgtaattgttaaaaaccagtacgagtcacgatgaacatcaagatgagtaagacaggacccctgccttcagagaattcagattatgcagggagcaggaaggaagagaaatagggggagagcggagaaacaaaaggcatgtgctatctcctttcaagttgatttcagcaagcttcacattttgggggcaggcaggggaagaattctagaagagaaacagggtattctagtgagacaagccaatgctgactgtttaagagatttaggattgaaatctgcttttgaactcgcattccggcggtcctctttggtgttctcaccaagggcaaaaggactcaaatcctcagcggaggacagaaggtggcctctcttctggcaaaacatggtaagtatttttggagcacgatgcaaagcctcatctgcacagacgtcatgctgaggaagccaccccagcccggcccccgcatgccaccaacctccttctgaaaatggtgattaaaagctaatcatggggccgggcgcggtggctcacacctgtaatcccagcactttggaaggccgaggcaggcggatcacctcaggtcaggaggtcgagaccagcctggccaacatggtgaaaccccaactctaccaaaaacacaaaaattagccaggcgtggtggcgggcacttgtaatcccagctacttgggaggctgaggcaggagaattgcttgaacccaagaggtggaggctgcagtgagctgagatcatgccactgcactccagcctgggcaacagagcaagactccatctcaaaaaaaaaaaaaaaaaaaaaaaagcagctaatggtggttgggttctttgactcaccagagagagaactcagatactgtagagcacacacattttcttttttggcctgcagaggctaaacagaggagatcctctccagtgatttccttttagggagaaaacccagtgagtgacatgtgaatgtgtctgctccactgctgctgtcatcctgcaggcatcccgcctctcactccgaagtctggcatgtgtttccacttagaggactgtgaattccttccctgttctggtgaacaccatttccttgggactgatagaaatctcagtctgtcaaatgcctagtgtttaacaaataaaagcctagacattctgtgagacaggaaatgctagttttataagtctcccattcctcaagaaatagtccaaaacttagtcattccatgaaccaaagaaaagttaacaaaatattaacttctgagaaggtttgggcacagggtactcgtaagatatctaggaggtgacagaggaagtctgcaacatatttaaagccgggaagcttgagcagtattgcattctttgcatttgtttgagacaaattgaagtgacctggtttgttgccccacactatcaccaagaagaaaaacttggggctgggggaggttaaaagacagggatccttgtcccttctccacccctgaattatctagtgcaagccatttttctcaatctttattttaccatctatgtaatgggatcatagctgctttacctgcctttcttgttatcacgagcaaataatagaagcataagaattcaaaaaacattgaggtttttgagaaggaatattgttacatattccttctcaaagttatagagaaggaatattgatgattccggcacagcttcacaaatgttttctctatccccttgttaaactcacataagaagggcagaaagagaaatactccccaccgaggggaatagaaaagaaatggataaaagctatgttaaacactcccctccctacataacaccaaactgcaaattgagggtatttgcaggaagcgagctataaagcacattttcaaagcaaagagaaaatgatagacataccaaaagacaagatgtgaaagaaaactcacaacataaaaaaatacaatgttaacacacacggaaaagtatctggccttaccagtaatcagtgaaatgcacattcaaagaatgaggtaaaatttttaaaatttttcatctcaagttgatgaagactatttctgaatggaataattttattattattattgagacagggtctttgcctgtcacccaagctggagtgcagtggtgtgatcacagctcactgcagcctcagcctcccaggctcaagcaatcttcctgcctcagcctcccgagaagctgggatgacaggcgcacaacaccatacctggataattttttttttatttttatagagatgaggtgtcactatgttgcccagtctgggatacaggagtattcatgagggtacaaggaacaggcttcacacaggtagatgcacacggatcaactttccttgagaatagtttgccactgtatagcagatgccttttacaatatttatactcattgacccttcagttactaagtattcatcctaacaaaatgctcagcggtagctcacacgatgttatgtataaggatggtgggctgggcatggtggctcacacctggaatcccagcactttgggaggccaaggtgggtggatcatgtgaggtcaggagttcaagaccagcctggccaacgtggtgaaaccccatctctactaaaaatgcaaaaattagtcgggcgtggtggcccacgcctgtgatcccagatactcaggaggctgaggcaggagaatggctcgaacccgggaggtggaggttgcagtaagccgagattgcgccactgcactctggcctggacagcagagtgagactctgtctcgaagatttaaaaaaaaaaaaaaaaaaaaggatggtgtctttagaattgttcataattgtgagtttgtaaacaatttaagataaccaagtatatacgactaaatgaattatatcaatgaccattaaatgtagtcattccttcacaatattgaaagaaataagttgaagttactgatatattaagaaaaaagcaacatagtaatatgactcaaattgttaaatatacatgtatacattcacatacctaaacaaatcatacatattttaagaatgctcatctctgggtaatgaggtttatgaaatatttttattttcttagaactttttttttcttttttcctaaccactaggccaccaggaaaggacaaacacttttcaaaggaaagggagaaagctcctgtgtcattcaaggcccttttcattggctgtagtgggtggggggcaccagagttcaaagtctgtctgcagattgataacctcagttgccagtttttctattcccccttccaggactgtctgaccctgaggactgattcaaattaaccaaatgcacagtagattaattagtaaaccagaactttgcattaatttgcaaaatattcatggcttgagaacaaattggggtcttttatttactgagcgtctcccctgtaccagacattctctttctgaaatggggagccctttctggggccaaatagaacagagtaagaacaaataaagagaatacaaacagactcaaacacaggctcaggattttttttttttttttaacacaagagatatttttagctaactatggcaatctgagcagttccctctctgctcccaagctgttcctgccaatgaaatcaggatgagtcaccgggaatcagggttccctctccttcgtgtttaaaacacacattggcaagctacttctccaattcatctttttcctagatttctttcagttggtagttgtcatgacaactacactcatggtccacatttataagagactcctgcattggtgtctcctgatttccttcccttcatggattcacttaaaagtcaccctctcttcctgggggcctccagggagtgagcttccggggtaggtcaggcaggtgcctcccagccaccctgtaaaatggctccttggtgaaacctcccactggggagctgatcccataagtccccttctgtggatctctcagtgtgagaagcctgccttttttagctttgttcacagatttggagaccttactttaacctcagattttaacatttaccttactttgcagatagctttcaggacctctacccctacatgttttgactcataacatgtgtagtaatgtgttttgacatctagtctgtctagccagctgcttattagatatgcagtagccagaacccagatgaaaagccagtttacattattaatagaggtcatttgtaactgtcaaagaagcacttctagaggaaataattatctgaaatcatgggcaagttttaaaagtaacatatgctcattgtagcacattcaactgtacagaagtatttaaagtcaagagtgacaatcccactcactactccaagcccatctgttcccacaactgatgttagtccttctaaaatatgctttacacacacacatcacacatactttcatctgtgtgattgtacattgtcaatgtttttaagtagaattgtagtatacattcatttctgcaatttgttctatttactttacaacttaaccaatagatctagactactgggtcaagtgtgagctttaacactcactggctgcctctctgaaccttagtttcttcgtctgtaaaatggggagagtaatggcatctacctcatgggatggaatggactcaatacctatcaagtgcttagaacagggcctgctttattacccacactcagaaagcataagctagtagtaattatagtagaagcagtagtactactagtagtatcatgtcagtcttttcaatggctatccagaattcattatgtgggtaaatcataattttaaaaattaatccgctactgatggtgcctggattttacttaacaccagtaagacttaccatgaaacttccctgctgttgcattcaggatcatcaattttgtgccctgctctgaacaagaccagttctggtgaaccaatttcaggtgcagccagctccagagttcgggaatctgtggtgggaggtggcagatgggctctaagatgtggatagaaggtgtatgtgcccttctgtttccagcaaatcgccattgctcgcgagggtgacctcctgaccaaggagcggctgtgctgtggcctgtccatgttcgaggtcatcctgacccgcattcggagctacctgcaggaccccatctggcggggcccaccgcccaccaatggcgtcatgcacgtcgatgagtgtgtggagttccaccggctgtggagcgccatgcagttcgtgtactgcatccctgtgggaaccaacgagttcacagctgagtgagtaccccccagagaaggcagggttacccccaacctgcctgtgctcctgcaagtcatggggctgccagagttcagccagaaacgtgggcagggggtgggggtggttggccaacaactactttgttgagtgtgttgagctgactgcattggcaagaaagagcccagtaagggtttgatagtaagaccctcactgcctgcctcacccccactacactgtactactggaaaatgaggagcctttaggagtccttagagcagacagcagagctagttcttcctgccctcacccagctacatgtctaggacagagtggaaaggcagacaaggcctcccctccagcagccaagagctctaggaaaaaggcgtggtggggagaggaggcttcctggagaaagtggtgttgatgaagctgtttcagagcagcgctagcctgtaggcttccagtacagtgatggggaactggggacacctgcccgggttggggctgctgcttgaggacaaaagagacagccaaaggatgactctactgccatccaaattgcctaggtctcttgagagttgggggccaggcctcttgagagttggagctttgtcagaaccaaaaggactcagcctcaaccccagcagcatctgcccaccatggcctgtcccttccctttcagcctgcttctggccagttggcctcctggtttgaaatggcccctcacctgctaggtgttcttttagctcctttagagagtcaagacagattctcctttgacctgcacggagtaatcagccacatacatctcaacagctgggtgggtttttccttgcaaattcagagcgtctttagagctgattttttttttttttacattagtgatgcaaatgtaatttgtggccggaaggacttatgacataactaccatccctgcaactaatgaacccaccctcacagcttcctttgtacccattttataggttaagagacttggcccaaagacaggcctgcttagtagctgtactcctggcccaagatgaggctccctccctccctgccctcctcccccgacctctcactccagctgcttcctccccctgctcccaggcagtgtttcggcgatggcttgaactgggctggttgctccatcattgtcctgctgggccagcagcgtcgctttgacctgttcgacttctgttaccacctgctaaaagtgcagaggcaggacgggaaggatgaaatcattaagaatgtggtgagcaggctggtggctaaggcctgggaggtggggctgggctgacaaccaggcttttaccagaaaagcaaacaaggaggagctgcttgtgaaggccagctccccacacggcaagtacaaagatactataggctggggacctgcttagaggaagtcgtgaggtcgtgagtcacccactcatcacctactgccatgaatcagttcaccccgaagggcagggctgggctccagaccgggagcacatcttccctgtcccaatcagactctgctgatgccagtttctcacctgtacaaatattcaccaaataccagagttgtacggggcacctggatgggataggtactggcgtggggtgagccaggctgctatgggaagggagagaaggacccttaaaccaggctgagggcagagaaagcttcccaggagagggaggctgtgtctgggctgactccagaatggcccgcagcaaagaaccaagcagcaaaggtggtatggggcgggtaggatgctccagacagcaacagtgacagcagaggcactgaggcaggaaggcggatcgaagggtgggtctcagggacccagtgagaggagagagaggtaagagccacctcacaaagggcttttttaaaaaatacacataaaatagtttcaatggtaattttcagtatatgattcagtggcatgaagtacacaagtattgtacaatcattcccaacatccacctccagagatttttcatcttccccaactgaaactccgggcccattaaaaaataattccattttctccccagcccctggtaaccatcattctactttctctatgcatttgactactctaggtacctcatataaatagaatcacacagtatttgtcttttcgtgactggcttattttagttaggatgtcttcaaggttcatccatgttgtagtgtccaaacttccatcctttttatggctgtataatattgcattgtgtatatagaccacgttgtgtttgtccactcaggttgctgtcaccttttgggtatttttgaaaatggttaattttggctaccatgaaacatgggtgtacaaataactctacaaatttctgctttccattcttttgagtatatacctggacgtggaattgctggatcgtatggtaattctatgtttaactttttagaaactgccattctgttttccatagtggctgcacaattttacattcccaccagcagtacacaagagttccaatttctccacatcctcatcagcacttattctttaataatagtcatcctgaggggtgaaaaagttatcttgttgtgattttgatttgaatttccctaatgactgtcactgctgagtgctatattcatgtgttattggccatttgtatatcttctttagaaaaatgtctattcaagtcctttgtccatttttttaattgagtcatttttgttgagttgaagttctttacatattctagatattacttatcagatataatttgtgattattttctatttttcggttgccttttcattctcatggtgtccctttgatgcatgaaagttttcaattttgatgtagtgcaactttttgcctttgcttttgatgtcataccccaagatattattgccaaatccaacatcatgaaaatttttcccctatattctcttttaagaatttcagtttaatctcatggttacgtctctaatccattctgagttaattttttgtatatggtataaggtaagcgtccattgttattttttgtgtgggtatccatatttcccagcaccttttgttgaaaaggctgtttcccccattgaacagtcttggcacccttgttgaaaatcatttgatcatatgtgtaatagtgtatttctgggctctctattctgttttattcatctgtacatctacctttttaccagtgccacagtgttgttgattattgtagctctgtagatcgttttaaaacttggagagggtttttacggtccagttaacacttgattgccagatccaggggattccataaaaggactttaagaaagtgacatgatcactgatgcaggggaccctggacctcagtgacttctcctgttactccctctttccacccccactttgtcctgccctaacttgaacatccccttccttctgtagcccctgaagaagatggccgaccggatcaggaagtatcagatcttgaacaatgaggtttttgccatcctgaacaaatacatgaagtccgtggagacagacagttccactgtggagcatgtgcgctgcttccaaccacccatccaccagtcattggccaccacttgctaagcagaagatcatacagaccattat

SEQ ID NO: 1669 - DNA, 227 bp, Homo sapiens
tgcgggagtcttgggagggggcggcgcaagggggcgtctgacccgggcccggcggccgtggccgctgcttggctgtgggagccttttgtctccgcgtgtgagaaaatggggcgaaagctgagcgcggggcgggcgtgcgtgtggggtggtgcgtgtggtgtgtgtgtgagatcgggaggcgtttggcttggagccatttttttttcttaaattgtggagacagaaaa

SEQ ID NO: 1670 - DNA, 212 bp, Homo sapiens
tgcgggagtcttgggagggggcggcgcaagggggcgtctgacccgggcccggcggccgtggccgctgcttggctgtgggagccttttgtctccgcgtgtgagaaaatggggcgaaagctgagcgcggggcgggcgtgcgtgtggggtggtgcgtgtggtgtgtgtgtgagatcgggaggcgtttggcttggagccatttttttttcttaatt

SEQ ID NO: 1671 - DNA, 845 bp, Homo sapiens
tcttcctccgtgtctgggttctccatttcttagttgaagttcttgcagacaaacccgctgggaatggtgcggtggtcctggaaagttctccccgggctccgcagcgccagattgctggggtgtgaggttgtgatggatgagaagtgacagggcaccttgcacatagccacactgcaatccagagaggccatgggcacactcatctcgcgttgtgcagtgatagccatattctgaatgggagagtcacaagtgtcctgtcttctagtgaagtccttgataggtaactggcatggaagtgatgatatgaataaattgtgaatagctaaatttgatgtttagttcttcagtttaaagaatagtacttaatttgtgtgaaagttgttagacgatgtggatttcctttaagaattttaagagctctatattagggctgtggaagtagcaggtttatttatttatttttggttttgttttttacatgatgtggggaggtgttggcttccggagttaaagtccgtagtgctgaattagagggaggaatatggagaaaaatgttttcaacacaatggaactttcatacatggaagatgattaggaagtcatgattgcttcctgtggttgagaaatacgaactttatgcatttactattgtttattttaaaataatgtcctcttcatttagaaagagtttgtgtgtataaatcatatttatctttcagccttgcatatggagctctaagagtggcagtttggttattcacagttttttacctaccaaaactctgaatagaaaaagatgtttaacccataaagcaatgtgtggtacctgaagcctgttttaaatg

SEQ ID NO: 1672 - DNA, 845 bp, Homo sapiens; identical to SEQ ID NO: 1671

SEQ ID NO: 1673 - DNA, 560 bp, Homo sapiens
ccccgtccgggagggaggtgggggggtcagccccccgcccggccagccgccctgtccgggagggaggtgggggggtcagccctccgcccagccagccgcccggtctgtgaggtgaggggcgcctctgcccggccgcccatactgggaagtgaggagcccctctgcccggccagccgcccggtccgggagggaggtgggggggtcagccccccgcccggccagccgccccgtccgggagggaggtggggggggtcagcccccctgcccggccagccgccccgtccgggaggtgaggggcgcctctgcccagccacccctactgggaagtgaggagcccctctgcccggccagccgccccgtccgggagggaggtgggggggtcagccccccgcccggccagccgccctgtccaggagggaggtgggggggtcagccctccgcccggccagccgccccgtctgggaggtgaggggcgcctctgcccggccgcccctactgggaagtgaggagcccctctgcccggccagccgcccggtccgggagggaggtgggggggtcag

SEQ ID NO: 1674 - DNA, 100 bp, Homo sapiens
cacgccaccacgcccagctaatttttgtatttttagtagagacagggtttcaccatgttggccaggctggtctcgaactactgacctccagtgatccacc

SEQ ID NO: 1675 - DNA, 138 bp, Homo sapiens
cccagctaatttttgtatttttagtagagacgaggtttcaccatgttggccaggctggtctcgaactcctgacctcaagtgatccacctgccttgacctcccaaagtgctgagattacaggggtgagccaccatgccc

SEQ ID NO: 1676 - DNA, 432 bp, Homo sapiens
gcactcatgccaaggttgtcggttcgctattacttcttgaattacagcttccatatttgcctaccctgaagtcatactgctactcttaggttcactactgaacaggacaatttctttgagtagaaaagaaccattgccttttataattagtcatttacatttcctttccttggggaagaattattgaattccaagaactgtttggtggcatggaggtaataggaatattggggaaagtgactaaattatctcagaacttgtcagagaaaaggccagaaacgcagtggcgtcatgactcctttagagaaaggtcaggaaacggccaggcccatgactcggggtggagtggactctgcctgtgagcaggtattgcccttcaggtggggctggcgtgagttgaccattgatgttaataccagggaggcgacaggg

SEQ ID NO: 1677 - DNA, 432 bp, Homo sapiens; identical to SEQ ID NO: 1676

SEQ ID NO: 1678 - DNA, 1118 bp, Homo sapiens
cgagtccgtttagatgtgtcaaatccacacctgccccagatgccggctcaactgtgcccctgtggggaagaatctcagatacatgatttcagagccccagtcaataaaattgaggactcctgccaagattttagaaaggtttattaaacagaaaagaatgtgttagtcactgggctctgacagaaggttcattaagaatgaatcattgagcagcaagcaatttaaaaatgaaaattaaaaaattcaatttacagtagctttgaaaaccctaagaatccgtgtcgttgcctgaatgaatagttgattccttttaattactaagtaatactccaccgtgtgaatctatcacagtttatccatcctcctgttggtggcagccgaggctgtttctggtcttgggctgttgtgaataacatttctgtgaacactcatgtccacatcttcttctagtggcctgttaagttctggctgttccacgtcagaatgcgatttctccaacactgcgttccccacagggtcttcatttattctgattctgatagcaatcctttgtcaagacagatattttgagaatgtttgcttctgtggcttgtcacttcatttcattaacaatgtcttctatgagccaacagtttcaactttgataaaatcgaatttatcattttttttcttttgtggtaatagttttctgtgtcctgcctacctccacaatgccaacatatacccatgttatgattgataattttagttttttggttttaggtctacaacctagcttgacttaatttctgtatatggtgtaaggaagatgtcaggcttcattttttcctctacagatatcctggtgaacataatgccatttgttgaaaacagttttgtcctatttcacttttgctgaaaattagatgattgtataggtgtgtgtctgtttcgggacacactgttttgtcccattgacgtacaaatggatcttaatccagttcacactgtcttcattactgcagattttcatgggttgggtaaggccagtcctctttgttcttttaaaaaattaagtatttttggtcctttgcatttttatataaagtttgcttttgccacttcctacaaaaaaaaaa

SEQ ID NO: 1679 - DNA, 155 bp, Homo sapiens
gagaagttccaggctgggctgggcacggtggctcatgcctgtaatcccagcactttgggaggccgaagtgggtggatcacctgaggtcaggagttcaagaccagcctggccaacatggtaaaaccctgtctctattaaaaatacaaaaattagcc

SEQ ID NO: 1680 - DNA, 155 bp, Homo sapiens; identical to SEQ ID NO: 1679

SEQ ID NO: 1681 - DNA, 1118 bp, Homo sapiens
cgagtccgtttagatgtgtcaaatccacacctgccccagatgccggctcaactgtgcccctgtggggaagaatctcagatacatgatttcagagccccagtcaataaaattgaggactcctgccaagattttagaaaggtttattaaacagaaaagaatgtgttagtcactgggctctgacagaaggttcattaagaatgaatcattgagcagcaagcaatttaaaaatgaaaattaaaaaattcaatttacagtagctttgaaaaccctaagaatccgtgtcgttgcctgaatgaatagttgattccttttaattactaagtaatactccaccgtgtgaatctatcacagtttatccatcctcctgttggtggcagccgaggctgtttctggtcttgggctgttgtgaataacatttctgtgaacactcatgtccacatcttcttctagtggcctgttaagttctggctgttccacgtcagaatgcgatttctccaacactgcgttccccacagggtcttcatttattccgattctgatagcaatcctttgtcaagacagatattttgagaatgtttgcttctgtggcttgtcacttcatttcattaacaatgtcttctatgagccaacagtttcaactttgataaaatcgaatttatcattttttttcttttgtggtaatagttttctgtgtcctgcctacctccacaatgccaacatatacccatgttatgattgataattttagttttttggttttaggtctacaacctagcttgacttaatttctgtatatggtgtaaggaagatgtcaggcttcattttttcctctacagatatcctggtgaacataatgccatttgttgaaaacagttttgtcctatttcacttttgctgaaaattagatgattgtataggtgtgtgtctgtttcgggacacactgttttgtcccattgacgtacaaatggatcttaatccagttcacactgtcttcattactgcagattttcatgggttgggtaaggccagtcctctttgttcttttaaaaaattaagtatttttggtcctttgcatttttatataaagtttgcttttgccacttcctacaaaaaaaaaa

SEQ ID NO: 1682 - DNA, 19846 bp, Homo sapiens
gcgcgatctacactgagacaaggaagttggaaaagccgagtagttataccagaagatcagggtctcacagactcgcaacttctcttccattttccccaatggcgcatgtcttacaaaagtaggtaaaaaaaaaaaaaaaaaaaaattggaagaaaggcggaatacgcatgcgtacttcacaccccgccgctgtcccgccctcgcctcgaggtcgccctcggtcttctgacccccgtcctctccccgcccacatctccttggccccgccccactcccgcggggctattgtccccggtaaactgcagtttctggttcgagactccaatcctgtttcgaattgctgcttgctgccccttgggctggggataatggaagttctttcccttcccaactctttccagacccaagcactctgggactcactccatagtccaggagttccaggttccggtgagtcttgggggactagggctggggtgggaggctcgctggccctgcagtccacctgctctccactctcacggtcgtgactgctccgcggatataggctggagacccgaattccagtcccagccgggtcacactttgctgtgggacccagagcaagcctcagaacctcatttttctcctctcactgtcttatcagaatgtaagggtatattatgctgctctcttattcatctgattgctgctctggtttcctgagggtggatgtctgcgtcttttccatgccttctgtttctcacagttcttagcacctcacagcctggatgtgcttagtaaattctggctggctgatttaaaaaagtgatagctaacatttatggagcacttaccacatgcttcataaatatctctcagaattcttgcgccaatccacagaagtaggttttattattagatccactttacagatgagaagattgaggctcaggagaggtcaagtcacttgcttggggtcacagatatctgaaaagggtagagctgggatataaactcatggtgctatgtgactgattgtatattttgtaggattatgttccatggcagcagtccaagcaggaaaccaagccatctactctgcctccagtccaacaagccaacagccttcatacaagcaaaatgaagactttgactagggtccaaccaggtgggcggaggcacctgggagctggtgtgggggttggagacaggatagagtggctgcttttggctcttggtgacaccacttatattagggtaggctaactgatgtaataaacaatgcccaaattgcaagtattgatatagaagtttatatctcatttatgccacagtacatttgtggatctgaggaaggagggattctgttccacatggtcattcagggatccaggttcctttgaccttgtgggtctgatattttgtaaggtcttgaagtcttctgctggatacttttgcatccagctggcatagagggaagagagagaacaagaacatggacaattatgtgggcattttttttggggggggtccagatttgaagtgacaaatgttactcctactcatgtttcaggggccataatttagccacatgacctctgctaaccacaagggaaggtgggaaatgtagtccatctgtttttccaggaggaaaagaaaacaaggtttggtgaaatcgtagaataaactctgccacatcattatcatgctttacaggggagttccgaggccttgggtcaggctcaggcagacatggggtcagattttggctctgccatttactcacttggaaaaatcattcatctctctgagccttggttttctcatttgtgaaatggggacactaataccacctaggattgttgtgagaattaataacaaatattttgtaatatttctttggtatcctgaaatgaacttcatagacaatctagcatacttatgtatacatctatgtataaaatcactcataccacctcattgcctctgagtaagtaatgttagatcagctcccctgtgggcaacactgaaacacagaaaggagatgggagagtagaatgccaagttgccctgcatctcactaccttattttacctcactgatgctgggtggggatagaggctcaggctcccaccaggctctactgacataggtaggctgggggaggggagtgaagcccagaggtgatgagtcccacctcatgacacttcatgaaatcttgtcactgctagactctgttgacactaccctagagagagagtcagagcactgtcttctgccaggtgggggttagaagatgacctccccactcatccctgccagcactatcccagttggggaatcagcaccaccaagcagggaatgaaggatcagctacctgctggacactgccaacacttcccagtgaggaaaagggaataaatccataccaatattcccaatgggtttttcagaaagtggaaaaacaattcagtggaggaagaaagccttttccatgggtggcgctggagcaattggacacccataggcaaaaaaaaaaaaaaaaaaaaaaagaaaaagaaaaagaaagaaatgatttaacaacgaatataaaaattagctcaaagataaaataaaatagaaattaaatgtaaaatgtgaaactgaaaaacttttagaagaaaacaggagagaaaaatctttggggcctagggccaagtgaagagttcttaggtatcacaccaaaagcttgacccataaaagaaaaatagatgaattggactgcatcaaaattaaaaattttgttctgtgaaagacttttttttttttttttttttttgagaaggagtctcgctttgttgctcaggccagggtgcagtggtgcgatctcagctcactgcaaactctgtctcccgggttcaagcgattctcctgccttagcctcccgagtagctgggactgaaggcgtgtgccaccatgcctggctaatttttgtatttttagtagagacaggctggtctcgaacttgtgacctcaagtaatctgcccgcctcagcctcccaaagtgctgggattataggtgagagccactgcacctggccttatgaaagacctttttaggaggatgaaaagacaagctatagacttggagaaaatatttgcaaaccatgtatctgacaaaggactactatgtagaatatatcagtaacagtaaaaactcaacagtgaaacagacaattcagttaggcaatgggaaaaagacatgaagagacatttcaccaaagcagatatacagatgtcagataagcacattaaaaagatgttcaacatcattagccattggggcaatgcaaattaagccacagtgagatatcactgcacacctatcgaaatggctaaaataaaaaaatagtgataacaccaaatgctagcaaagaggagacgtcagattgtgcgcaattgctggtgggaaggtaaaatgatgcagcctctctggaaacaagtgtggccatttctaacaacatgaaacatgcacttcctagtaatccgacccagcagttttactcttgggcatttattccagagaaatgaaaacttatattcacacaaaagccagtatgtgaatgttcatagcagcctcgttcataattcctcaaaactggaaacaaccttgaagtccctcagtgggtgaatgtttaaacaacctatggtgtatccccaccgtggaaaactatacagcgataaacaggaaagaactattgatatattcaacaacttggatgaatctccagagaattatgccaagtaaaaaaaagccaatccccacagttacatactggatgattccatttatataaccttctggggatcacaaaattatagaaatggagagcagattagtgattgcaggggttagggacagagttgtgaggagggtggtaaggggagggaagtgggtgtggttgtagaaggcgacaggcaggatccttgtggttatgggaaagtcctatatcttgctcatcttaatgtcaatatcctggttgtgatattgtaccgtacttttgcaggatgttgccactgggagaaactgggtaaagggtacatagactacctctgtttccttttctttcctttctttttctttttctttttcttttccttttcctctcccctcccttcccctcccctctcctctcctctcctttcctttcctttttttcagacagagtctctctctctctctgtctctcttacccaggctggagtacagtggtgtgatctcagctcactgtaacctccaactcccgggttcaagcgattcccctgcctcagcctcccaagtagctgggattacaggcgtgcaccaccacacctggctaaattttgtatttttagtagagatggggtttcaccatgttcgccaggctgatcttgaactcctaacctcaggtgatccacatgcctcagcctcccaaagtgctgggattacaggcgtgagccaccacggccagcccctccgtattatttcttaaaactgcttgtgaatctgaactatcttgtaataaaagatttaatttaaaaaaagataaattagggctactaccaataatgaaaataaatcctcattattaaaactgcaaatcttccttaagcatttaaattcaacttaagaatcttacaatttttataaacacttgtaagggggttttggaacttggttaattaaattctcctaaaccttttaagccacatcttaaattttaacgtattcattttcattttcaaatggttcacttgtctgattaacaaaaaccattgggtatttacataattcttgtatatctaatacttaaacttctaaatatgggtaatctggccgggcgcggtggctcacacctgtaatcccagcactttgggaggctgaggcaggtggatcccctgaggtcaggaccagcctggccaacatggcaaaaccgcatctctactaaaaattaaaaaattagctgggtgtggtggcgggcacctgttatcccagctattcaggaggctgaggcaggagaattgcttgaatctgggaggcagaagtagcagtgagccgagatctcgccattgaacaccagcctgggcaacggagctaataagagtgtattaaacctttcaacttaaatctaaatcaaaatcccacttacacttttaaaattagaatcacaagattaacctattaatcattctatctcttatacaatacaactaaaaaccggatatatacaggtaatttataaattaaacacaaaattaatttacttaatcatctccatagttaatgccagcatttctcaggatgaaggacattgatctattaaagagattagtatctctcccagatgagctgggttgtacctgaagcagggattttggtgaggactgagagtacagctggatccacctgggcgatttgtcccatgtcattgcacgacaggcagagaggaaacagggattctgagaatatgccccccaaatgcctgtactcttatctggcagaaccacagcccttagagtgtttcagagacagccagttggagttttgcgtggctgctgtgccttcgtctggtgttgtggtcccacttctcaggtcactagaagtaagagtaacaactggtaatgtgtatccagcactgaatatgcatcaggcactattccaaacacctttaaggtatagtaacttctttcatcttcaggaagactctatgaggtgggcgtgatgattattcccattttataggtggacgaatggagggacacagaggtcatttgacttgctcaaggtcacgcagctagtagaaggcagaacctggaatttttaaaaatttatttttatgattatatatattttttgagatagagtctctgtcacccaggctggagtgcagtggcgggatctcgcaccactgcaacctccgcctcccgagttcaaacgattctcttgcctcagcctcccaagtagctgggattacaggcgcccatcatcatgtccatctcattttttgtatttttaatagagacagggtttcaccatgttggccaggctgatcttgaactgttgaccacaggtgatccgcccgccttggcctcccaaagtgttgagattacaggcgtgagccgccatgcctggccaagagcctggatttaaacttggactgtctggctcattagttcttgctcttaacccctaccccatcaggccttctgccagccaggttggtgggacagcagggatttggattcaggcctgccagactctggtctttctgctgtcctgtgctgcagtagctactggaaagacacaaggagtgggagttcccgactctctttctgactggacatttgagagcggggttcctggctgccctgccctcccctctgtccatgtccatagttactgctttcacctgggcttgtccctccctcatattgaggcccagagtctgtcctgggagcttagtgaagggtgtgaatttcaccctcggtctagtgtcacattataaggcagtcagagggtggagctggggtctggccctcctctcattaatggtgcactcccgggaacctggcctcaggccttccgggaccctcactctctccctgtcctttcctgtctacccctagtgtttcacttcaagcccactacggtggtgacaagctgccagccgaagaatccaagagaactacatagaaggcggaagttggaccctgggaagatgcatgccaaaatctggttaatgaaggtatgaggcacatcttccctggacactgggcccaggacagggacggggatgatggctgtagcaaacatgtgctgagaactttgtgggtgccagacttgactcatttcttcctcacaggaactgtgtgagcacgcttatccttgttcctattttacaaaccgggaaactgaggcgcagggagataaatgacatgcaccaggtcacacagccaggaaatggcaggatcaggggtcaaagccagttaaacaaagcgtttgctgttctgtttaagactcaagaaataatcagaattgcttgttattttgttgcattaggaacacgatctagtggcttatttatcttaaaatttgcagcaacttggccgggtgtggtggctcatgcctataatcccagcactttgggaggtctaggtgggtggatcatttgacgtcaggagttcgagaccagcctggccaacgtggtgaaaccccgtttctactcaaactacaaaaattagctgggtgtggtagcacgcacctgtagtcccagctactcgggaggctgaggcaggagaccggcttgaacctgggaggcagaggttgcagtgagctgagatggtgccactgcactccagcctgggagacagagtgagacttcatctcaaaaaaaaaaaattccagtaaattaaattttcttacagtgtactttgaagcaagccttagaaactgacaatgaaaattttcacatcaatcgctacaattgtaggtaattaatttcctcgctatacattgttttatggcttctgtaattatctgaacaatgtctcaaagtatttgaaatgcctaaaggaagacaagtccttagcatacatagcagaaagtaaaatactaagtattataaagactacaaaatactatagaataattcttcaagaaaatttttaatagctcaatgaacaatgactactatataaagaacaagggaaaatataatttgctttgaaacctttttttcccctttaaccttttatcttgcaaaatggtttagaggtagcccagtattcttaaaggaggaactcatatttctcttagtttttaaaaaaatttttttttgagacagagtttcactccgtcacccaggctggagtgcagtggcaagatctcaggtcactgcaacctccacctcccaggtttgagtgagtctcctgcctcagcctcctgagtacctgggattacaggcgcccaccaccacgcccagctaattttttgtattgttagtagagatggggtttcaccatattggccaggctggtctccaactcctgaccttaggtgatctgcccgccttggcctcccaaagtgctgggattataggtgtgagccaccgcttccagccatttctgttatttttatcctaactttagaggggtttaggtgtttttgattgatgtagaagctgaacgtggacaatttggctctaaaacttgtgctcctaaccagtccagttcttaatactgtctcttgcaatctttcattcatttaatgaatcaacaaatattgattgagcacctaccatgtgccaggttctattctgagtatgagggttcaccagtaatgtgacctctgatcttaggggacttccattctattggatgggggagactgacaatcaacaagagaaagatatttgaaatgatgataagagctaaagagaagcctaagaataaggttagggggctggaggcacggaggagagtgtggcagtaattgtttaggtgctaacgagaggctgctaaggtgggtgacatttgaactgaaaccctagtgctgctgtttcagtgggcccaggacttggagaataacatttttcacaagatacttctgggtattttggtctggagatgtggagacaaggtagtggagtggctaggaggcaagacttcaaggatgacagctctgctatgtgtgaccttgaataagttactgaatttaatccttgctgtccacattgactgattgagacagggtctcgctgtgtcatccaggctggagcgcagtggcatgatcatggctcactgcagcctggaccttccgagcccaggtgatcctcccacctcagcctctcggagtagttgggactatagacatgcactatcatgcccagctaattttcgtagagatgggatctccctttgttgcccagggctctaactcctgggctcaagtagtccttccaccttgctcttccaaagtgctgggattacaggtgtgaaccactgtgcccgactgctgtccacttttataaagttggcctaataatagtgcccatctcttagtcttgctgtgagggtgatgtgctgcagtgcgcatgaagtgcttagtacagtatcagccacatggcaagcactcagcacatcagcatgattactgttatatgagaaataaaggagctgagggctaggaaggggtcgtttttagtaaaggacggagaaatgaggaagtacaggaacaaatgaaagagcaaatatttatggcaggggtagagggttagagccagagacagtagtatcagctattgttcactgagtgcacatgagtgcactctcactaagtggcttgattgtgaatttaaagacagggtcttgctctgtcacccaggctaaagtgaaatggcataatcatagctcactgcagccgtaaactcctgggctcaagagatcctcctgcctcagcctcccaagtagctaggactataggtgcacaccaccatgcccagcgaacattttaattttttaaaattgtatttatttatttatttatttacttttagagacaagttcttgctgtgttacccgggctggagtgtggtggcataatcttgacttactgcagcctcgatcttctgggctcaaacattcctcccacctcagactcctgagtagctaggactgtaggtgtacaccaccacacccagcgaattttgtttactttttgtagaaatgaggtctcactatgttgcccaggctggtcttgaactcctggccttgagtgatcctcccatctgggcctcgcaaagtgttgggattacaggcgtgagtcaccgcacctgtccaatctcatttatattttacggcagttctctaaaacagatactagtttccttacctttagaatgagtataaggaggctctgagacattaactaacttgcccagattctcttagatggtaagtggctgagctgggatttgaaccaaggtgtgtctaggttcaacatccaagtcttagtcactacgtggttcagccatgccttgcagttttaaggctactcagttcttgttttagcataacggaaagacagacattgggattcagaagtctggctttccagttccagccctgccacttcttgactgtgtgacactgggcaagtcattaaactctctgagcctccatttatcagcaaaatagagttagtaaacataaagctgttggagggtgaacagataccatgtgccacctgcagagcaaggcacagcacctggcctggcatgtagagggccctcagcaattgttgttgttattgttactgtaggttttatgcacctgctgggtgtaaccttaggggagtacaattgttgttgttattgttactgtaggttttatgcacctgctgggtgtaaccttaggggagtacaattgttgttgttattgttactgtaggttttatgcacctgctgggtgtaaccttagggaagtacaattgttgttgttgttgttactgtaggttttatgcacctgctgggtgtaaccttaggcgagtcacttaaccctcagaccctccttgttccactgggggctgttgtgtgaaatgagagtactcattgactccgcggcctgcccggaaatgctgacgtttatcatccattttgcctcccctgcttctcctccagacatggcggtcgctctgccaccttcttaacctacctggggcgtttattattattattattattgggacaggaatcttcctctgtcgcccaggctggagagcagtggcgccatctcgctcactgcaacctccgcctcccaggttcaagcgattctcctgcctcagcctccccagtagctggcattacaggcacgcgccaccacgctcggctaatttttgtatttttagtggagacggggtttcaccatgttggtcaggctggtctcgaactcttgacctcgtgatcggcccaccttggcctcccaaagtgctgggattatagacgtgagccaccccgcccggcccttactattatttctatatttcattgattctgagaagccattgatatgaaggcacatctttatttacccactaataatatatttgttgattagttggtgacacgccaccaactgtagatgcacccgcacctcagggatgtgagatgatgggtacacgtgcgtttccgaacggatgagagtcccggagctcccgggcggcgcagacaatggggaaccgcccagcttgggccgcgtttaccagcaggaggccgcacgggggcgggcgtctggcggggccggggcggcgggtccacgggctttcgggggctcaggccgggcagggcgcagcgccgcctctctgctcttccctccgcccgcagacctcgctcaggagcgggagggccgctctgcgagagctccgaagccgtgagaacttcctcagcaagctcaaccgggagctgatcgagaccatccaggagatggagaacagcacgaccctgcacgtgcgggccctgctgcagcagcaggacaccctggcggtgagacccgcggcatccgcccgccctccgtccctccgtcccaacctccgtccctccctccctccctccgtccctccgtcccgccctccgtccctccctccctccctccctccgtcccgccctcccgccctccgtcccgccctccctccgtccctccgtcccgccctcccgccgtcccgccctccgtccctccctccctccctccgtcccgccctccctccctccgtcccgccctccctccgcgcactcgcgcgccctctcctgcctttccccgcccactgcacgtggtgcttcctccacctggaagacgcatttcttcacccttcactcccctcacctgggctttgcaagaggaccgagatgggtttcatcccagcgcgccagcactcactggccgggagacttttagttaactttgcctccccgagctctgtgaaatgcggcaccatagcacccgtcccagagggggttcaccgggcacatactgtaccggtgcgacagaggtcgctgctaccaccaacagcatttgcaaacacctctacgtgtaatagcaagcgatctgtatgtctttatatagtccttacaacaaccctatgggtggacactgttactgtcccgattagcctctggtcaggtttctgggagtgaggttgggactggggactcctctgaggaagtgctgggtggccgcctctgagagccagcagagcctgtgggtgagttgactccacccctcccgcagaccatcatcgacatcttggagtactcaaacaagaagaggctgcagcaattgaaatctgagcttcaggagtgggaagaaaagaagaaatgcaagatgagctgtaagaatccctggcaaattccttgaccctcccccctggcaccttggggaggtcagcagcagagcattcaccttgtacttgccattcagaaaccctcagccccattggctctcttcttggcagatgggaatgctaagatacagagcgaatagcatagttacccaacacttagctctttccaggccccgtatctgggtctctaccaatgtctgcattgttacaggcacacactcagtcattgcaactacttggaggcagggaagctgtcctcccattttacagatgaggaaaccgaggctaagagaggtgcagtagcttgtggaaggttatatagctaggagccagaatccaatcctagcctggctctgtttcctgccaaggtccttctgggagtcagtggctgggctagaacctgggtctcctggcttccatcctgcctggcctgtggttccttttccctgagcagactacacacctgctgagcagaggggtggtggatcagtcaaccccagacattgggggtctctctggaggaagacaggatagactttgtcttaatcctgccatgggttgtgtcttgggagccactgtcaccccatctgcctggtctcacttccttgagtgtgtctctgaggagactgaagtctggagagggacagtcttggcgagagccacccggcaagtcagtggcagagtggggactagtctagggatcatgcaccaattcccttcctttttcctacccagcattgcctcttctcctgcaggggtggaaaaccgtctagagccttaacttttaaccacctcccagccctgtgtgagctcacctcagcccagaccccagttactggccaaggagaccttgcctcctgggcctcctggggcccaggtgcttgagggaaggtcttgcctcctgtccctgctgacctccctaacccctccccagatcttgagcagcaggcagagcagctgaatgccaagattgagaagacccaggaggaagtgaacttcctgagcacttacatggaccatgagtattccatcaagtctgtccagatctccactcttatgcgccagctgcagcaggttaaggacagccagcaggtaggggagcccctgcccctctcccaccagactgtgtgggaggcaggactggtgaccaacacccttctgctggctcccaggatgagctggatgacctcggtgagatgcgcagaaaggtcctggaatccttgtctgacaagattcagaagaagaagaaaaaaattctgagttctgtggtggcggtgagtagccagttgctgtgtgggagcggggatccaggtctcacccccaccccgccctcttccccatcctctgcctccaggcccactgcagccccatcggtctctaccatgttctgctgcccaggaagaggcacctgggggccagacctcttcttcctccacaggaaacccagcgtccctatgaagaggctctcctacagaagatgtgggaaagccaggacttcctgaaatgcatgcaaaggttcagagaagtgcgtgggcaaggaaggtggtggtccctgtagggaagcagtggatgggcagtccccacggcctgtgggaatgagtcaggcttctcctgatctggcgctcaggaggtctctgactctggtgttggcctccctccttgccggtgccattactgtcacttgtctttcatctgggaaggcgattggcactgacctaggccttgcctcattagccagcaatgctggctaatgacccatttacaaccatcaccaaacatcacctattcagccattaaccaccgtgcatctttaccccttgattcttgttactgcccaccacccattatcagtgttaatgaacttcaccatcactgccttcttgaattaattttcattatcttgcctcttcactggtttttaatgtgtatgcccttcactatctctgccagcctccattcattcccatgattgagcattccccgccactttgtaacctgtctccattctccatgatccctcacctgtttcagcaccactgaatattgtcactaacttggaagccagccgcaccttgcatggggaagtcccctccctggagtccagcaagtcccagtgacagaacccataccatttccccagatagctttgctcctcgttcattttggcctttctccctttggttgggggccatttgcctctcccttctcccctgctgtgcctttcctctcagattattgaccagtttgaggagaacatgcctgtattaagggccgaggtggaagagctccaagcccagacccgggaaccccgagaggtcatatttgaggatgttctgcttcggagacccaagtatgtgatctttttgccactgcctcttaaaccagtcacactctgagctcacggaggctctctgttcttggggaaggcagcctggtgtggatggcagaaccctgtacagggagggaggggcggtcctgggtttccaccttggatctgccactgaccaggggcagatgtgacctttcccatctctgcaaaggcctccaattcccatctgtacacagcaggctgggtggtgtaatctctaagggcccttctagttcccagatcccatgtgtcaaccaagtgggtacagccttccacttctgggtttttgaggaaggcagagttgagtggggtggttggcttcagggaagaatagcctggaagacactctacaaggagagaagtctgtcctgttcacttggcaggtttctgggccccagaaaccaattctttgcctgcccttccttggggcaagccctctgcggttgggttgggggtcccccaggcttacctctccttgatgacaccacaggaccatgtgtggcagagcctagcatttgcaaattctttaatttttcttcttcatctgtctctccctcctgtcgttttccttccttctcctctcctatcgccatttcttccttttcttctatttctaaaccgccccccgcccccaaaacaaaatactattggatttatgaagtgcctctgaatgccaggcaccatgtgaatgagaacagtccttggtcccgccctcatggaactaaagagggaactggacatgagtcgataatgagccacaaataaatgtggagttgcagcagagcccagagctgctgagtagagtacatgccactgcaaaagtgactcttaggagctgggtgcagtggctcacgcctgtaatcccagcaatttgggaggccaaggccggtggatcacgaggtcaggagttcaagaccagcctggccaagatgatgaaaccctgtctctactaaaaatacaaaaactagctgggcatggtggcgggtgcctgtaatcccagctactcgggaggctgaggcagagaattgcttgaacctggaaggcggaggttgcggtcagccgagattgtgccactgcattccagtctgggtgacagagcgagactccatctaaaaaaaaatttttttttaattaaaaaaaaaagaaaaaagaaagcaactgttaggacagcaagtctgggcagtcaaggaaggttttcctgaggatgtgacatttgaactgaggcttgaaggatgcatagaaattcactaggtgaaagagactgatgggggagctgaaggaagagcaattctaggcggtggtgccagggtctccgggggacgtaataaatagtcacttgtctttacctgaactctgaacacagtgaatgagactgaaaggggtaaggtgcatgtgggccaggttatcacctttattctggtaaagctgattttagagactgtgttggcctctgaatagtgaacccagaattaggcaaattgaaccacccgatcatggtggagctggacccacgtggagccaggccttggggcagagaagagtggagtcctttcgggtttcttgctgctgagagagaaagggactgggctccctgtgtccccttcctctcctcacactcaccattctggtggtcataccccctttccaaaagcagaatttaagggggcagagagaggccaggagcaatacactcatggatgcccttccacgtggaagggaacaccaggagcaaggaagcacattttccctcctaaaaagtagaaatggcacactgttaagcagagcctctccaactggaacatgcccaggaaacacctggagatcgcgttaaaaagcagattccaagtcagtaggtctcagtggggctcatgaatctacatttcttttttcttttcttttctttctttccttccttcattccttcctttctctcttttctttttctttctttctttctctctctgtctttctcttttctttctttttctttcttccttctttctttctttcccctccctccctccctccctccctccctccctcccttccttcctttcttccttccttcttcttgagacagagtctagctctgtctcccaggctggagtgcactggcaccatctcagctcactgcaacctccgcctcctgggttcaagtgattctcttgtctcagcctcccgagtagctgggattacaggtgtgcaccaccatgcctggctaatttttatgttttttagtagaaacggggttttgccatgttggccaggctggtctcaaactcctgacctcaagtgatctgcctgccttggcctcccaaagtgctgggattacaggtgtgaaccaccatgcccagcctgattctgcatttctaagaagctacccggtgatgcttatgttactgctctatgaaccaaccacatgttgagccttgagctgtgaaggagctatggttggaaggaacttggcattgacacggagctgagtgaggccagagtggttggaatgcagagtgacagggagagtggcgggaagggagcagggcaactcagcccctagggacctccatgcagtgccctgtaggcccagatgttctgcctgatcccagaagcaaaggatcttaagccacatgatcagatttgtattccaaaaaagtcagtttgaaaagagcatggtgggctgggtgtggtggctcatgcctgtaatctcagcgttttgggaggccaaggtgggaggattgcttgagcccaggagttcaagaccagcttgggcaacatggtgaaaccccatctctacaaaaaatacaaaagttagccaggcgtggtggcgtgcgcctgtagtcccagctgcagtgaaggctaaggcaggaggattgcttgagccctagagacagaggttgtagtgagccaagatggtgctactgccttccagcctgcttaatagagcaagactctttcttaaaagaaaagaaaagagcatggggatgagattggcaaggagccagaatggcagctggaattctagtgggtgtgagggcagttgtccaggggaacatgggaagtggcctggccaagagtgtggcagaagaaatgggagaaatagatagattggagaaatatttaggaaagtaagaaggacttgcatgacttgggaagtacaggaaagggaggtatcaagaataacccctgggttcctgacttttataatggggtggtggtgatgtcaaatgcagagattgggaaggctggggcggggtgagggatgtgtatgtaggcacagtcaaaaagtttatttggaggcaggcatggtggctcacacctgtaatcccagtgctttaggaggatgaggaagaaggatcgcttgaggctgggagttcgagaccagggggacaacatagtgagacctccatctctacaaaaaattaaaaaattagccagatgtggtggcacgtgcctgtggtcccagctatttgggaggcaggaggatcgattgaggagttccaggctgcagtgagctgtgattgcaccactgcattccagcctgggtgaccgagtgagaccatgtctcaaacaaaacaaaacaaaacaaaaaccatacagttgacttggacagtaagtttgatttatatgaggtgccaaggtggagtcattgggtgggcaattgacaagatgagtgtagacctcagaggacagatattggctggaagtagaaatttaggtgttgccagcatagagatgaactttttttttttactattattatgaaaaatttcaaatataaagaagagagaatgatataatgaatagccagttttgcccatctagatttagaaattttttttttttctatgttggtttcatgttcatttttttaatagtatttgtaaattgcaagtatcctgacatttcctgcctaaatacttcatgtgtatcagcagattattgaaaccatgagagaggatggtctccttggaagagagaaaagagagtgaaacagaatgtaatccttcagcctcttaaatatttgtgctggtccctgcaatggggaatatattgctgatgggaatccatctctcttgctactttcatggaaataataatgcctgtcatttactgagcacttattacctgctggcatggtctcatttaatctttccaccaatgactgaggttagaatattaaacccatttgacagatgaggaaactgaggctcacttggggtctgggacttaatgagtgcttttcacttaagtgccaactgaaggagtgaggctgggagagtagaaatagcttgctcaaggtgacacaggtcaaagttatcaaacctgtcatcctcactccaaagccagtgatcatcttgagggccctcagcatttcagagctgagttcctgctccctcttgacctcagacttgtcaggggaacatttgtcctgccaaactcatttcttttccatttttgatgtgtgtgtatgtgtgtgtgtgtgtgtgtgtgtgtgtgtgtgtgtgtatgcttgtgtatgcacagttgggctttgaggtcacagatagatcacagattgtattttgggattgccccccaacccaagtacgtaccagagttctaaagagcagggctcctctgagtgggtgctcccacaccgccacctctggtctctcatggccttctgtgctgcctcccaccaggtgcaccccagacatggatgtcatcctcaacattcctgtggaagagccactacccttctagatggcagtgccatgggccgccctcccctcctgctctcttcccagcacctggagccttggatcatttacttccaggaccggatctccattcagaccctgatctacagtctccctgctccctctgcccttcctccctctttctttccctccctccctccctcccttcttccccccttcccttccctcctccttccttcctcctctccctccctccctcctttctttcttcctgtggttttttcctctcttcttcccttctttctggttggtgctgctgggccaggtgggaatttctgattaaatctgctattccttttttaccaataaagctggatttacatttgc

SEQ ID NO: 1683 - DNA, 19846 bp, Homo sapiens; identical to SEQ ID NO: 1682

SEQ ID NO: 1684 - DNA, 396 bp, Homo sapiens
gtacagccaatccattcctctgtcagacagataagccctccttccaccccatggcagcagagctaagcaagggtctctctaaagacaacctgtctaagcaggaagactgtactctcactgcgttgctaccagcatgcacccttccttctgctttcagcatagcaacagccaggacattggcaaagaaccattggtggcccaactatgaattgttcccagacttcctgcagggaacacgattctcttgcacaactcaatattagctacagaacgagccactgagctcagaatatctttgctaactagtccagtaggctagctttacaatttagctctggactactgccttttcagataattgactttaagggttttcccccttttatgatttttgtt

SEQ ID NO: 1685 - DNA, 130 bp, Homo sapiens
ggctcactgcaacctccaccacccgggttcaagcagttctccctcttcagcctcccgagtaggtgggattacaggcgcccaccaccacgcccagctaatttttagatttttagtagagatgggtttcacc

SEQ ID NO: 1686 - DNA, 3295 bp, Homo sapiens
gcggaggggacgaaaaacggggggccagactgttgtggctgtggtggagacgagaaaccaggaagaagaggctcgcttcccactcggcgaccgtaagcgaagcagccgaaggcgagcgccgacatcagcagctgccccctaaatcccgcccttcgtcttggcggcagcgggagactgagagacgcgcgcagcaggggcgggactggagaggggccccgcgcgcggatctcgcgagagcattagagggcggaagcgctatccgagcaggatgcggttcgtggttgccttggtcctcctgaacgtcgcagcggcgggtaagaccctccatcccgcatcccactcttgcccccagatcccccattctcacctgggcaggtcacctctaggctcgcttcttccctacccgacccacctctccgctcgccatcgtctcccgccccaccccccaatccccattcccccgctgctcccgatctcttccagttctgaggagttccttcttcccgcctgcccttctccggtgctaactcgtttttctatttcaggagccgtgccgctcttggccaccgaaagcgtcaagcaagaagaagctggagtacggccttctgcaggaaacgtctccacccaccccagcttgagccaacggcctggaggctctaccaagtcgcatccggagccgcagactccaaaagacagccctagcaagtcgagtgcggaggcgcagaccccagaagacacccccaacaagtcgggtgcggaggcaaagacccaaaaagacagctccaacaagtcgggtgcggaggcaaagacccaaaaaggcagcactagcaagtcgggttcggaggcgcagaccacaaaagacagcactagtaagtcgcatccggagctgcagactccaaaagacagcactggcaaatcgggtgcggaggcgcagaccccagaagacagccccaacaggtcgggtgcggaggcaaagacccaaaaagacagccctagcaagtcaggttcggaggcgcagaccacaaaagatgtccctaataagtcgggtgcggacggccagaccccaaaagacggctccagcaagtcgggtgcggaggatcagaccccaaaagacgtccctaacaagtcgggtgcggagaagcagactccaaaagacggctctaacaagtccggtgcagaggagcaggcccaatagacgggcccagcaagtcgggtgcggaggagcagacctcaaaagacagccctaacaaggtggttccagagcagccttcctggaaagaccattccaagcccatctccaacccttctgataacaaggagctccccaaggctgacacaaaccagcttgctgacaaagggaagctttctcctcatgctttcaaaaccgaatctggggaggaaactgacctcatttctcccccgcaggaggaagttaagtcttcagagcctactgaggatgtggagcccaaagaggctgaagatgatgatacaggacccgaggagggctcaccgcccaaagaagagaaagaaaagatgtccggttctgcctccagtgagaaccgtgaaggaacactttcggattccacgggtagcgagaaggatgacctttatccgaacggttctggaaatggcagcgcggagagcagccacttctttgcatatctggtgactgcagccattcttgtggctgtcctctatatcgctcatcacaacaagcggaaggtaagtcgacagcggccttccggaggggagtggggtttccagcaccctggaagcttgggtgtgggtgggtatcccgtcactagatgcccgtgagcactggggactttaaaacaaacttcagttttttcctcaggccctattaggcctctttactcttgttttgttaatcgtgttttcatcctgtcacctgtttactctgagtgtcctctgctactgcattaggagccaagttaggacattattaggatctgacctgacttggaatctcctcccataactttgcacttaggtccttcacagcctcagaggacctgagtacttgacagttaaagcacgtaccttccatcctatttcccttcttgagacgatatgtcatttctagcttcctttcccaacattctctcttccatcagcagtggcacaaagaatggtttcaattactgcgtcttcgataccaggaccaaagagcccagggacttctgcaattaataataattagaagaaagcccagaaattgcacagacacgtacacctgttactttttcatcagggtttggtctgtttattagcaaccactctaatgacaaaatgattgcatttcatattgagcccccaacatttagaagctagtttctgtaacctgcttaaaattggagagtccaattctggccataaggctatggctataaagaataaaggggaagacctttagtaaaaatgtgcattcctggcccggtgcagtggctcctgcctctaatcccagcactttgggaggccgaggcaggaggatcgcttgagcccaggagtccaagaccagcctggccaacatagcaagacctcgtctctacatataataaaaaaattagccagatgtggtggtggacgtgtgtggtcccagctactcaggaggctgaagtggggggatggcttgactgtgggaggtcgaggcttcagtgagccatgatcacgccattgcactccagcccgggtgacagagtgagaccttgcctctaagaaaaaaaaaaagtgtatttcttattctatgtccaagtgtccattatgcagggtaaccttagtcatgaaatgagattgataaagaatgtagttgatgtagcatcgtggggtgaaaaagtacatttgtagataggaaattctgattatgactttttttaaaggaatgtcctatatcctagatatctctaggaaggagttgatagatctttgactgtgtacctttgaataaatcaaacagacttcctcccacacgctagagctcagacagccttctatttgttatttcctattaagcaatacaaaggattctgatgtaattaggctctgtctttcttaaaatggttatagtttaaatagacctctgtgagtgtactgctctttctacagtcagggtcattaacaaatatgctaccaggtgactgcctctgatttcagagactgaactatgtcattacagagccacctgttaatcattttctttttcctttcctcagatcattgcttttgtcctggaaggaaaaagatctaaagtcacccggcggccaaaggccagtgacta

SEQ ID NO: 1687 - DNA, 383 bp, Homo sapiens
tacaactccatgccatgaaacaacacaaatgctcattcatttagcattggctatgcatccaacatcagcaatgcagtggtgaacccaatgaatgtggtccttgcctgtgtatggcttaccctctaatggggaagatggatacagaacaaacactctcacacatcaagtgataacacaaggcaaagcaaaagaataatgaggccaggtgctgtggctcatgcctgtaatcccagcactttgagaggcagaggtgggtggatcacctgatttcaagagttcgagaccatcctgcccaatatggcaaaaccccgtctttactaaaaatacaaaaattagccaggcgttgtggcgcacacctgtatcccagctacttgggaggctga

SEQ ID NO: 1688 - DNA, 4035 bp, Homo sapiens
  SITE (225): n equals a,t,g, or c
  SITE (400): n equals a,t,g, or c
  SITE (453): n equals a,t,g, or c
  SITE (557): n equals a,t,g, or c
  SITE (874): n equals a,t,g, or c
  SITE (882): n equals a,t,g, or c
  SITE (889): n equals a,t,g, or c
  SITE (946): n equals a,t,g, or c
  SITE (2188): n equals a,t,g, or c
  SITE (2217): n equals a,t,g, or c
  SITE (2218): n equals a,t,g, or c
  SITE (2227): n equals a,t,g, or c
  SITE (2270): n equals a,t,g, or c
  SITE (3204): n equals a,t,g, or c
  SITE (3237): n equals a,t,g, or c
  SITE (3308): n equals a,t,g, or c
  SITE (3431): n equals a,t,g, or c
  SITE (3465): n equals a,t,g, or c
  SITE (3972): n equals a,t,g, or c
  SITE (4003): n equals a,t,g, or c
tgctgcctcctccaccagcatccctagctcagaggccacgaccccaaccccaggagcctccccaccagcccctgaaatggaaaggcctccaggtaggtgtgattggcctccagccgggggagcagggaacttctctaggttccacttccagtctctctgtccccagctcctgagtcagtgggcacagaagagatgcctgaggatggagagcccgatgcagcaganctccgccggcgccgcctgcagaagctggagtctcctgttgcccactgacactgccccagcccagccccagcctctgctcttttgagcagccctcgctggaacatgtcctgccaccaagtgccagctccctctctgtctgcaccaggggagtagtacccccagctctgagaaagangcggcatcccctaggccaagtggaaagaggctggggttcccatttgactccantcccaggcagccatggggatctcgggtcagttccagccttcctctccaactcttcagccctgtgttctgctggggccatgaaggcagaatgtttagcctctganaagccctcttcttcccccacccctttccaagagaaggggctgcccctccaagccctacttgtatgtgcggagtcacactgcagtgccgaacagtattagctcccgttcccaagtgtggactccagaggggctggaggcaagctatgaacttgctcgctggcccacccctaagactggtacccatttccttttcttaccctgatctccccagaagcctcttgtggtggtggctgtgccccctatgccctgtggcatttctgcctcttactggcaaccacacaactcagggaaaagaatgcctgggagtgggggtgcangcgggcancactganggaccctgccccgcccctccccccaggcccctttcccctgcagttttcaagtgagantgacctgtctcacccagcagccactgcccagccgcactccaggcaagggccagtgcgcctgctcctgaccactgcaatcccagcgcccaaggaaggccacttctcaactggcagaacttctgaagtttagaattggaattacttccttactagtgtcttttggcttaaattttgtcttttgaagttgaatgcttaatcccgggaaagaggaacaggagtgccagactcctggtctttccagtttagaaaaggctctgtgccaaggagggaccacaggagctgggacctgcctgcccctgtcttttccccttggttttgtgttacaagagttgttggagacagtttcagatgattatttaatttgtaaatattgtacaaattttaatagcttaaattgtatatacagccaaataaaaacttgcattaacaattggtggggtttgtgtcacagaatcgatcaaatcagtgtcgggctccttgctgtggctgtacacttgaaaatggaatggaatctccaggagtgagggtttccatggaagccagcactatccttggggacaccactgaccattaacagattaggaagatgtgcccattttacacacagagaagcagcccagagttcagtgccctgcttcagggcagagaccaagttggggagtcaggaactgaaagctgtcttagccagtttgggggcagggtggggtctcaggcctttggcccctgtgactccaagtataaggcatatatgaaggctagtgagctggggttgggatgggatggcagggtgaaaggtcagcatattcctgcctgcaaacccctccccagccttgattgcaggtcagaaggctgcagggggatgtccctatgctggctgtgagttcccagccactcccttgtggtcaggccagcaagtcgggtctgcaatggaacagtgaccaagaacgtgcctcctacctctctatcagagcccggggctaacgtgggcactctgtgccccagtgccagcactgtactttgaacagaagatctccaagacccatgcccgagtcatctgtgttctccatcacctgcaccaaacaagatctggcctagagcaaaggcttgggggtatttgcaacagtgagcttcggagggccaaggaaacaaagtgcccagtggctctgccctgtgctaccttcccctaaactggggttgggctactgcttccaccaaataacaactagaatttgaattgctgancccaaggaaagaaaaacaaaacaggccanngtggaccangcacatggctcatgcctataatcccaacgctttgggaggccanggtgggcggatcacttcgagtcaggagtttgagaccagcctggccaacatggtgaaaccccatctctactaaaaatacaaaaattagcacgctgtggtggtgggcgcctgtaatcccagctactcaagaggctgaggcaagagaatcccttgatcccagaggtggaagttgcagtgagccaagatcatgccactgcactccaccctgggcaacagagtgagactccgtctcaaaaaacaaaaaagaacaggccaagataggagggagagaaagctgctgacgccccccattagcctggtgatccctatttggtctcccacattaggcactctcccccagcatgtacatagagttgttttctcctttatgcaagcaaggcctgaccccaaagtcctttagccctagtttctgtatcccctgtctcaggggctccaacacccacctccctcctcctgaggccccctagacttgatccacagggcatgctgacaagcaggctgctcggctgggcctcagaagcctttctccaagagccaggctttaagctcctggtcaaagtagcccttgatccgtagggtacctgtcacctcattgacatgggtgacaggtgtcttccccagcagcgggctcagaaaatattccacgtctttatgcagggcctggggaaagatgacaaatcaggtcaggccaagagtcccttcccttaaaaagactcctgtcccttcagccctgaaagggtcaggcccagtcccagacccacccacccacttacccagatgtccccttccactttccggatcacagtcatctgccggttgccatgcgtgatgtccttgtagacggggatgttgtgcatccgagagcgtcgtacaaagtaaggcaggttgggtggggggtctgcaacagggaaagacactgttaaatcaactcttcntacgtgccatcccacctcagccaaggcccttgntctcagtctgcagagggccagtgcacccagctggaccaagccacctccagactttaggtcagggggtctcntctttccttcagcttggagtcaggaccaaattgttcaccctggtaccctaaggccccacacagggcctggcactaagtaggtgctcaagaaaaaatgaaatcagggacatgcctccctggatntttgggtccccctctaggccaacccttgccctcntccactgggtcagggaggccgaaatcaatctctggaacaaagagattgggatttgcaagcactgagcacataccatatgctgggctctgcactaagggctctatgtactgagcagattatctccattttgctaaaacaggttgggtcaagctaagtgactaattcaagataacatcaacagtaaataaagccaaattcaaacccagaactgcctgactccaagctgtgttcttaattacagtacatagtctgctggggggaaagaaggtccaagctcttgggttttctctctgttgtttactttcccccatatggggaagacctgatctcaatagtgtggatggatgagtaccagtgaacaacagaaggctccactcctcggctcttccttgggcatgagacagatgtaacccagagggattgcaaaatgagtcctgaacccactggagagtccagagcctcatgggggaggccaacctctggggaggaggtgatgctccgtgaagntttcaaatcatccctaaccacccagctcacntctgggaggctgccagccactaggggtaggat

SEQ ID NO: 1689 - DNA, 8121 bp, Homo sapiens
cccccaggcctcctgcctccttttcctccaggcatgttcccactgtggccccccatgggcccctttccacctgtcccgcctccccccagctcaggagaggctgtggctcctccatccaccagtgcaggtgagcctttgggtactgtgacagccagggggcggcagggatggaacactcactgacttcgttcctgctcttcagcagccctttctcggcccagtggagcagctacaaccacagctgctggcaccagtgctactgctgcttctgccacagcatctggcccaggctctggctctgccccagaggctggccctgcccctggtttccccttccctcctccctggatgggtatgcccctgcctccaccctttggtaagctgggccactctctgagttcttcttgggggtgaggttggtgtctggccccagcagcccagactgagcctctctctctccagccttccccccaatgcctgtgccccctgcgggctttgctgggctgaccccagaggagctacgagctctggagggccatgagcggcagcacctggaggcccggctgcagagcctgcgtaacatccacacactgctggacgccgccatgctgcagatcaaccagtacctcaccgtgctggcctccttggggtgtgtctgtacaggggaagcagagtgggtttggtgggtcaggagtggagctgccaagaggtccccagcagtggttcttggcctttgacacctgccaattcaggctgcctatctacaggcccaccaagggtctccaggagttcttggtaactcctggtgcctttatttcccactccagaaagcatgtctggatctaagtaggagtgatgtttattcgagagctgactttagatcttattcctttatatttttctaaagtcaaattattcagaatttgcagtgctttagttcatcacatgatattcttctgagatgtggtgacacttagattggcaattgctgcccccaaactgagggagcgaataataggaagtcacttggagccatcctggctcaagttcaagcgctggtcccatcactcatttttgacctctcattatttgaataaaggggtcttaattcatattcataagtgatgtgtactgccagatacacacctataatcagcactttggaaggctgaggcaggaggattgtttgagcctaggaatttgagggtgcagtgagctatgattgtgccactaaattccagctttggtgacagagccgagacgctgtcttttaaaaaagtgacatgtacataatgcctggcatctagcagtgacagcacaggcttggagaggaacttgagtccaaggctcgagcactgtggcttattgagtgagtcccctataaggtgcctgactccccagggtggagactgcagggtaagagtgaacaggtcaacagtccctgcctgcaagcaccttacagctaagggatagaatcatttggcccttgagtccagtcaccctgtctgagttcattcagcatgttcacttgtgtttgccaggcactggggccacaagggcacatcattctatactctgttctgcaaggctcaccaagggcaggagaatctgcccaaccttggatgccaaggccaggcccgcctctcgtcccttctcttcccaggcccccccggcctgccacttcagtcaactccactgaggagactgccactacagttgttgctgctgcctcctccaccagcatccctagctcagaggccacgaccccaaccccaggagcctccccaccagcccctgaaatggaaaggcctccaggtaggtgtgattggcctccagccgggggagcagggaacttctctaggttccacttccagtctctctgtccccagctcctgagtcagtgggcacagaggagatgcctgaggatggagagcccgatgcagcagagctccgccggcgccgcctgcagaagctggagtctcctgttgcccactgacactgccccagcccagccccagcctctgctcttttgagcagccctcgctggaacatgtcctgccaccaagtgccagctccctctctgtctgcaccagggagtagtacccccagctctgagaaagaggcggcatcccctaggccaagtggaaagaggctggggttcccatttgactccagtcccaggcagccatggggatctcgggtcagttccagccttcctctccaactcttcagccctgtgttctgctggggccatgaaggcagaaggtttagcctctgagaagccctcttcttcccccacccctttccaggagaaggggctgcccctccaagccctacttgtatgtgcggagtcacactgcagtgccgaacagtattagctcccgttcccaagtgtggactccagaggggctggaggcaagctatgaacttgctcgctggcccacccctaagactggtacccatttccttttcttaccctgatctccccagaagcctcttgtggtggtggctgtgccccctatgccctgtggcatttctgcgtcttactggcaaccacacaactcagggaaaggaatgcctgggagtgggggtgcaggcgggcagcactgagggaccctgccccgcccctccccccaggcccctttcccctgcagcttctcaagtgagactgacctgtctcacccagcagccactgcccagccgcactccaggcaagggccagtgcgcctgctcctgaccactgcaatcccagcgcccaaggaaggccacttctcaactggcagaacttctgaagtttagaattggaattacttccttactagtgtcttttggcttaaattttgtcttttgaagttgaatgcttaatcccgggaaagaggaacaggagtgccagactcctggtctttccagtttagaaaaggctctgtgccaaggagggaccacaggagctgggacctgcctgcccctgtcttttccccttggttttgtgttacaagagttgttggagacagtttcagatgattatttaatttgtaaatattgtacaaattttaatagcttaaattgtatatacagccaaataaaaacttgcattaacaattggtggggtttgtgtcacagaatcgatcaaatcagtgtcgggctccttgctgtggctgtacacttgaaaatggaatggaatctccaggagtgagggtttccatggaagccagcactatccttggggacaccactgaccattaacagattaggaagatgtgcccattttacacacagagaagcagcccagagttcagtgccctgcttcagggcagagaccaagttggggagtcaggaactgaaagctgtcttagccagtttgggggcagggtggggtctcaggcctttggcccctgtgactccaagtataaggcatatatgaaggctagtgagctggggttgggatgggatggcagggtgaaaggtcagcatattcctgcctgcaaacccctccccagccttgattgcaggtcagaaggctgcagggggatgtccctatgctggctgtgagttcccagccactcccttgtggtcaggccagcaagtctggtctgcaatggaacagtgaccaagaacgtgcctcctacctctctatcagagcccggggctaacgtgggcactctgtgccccagtgccagcactgtactttgaacagaagatctccaagacccatgcccgagtcatctgtgttctccatcacctgcaccaaacaagatctggcctagagcaaaggcttgggggtatttgcaacagtgagcttcggagggccaaggaaacaaagtgcccagtggctctgccctgtgctaccttcccctaaactggggttgggctactgcttccaccaaataacaactagaatttgaattgctgagcccaaggaaagaaaaacaaaacaggccaaggtggaccaggcacatggctcatgcctataatcccaacgctttgggaggccaaggtgggcggatcacttcgagtcaggagtttgagaccagcctggccaacatggtgaaaccccatctctactaaaaatacaaaaattagcaggctgtggtggtgggcgcctgtaatcccagctactcaagaggctgaggcaggagaatcccttgatcccagaggtggaagttgcagtgagccaagatcatgccactgcactccacctgggcaacagagtgagactccgtctcaaaaacaaaaaagaacaggccaagataggagggagagaaagctgctgacgccccccattagcctggtgatccctatttggtctcccacattaggcactctcccccagcatgtacatagagttgttttctcctttatgcaagcaaggcctgaccccaaagtcctttagccctagtttctgtatcccctgtctcaggggctccaacacccacctccctcctcctgaggccccctagacttgatccacagggcatgctgacaagcaggctgctcggctgggcctcagaagcctttctccaagagccaggctttaagctcctggtcaaagtagcccttgatccgtagggtacctgtcacctcattgacctgggtgacaggtgtcttccccagcagcgggctcagaaaatcttccacgtctttctgcagggcctggggaaagatgacaaatcaggtcaggccaagagtcccttcccttaaaaagactcctgtcccttcagccctgaaagggtcaggcccagtcccagacccacccacccacttacccagatgtccccttccactttccggatcacagtcatctgccggttgccatgcgtgatgtccttgtagacggggatgttgtgcatccgagagcgtcgtacaaagtaaggcaggttgggtggggggtctgcaacagggaaagacactgttaaatcaactcttcctacgtgccatcccacctcagccaaggcccttgctctcagtctgcagagggccagtgcacccagctggaccaagccacctccagactttaggtcagggggtctcctctttccttcagcttggagtcaggaccaaattgttcaccctggtaccctaaggccccacacagggcctggcactaagtaggtgctcaagaaaaaatgaaatcagggacatgcctccctggatctttgggtccccctctaggccaacccttgccctcctccactgggtcagggaggccgaaatcaatctctggaacaaagagattgggatttgcaagcactgagcacctaccatatgctgggctctgcactaagggctctatgtactgagcagattatctccattttgctaaaacaggttgggtcaagctaagtgactaattcaagataacatcaacagtaaataaagccaaattcaaacccagaactgcctgactccaagctgtgttcttaattacagtacatagtctgctggggggaaagaaggtccaagctcttgggttttctctctgttgtttactttcccccatatggggaagacctgatctcaatagtgtggatggatgagtaccagtgaacaacagaaggctccactcctcggctcttccttgggcatgagacagatgtaacccagagggattgcaaaatgagtcctgaacccactggagagtccagagcctcatgggggaggccaacctctggggaggaggtgatgctccgtgaagctttcaaatcatccctaaccacccagctcacctctgggaggctgccagccactaggggtaggataatgttcatgctttgggggatctgggatcctggtagccggtaacaggcgctccacaaactgatattcatccacagactccacaaacctggggtaatctggagggccctgggtctggctctgaagcaaaacaaaaatcccatttctccattagcctacccaacacaggatggcataacttcagtaagtagagaatggaaacattacaggcagagagaatgacataaataaaaggctgggcgacggtgtgaaagctatcagaatcaaaatggagtgagtcacttgggttaaaaatcccaacaaatagagctagggagggccacgaagagagagttcttgggcacaaatacttaataacaagaactaccacaaaagactgcaaaaaccacagccttgcacaaaggccacttcaaccttacacaaaaaaatatttctggctgggcaaggtggctcacgcctgtaatcccagcaccttggaggctgaggcaggaggatcatctaaggtcaggagttcaacaccagcctggccaacatggcgaaaccccatctctactgaaaatacaaaaattagccgggcatggtggtgcatgcctgtaatcccagctacttgggaggctgaggcaggagaattgcttgaacccaggaggtggaggttgcagtgagctaagatcgcaccattgcactccagcctcggtgacagagcgacgagactctctcaaacaaaacaaaacaaaacaaattcctgcatggccatctgtccaacaactgcctgtccaatcttgaactggcaccacccatgttattcatccttgtagccaaggataactgtctcaaaacaattatgtaatactcatttttcctttcctttatttatttttattatttttttagatagagtctcactctgtcacctaggctggagtgcagtggtgtgatctcggctcactgcaacctccgcctcccaagttcaagcaagtctcctacctcagcctcccaagtagctgggactacaggcacacgccatcacacccggctaatttttgtattttttgtagagacgggtttcaccatgttggccaggcttgtctcaaactcctgactccaggtgatctacgcgccttggcctcccaaagtgctgggattacaggcgtgagccaccgtgcctggcccatttttctgttaaaaacctttgtcttcttttacctccctgataagcacatagtctatacccattcccgaataaatatccttttcttttagagtctgttatttaggttgacataagatagcaccagtctttggttttccatggtgcagggtacagatgggatggaaaggaggctcaggtactctgaatggtctgcctctcaggatttctgtgggatgcaaaagagtatatgtacacttctgaaaagtcaatcaagcctttagaaacttaaggcttaactttctgtctcggttttagaaatagatattattatattggcagcgtggccttgtttgtacctccatgattgcctggctggccttgctaacctaatcacatctgtgacgggatatagtgatgtttaatcttatgattgccttaagaattaaggcaatcagacgggttcggcggctcatgcctgtaatcccagcactttgggaggccgaggcgggcggatcacgaggtcagaagatccagtccatcctggctaacaaggtgaaaccccgtctctactaaaaatacaaaaaattagccgggcatggtggcgggagcctgtagtcccagctactcgggaggctgaggcaggaggatggcgtgaatctgggaggcggagcttgcagtgggccgagatcgcgccactgccctccagcctgggcgacagagcgagactccgtctcaaaaaaaaaaaaaaaaaaaaattagggcaatcttattcccccacgcacactcatatgctaggaccccgccccttacctgaaacgttgtggcttatatagacactgccaggcactgtgttaagtgctcccaaagagcaccccagtctaccattttccctctcgattctatatgtacactcgggacaagttctcctgatcgaaaacggcaaaactaaggccccaagtaggaatgccttagttttcggggttaacaatgattaacactgagcctcacacccacgcgatgccctcagctcctcgctcagcgctctcaccaacagccgtagcccgcagccccgctggacaccggttctccatccccgcagcgtagcccggaacatggtagctgccatctttacctgctacgccagccttctgtgcgcgcaactgtctggtcccgccccgtcctgcgcgagctgcctgcccaggcaggttcgccggtgc

SEQ ID NO: 1690 - DNA, 12259 bp, Homo sapiens
  SITE (398): n equals a,t,g, or c
ggggagtgttgttaaccggaggccagccgcagtcgccggattgagcggctgcggcgctgggttctggtgagtgggcgaagtctggcccgagttgtggttggagtcgggacccgaaccttccccttgaggtctccggagtcgcacgcccctcagccccgccgacacgctttcggcctgtcagctggccggagacctcagacgccggtggcgcgctttgctcaagcctgggccctgctgcgacgcccgcaactcctggtgctcacaggtgcgcggccgcgagggcgacccggctcctcccgtcccgctgctgctctctcccgtcccgctgtttttgtggtgctctgagttgacactactccggggagtcgggggaccccaggattccaggctgacgtttntacgccgctcgcagggcgggcgtccgaactgcccaccctaacacagctgtcgatccggctgtcgcctgcccagcctgctatcctctgtgccttggctgctctcagccctgcgtgcgcattcccgcccctggagcagatttctgctgttgcctcccaccccatcttctccaccggagggtcagcggtgcagctccccctcctccaacattgcagcttttcctcatcacctccctagaggaggcggcttggcaggcagcgtggaaagagccctagatttgaagcaagactgacccaggttccaggccttgcgtcagtgtgatcacttaaccccttcgagtctaatttgtaaaatggggtagcgtaagctattctttgtctgatgatttcgagggcgaaatgtgatttcccccccactttctcctatgaattgaggctgtgccaggcaccgggctattttgcacagcacgagcatcacataagttattttcttgccccatgcaggtctccgggccagggcaatgttccgcacggcagtgatgatggcggccagcctggcgctgaccggggctgtggtggctcacgcctactacctcaaacaccagttctaccccactgtggtgtacctgaccaagtccagccccagcatggcagtgagttcagggctcagggagggaggaactccctgggagggaaggaggagtctgcctgggcaaggggcggggctagaggtcaggtaagtagggaagtagccgccagctgcctaactttgaataaactgtgatgaggatgtggaggatcctgcatgatgagtcccaaggagaggaaagcagaaagtgacctcaaaccacagcctctccccactcctaggtcctgtacatccaggcctttgtccttgtcttccttctgggcaaggtgatgggcaaggtgttctttgggcaactgagggcagcagagatggaggtaagatgtcggctgccccaaaggtgagggcagggtgctgggaaagaatgtttggtatccacattattccctgcctggcccccagcaccttctggaacgttcctggtacgccgtcacagagacttgtctggccttcaccgtttttcgggatgacttcagcccccgctttgttgcactcttcactcttcttctcttcctcaaatgtttccactggctggctgaggaccgtgtggactttgtgagtcaaggcagggagttctggagcaggtggaagccagggagtagccagcgggcaggcttaaggagcagggagggctaggttgagggtgtggggtgagccccaggcctcctgacaggcctcttctgtgctctgcctcagatggaacgcagccccaacatctcctggctctttcactgccgcattgtctgtgagtgagattcaggggaggggaagggaggactggaacgtgaaccgtggacctgtactccagagcacaggctaccccccacagctgtacaggaaagataatttaggaagttaatttgcatagtctctgtgctgttccactctagggcttctcaactgcctgggccctcagccctttgccttctcacctgcagcctgggcagccccaacaactccccctcccccaggaagttcccagagggccaggttcagtggagtgtgcccacctgactagatcgctggggccatggtgggcttgagggtggggctgtcctagagcattaaacagctgttgggccctgggctgacccccccaccctgcatgtgtgggggtccccacagctcttatgttcctcctgggcatcctggacttcctcttcgtcagccacgcctatcacagcatcctgacccgtggggcctctgtgcagctggtgtttggctttgaggtaaaactggcttgggaggttgagaggacaagcccgaggtgaccccacatgtgccttgaataacccaacagacccttcctcagcacctgctatgtggccaacctgtgctggccaccaaggggcagtgatcagatatggctcctgccctccacacgctcactcctaggtgactggggagacgcacaaagaggctaggacagaggaggagccccaacctggggctcaggagagggttcctggaggctcgtgccggagctagctggtaatggacaggagaggattagttccatggacaactggaggcgtgtccctggcagagagagaatgtgttcagtgacaacagctcatatttgttgagtgcgaatttcacaccaggccctatgctgagctcctgacctgcatctcttattcagcaagacaatactgttataaaggaacagttaattatgtcattttatagataagtaaactgaggttcactgagttgccaaaagtcacagctagtaagtggaggggctaggaggaccctgggtgtgtctagagcctgtgattgtaccactgcacctgctgtgcagaggccttggggagcaatgtgggtgcagcaagggggagctatgtgtttacatccccctcgtccccctctcccttcagtatgccatcctgatgacgatggtgctcaccatcttcatcaagtatgtgctgcactccgtggacctccagagtgagaacccctgggacaacaaggctgtgtacatgctctacacagagctgtttacaggtgagaggggcctgggcctctcctgatctggaccagcatcctccactctgcctcctggccctgtgacctgctgctttctgcatcccctcccctcaggcttcatcaaggttctgctgtacatggccttcatgaccatcatgatcaaggtgcacaccttcccactctttgccatccggcccatgtacctggccatgaggtgagcccggccctgtcccccgatcctcctgacctgatcccgtcccttctcctgctttcactgactgtcctttcagacagttcaagaaagctgtgacagatgccatcatgtctcgccgagccatccgcaacatgaacaccctgtaagtaggcttgtcatggctgctgtcccaagctcggtcctgggtccctctgcttccagctctggacctgatacagcccctgtcatcctaaccaggtatccagatgccaccccagaggagctccaggcaatggacaatgtctgcatcatctgccgagaagagatggtgactggtgccaagagactgccctgcaaccacattttccataccaggtgggaggggccctggggagcctgcacagcaggcacaggccccagaaggcaggcccctagggacctgctgacctctgcctggccttgacccgcagctgcctgcgctcctggttccagcggcagcagacctgccccacctgccgtatggatgtccttcgtgcatcgctgccagcgcagtcaccaccacccccggagcctgcggatcaggggccaccccctgccccccaccccccaccactcttgcctcagccccccaactgtgagtatccccttgtctggccacccggcataccactggatacttgccctgggctggatgtggaagatgctgggaaattggagagtccctgccctccagaatctcagtctgggccagggagggattaaaagatgagaaatagatgcttgcagtcagtgtgaccagtgctgggctgagggcctgtgggaataggacagagctctcaatagccaggccccctgcctgggagttgggtctgtgtccatttggccctttccttacctccgtcttctctctgcagtcccccagggcctcctgcctccttttcctccaggcatgttcccactgtggccccccatgggcccctttccacctgtcccgcctccccccagctcaggagaggctgtggctcctccatccaccagtgcaggtgagcctttgggtactgtgacagccagggggcggcagggatggaacactcactgacttcgttcctgctcttcagcagccctttctcggcccagtggagcagctacaaccacagctgctggcaccagtgctactgctgcttctgccacagcatctggcccaggctctggctctgccccagaggctggccctgcccctggtttccccttccctcctccctggatgggtatgcccctgcctccaccctttggtaagctgggccactctctgggttcttcttgggggtgaggttggtgtctggccccagcagcccagactgagcctctctctctccagccttccccccaatgcctgtgccccctgcgggctttgctgggctgaccccagaggagctacgagctctggagggccatgagcggcagcacctggaggcccggctgcagagcctgcgtaacatccacacactgctggacgccgccatgctgcagatcaaccagtacctcaccgtgctggcctccttggggtgtgtctgtacaggggaagcagagtgggtttggtgggtcaggagtggagctgccaagaggtccccagcagtggttcttggcctttgacacctgccaattcaggctgcctatctacaggcccaccaagggtctccaggagttcttggtaactcctggtgcctttatttcccactccagaaagcatgtctggatctaagtaggagtgatgtttattcgagagctgactttagatcttattcctttatatttttctaaagtcaaattattcagaatttgcagtgctttagttcatcacatgatattcttctgagatgtggtgacacttagattggcaattgctgcccccaaactgagggagcgaataataggaagtcacttggagccatcctggctcaagttcaagcgctggtcccatcactcatttttgacctctcattatttgaataaaggggtcttaattcatattcataagtgatgtgtactgccagatacacacctataatcagcactttggaaggctgaggcaggaggattgtttgagcctaggaatttgagggtgcagtgagctatgattgtgccactaaattccagctttggtgacagagccgagacgctgtcttttaaaaaagtgacatgtacataatgcctggcatctagcagtgacagcacaggcttggagaggaacttgagtccaaggctcgagcactgtggcttattgagtgagtcccctataaggtgcctgactccccagggtggagactgcagggtaagagtgaacaggtcaacagtccctgcctgcaagcaccttacagctaagggatagaatcatttggcccttgagtccagtcaccctgtctgagttcattcagcatgttcacttgtgtttgccaggcactggggccacaagggcacatcattctatactctgttctgcaaggctcaccaagggcaggagaatctgcccaaccttggatgccaaggccaggcccgcctctcgtcccttctcttcccaggcccccccggcctgccacttcagtcaactccactgaggagactgccactacagttgttgctgctgcctcctccaccagcatccctagctcagaggccacgaccccaaccccaggagcctccccaccagcccctgaaatggaaaggcctccaggtaggtgtgattggcctccagccgggggagcagggaacttctctaggttccacttccagtctctctgtccccagctcctgagtcagtgggcacagaggagatgcctgaggatggagagcccgatgcagcagagctccgccggcgccgcctgcagaagctggagtctcctgttgcccactgacactgccccagcccagccccagcctctgctcttttgagcagccctcgctggaacatgtcctgccaccaagtgccagctccctctctgtctgcaccagggagtagtacccccagctctgagaaagaggcggcatcccctaggccaagtggaaagaggctggggttcccatttgactccagtcccaggcagccatggggatctcgggtcagttccagccttcctctccaactcttcagccctgtgttctgctggggccatgaaggcagaaggtttagcctctgagaagccctcttcttcccccacccctttccaggagaaggggctgcccctccaagccctacttgtatgtgcggagtcacactgcagtgccgaacagtattagctcccgttcccaagtgtggactccagaggggctggaggcaagctatgaacttgctcgctggcccacccctaagactggtacccatttccttttcttaccctgatctccccagaagcctcttgtggtggtggctgtgccccctatgccctgtggcatttctgcgtcttactggcaaccacacaactcagggaaaggaatgcctgggagtgggggtgcaggcgggcagcactgagggaccctgccccgcccctccccccaggcccctttcctctgcagcttctcaagtgagactgacctgtctcacccagcagccactgcccagccgcactccaggcaagggccagtgcgcctgctcctgaccactgcaatcccagcgcccaaggaaggccacttctcaactggcagaacttctgaagtttagaattggaattacttccttactagtgtcttttggcttaaattttgtcttttgaagttgaatgcttaatcccgggaaagaggaacaggagtgccagactcctggtctttccagtttagaaaaggctctgtgccaaggagggaccacaggagctgggacctgcctgcccctgtcttttccccttggttttgtgttacaagagttgttggagacagtttcagatgattatttaatttgtaaatattgtacaaattttaatagcttaaattgtatatacagccaaataaaaacttgcattaacaattggtggggtttgtgtcacagaatcgatcaaatcagtgtcgggctccttgctgtggctgtacacttgaaaatggaatggaatctccaggagtgagggtttccatggaagccagcactatccttggggacaccactgaccattaacagattaggaagatgtgcccattttacacacagagaagcagcccagagttcagtgccctgcttcagggcagagaccaagttggggagtcaggaactgaaagctgtcttagccagtttgggggcagggtggggtctcaggcctttggcccctgtgactccaagtataaggcatatatgaaggctagtgagctggggttgggatgggatggcagggtgaaaggtcagcatattcctgcctgcaaacccctccccagccttgattgcaggtcagaaggctgcagggggatgtccctatgctggctgtgagttcccagccactcccttgtggtcaggccagcaagtctggtctgcaatggaacagtgaccaagaacgtgcctcctacctctctatcagagcccggggctaacgtgggcactctgtgccccagtgccagcactgtactttgaacagaagatctccaagacccatgcccgagtcatctgtgttctccatcacctgcaccaaacaagatctggcctagagcaaaggcttgggggtatttgcaacagtgagcttcggagggccaaggaaacaaagtgcccagtggctctgccctgtgctaccttcccctaaactggggttgggctactgcttccaccaaataacaactagaatttgaattgctgagcccaaggaaagaaaaacaaaacaggccaaggtggaccaggcacatggctcatgcctataatcccaacgctttgggaggccaaggtgggcggatcacttcgagtcaggagtttgagaccagcctggccaacatggtgaaaccccatctctactaaaaatacaaaaattagcaggctgtggtggtgggcgcctgtaatcccagctactcaagaggctgaggcaggagaatcccttgatcccagaggtggaagttgcagtgagccaagatcatgccactgcactccaccctgggcaacagagtgagactccgtctcaaaaaacaaaaaagaacaggccaagataggagggagagaaagctgctgacgccccccattagcctggtgatccctatttggtctcccacattaggcactctcccccagcatgtacatagagttgttttctcctttatgcaagcaaggcctgaccccaaagtcctttagccctagtttctgtatcccctgtctcaggggctccaacacccacctccctcctcctgaggccccctagacttgatccacagggcatgctgacaagcaggctgctcggctgggcctcagaagcctttctccaagagccaggctttaagctcctggtcaaagtagcccttgatccgtagggtacctgtcacctcattgacctgggtgacaggtgtcttccccagcagcgggctcagaaaatcttccacgtctttctgcagggcctggggaaagatgacaaatcaggtcaggccaagagtcccttcccttaaaaagactcctgtcccttcagccctgaaagggtcaggcccagtcccagacccacccacccacttacccagatgtccccttccactttccggatcacagtcatctgccggttgccatgcgtgatgtccttgtagacggggatgttgtgcatccgagagcgtcgtacaaagtaaggcaggttgggtggggggtctgcaacagggaaagacactgttaaatcaactcttcctacgtgccatcccacctcagccaaggcccttgctctcagtctgcagagggccagtgcacccagctggaccaagccacctccagactttaggtcagggggtctcctctttccttcagcttggagtcaggaccaaattgttcaccctggtaccctaaggccccacacagggcctggcactaagtaggtgctcaagaaaaaatgaaatcagggacatgcctccctggatctttgggtccccctctaggccaacccttgccctcctccactgggtcagggaggccgaaatcaatctctggaacaaagagattgggatttgcaagcactgagcacctaccatatgctgggctctgcactaagggctctatgtactgagcagattatctccattttgctaaaacaggttgggtcaagctaagtgactaattcaagataacatcaacagtaaataaagccaaattcaaacccagaactgcctgactccaagctgtgttcttaattacagtacatagtctgctggggggaaagaaggtccaagctcttgggttttctctctgttgtttactttcccccatatggggaagacctgatctcaatagtgtggatggatgagtaccagtgaacaacagaaggctccactcctcggctcttccttgggcatgagacagatgtaacccagagggattgcaaaatgagtcctgaacccactggagagtccagagcctcatgggggaggccaacctctggggaggaggtgatgctccgtgaagctttcaaatcatccctaaccacccagctcacctctgggaggctgccagccactaggggtaggataatgttcatgctttgggggatctgggatcctggtagccggtaacaggcgctccacaaactgatattcatccacagactccacaaacctggggtaatctggagggccctgggtctggctctgaagcaaaacaaaaatcccatttctccattagcctacccaacacaggatggcataacttcagtaagtagagaatggaaacattacaggcagagagaatgacataaataaaaggctgggcgacggtgtgaaagctatcagaatcaaaatggagtgagtcacttgggttaaaaatcccaacaaatagagctagggagggccacgaagagagagttcttgggcacaaatacttaataacaagaactaccacaaaagactgcaaaaaccacagccttgcacaaaggccacttcaaccttacacaaaaaaatatttctggctgggcaaggtggctcacgcctgtaatcccagcaccttggaggctgaggcaggaggatcatctaaggtcaggagttcaacaccagcctggccaacatggcgaaaccccatctctactgaaaatacaaaaattagccgggcatggtggtgcatgcctgtaatcccagctacttgggaggctgaggcaggagaattgcttgaacccaggaggtggaggttgcagtgagctaagatcgcaccattgcactccagcctcggtgacagagcgacgagactctctcaaacaaaacaaaagaaaacaaattcctgcatggccatctgtccaacaactgcctgtccaatcttgaactggcaccacccatgttattcatccttgtagccaaggataactgtctcaaaacaattatgtaatactcatttttcctttcctttatttatttttattatttttttagatagagtctcactctgtcacctaggctggagtgcagtggtgtgatctcggctcactgcaacctccgcctcccaagttcaagcaagtctcctacctcagcctcccaagtagctgggactacaggcacacgccatcacacccggctaatttttgtattttttctagagacgggtttcaccatgttggccaggcttgtctcaaactcctgactccaggtgatctacgcgccttggcctcccaaagtgctgggattacaggcgtgagccaccgtgcctggcccatttttctgttaaaaacctttgtcttcttttacctccctgataagcacatagtctatacccattcccgaataaatatccttttcttttagagtctgttatttaggttgacataagatagcaccagtctttggttttccatggtgcagggtacagatgggatggaaaggaggctcaggtactctgaatggtctgcctctcaggatttctgtgggatgcaaaagagtatatgtacacttctgaaaagtcaatcaagcctttagaaacttaaggcttaactttctgtctcggttttagaaatagatattattatattggcagcgtggccttgtttgtacctccatgattgcctggctggccttgctaacctaatcacatctgtgacgggatatagtgatgtttaatcttatgattgccttaagaattaaggcaatcagacgggttcggcggctcatgcctgtaatcccagcactttgggaggccgaggcgggcggatcacgaggtcagaagatccagtccatcctggctaacaaggtgaaaccccgtctctactaaaaatacaaaaaattagccgggcatggtggcgggacgtgtagtcccagctactcgggaggctgaggcaggaggatggcgtgaatctgggaggcggcattgcagtgggccgagatcgcgccactgccctccagcctgggcgacagagcgagactccgtctcaaaaaaaaaaaaaaaaagaattaaggcaatcataattccccacgcacactcatatgctaggaccccgccccttacctgaaacgttgtggcttatatagacactgccaggcactgtgttaagtgctcccaaagagcaccccagtctaccattttccctctcgattctatatgtacactcgggacaagttctcctgatcgaaaacggcaaaactaaggccccaagtaggaatgccttagttttcggggttaacaatgattaacactgagcctcacacccacgcgatgccctcagctcctcgctcagcgctctcaccaacagccgtagcccgcagccccgctggacaccggttctccatccccgcagcgtagcccggaacatggtagctgccatctttacctgctacgccagccttctgtgcgcgcaactgtctggtcccgccccgtcctgcgcgagctgcctgcccaggcaggttcgccggtgc

SEQ ID NO: 1691 - DNA, 1584 bp, Homo sapiens
agcagtgacgtgacacgcagcccacggtctgtactgacgcgccctcgcttcttcctctttctcgactccatcttcgcggtagctgggaccgccgttcaggtaagaatggggccttggctggatccgaagggcttgtagcaggttggctgcggggtcagaaggcgcggggggaaccgaagaacggggcctgctccgtggccctgctccagtccctatccgaactccttgggaggcctggccttccgcacgtgagccgccgcgaccaccatcccgtcgcgatcgtttctggaccgctttccactcccaaatctcctttatcccagagcatttcttggcttctcttacaagccgtcttttctttactcagtcgccaatatgcagctctttgtccgcgcccaggagctacacaccttcgaggtgaccggccaggaaacggtcgcccagatcaaggtaaggctgcttggtgcgccctgggttccattttcttgtgctcttcactctcgcggcccgagggaacgcttacgagccttatctttccctgtaggctcatgtagcctcactggagggcattgccccggaagatcaagtcgtgctcctggcaggcgcgcccctggaggatgaggccactctgggccagtgcggggtggaggccctgactaccctggaagtagcaggccgcatgcttggaggtgagtgagagaggaatgttctttgaagtaccggtaagcgtctagtgagtgtggggtgcatagtcctgacagctgagtgtcacacctatggtaatagagtacttctcactgtcttcagttcagagtgattcttcctgtttacatccctcatgttgaacacagacgtccatgggagactgagccagagtgtagttgtatttcagtcacatcacgagatcctagtctggttatcagcttccacactaaaattaggtcagaccagggcccccaaagtgctctataaaattagaagctggaagatcctgaaatgaaacttaagatttcaaggtcaaatatctgcaactttgttctcattacctattgggcgcagcttctctttaaaggcttgaattgagaaaagaggggttctgctgggtggcaccttcttgctcttacctgctggtgccttcctttcccactacaggtaaagtccatggttccctggcccgtgctggaaaagtgagaggtcagactcctaaggtgagtgagagtattagtggtcatggtgttaggactttttttcctttcacagctaaaccaagtcctgggctcttactcggtttgccttctccctccctggagatgagcctgagggaagggatgctaggtgtggaagacaggaaccagggcctgattaaccttcccttctccaggtggccaaacaggagaagaagaagaagaagacaggtcgggctaagcggcggatgcagtacaaccggcgctttgtcaacgttgtgcccacctttggcaagaagaagggccccaatgccaactcttaagtcttttgtaattctggctttctctaataaaaaagccacttagttcagtcatcgcattgtttcatctttacttgcaa

SEQ ID NO: 1692 - DNA, 1585 bp, Homo sapiens
agcagtgacgtgacacgcagcccacggtctgtactgacgcgccctcgcttcttcctctttctcgactccatcttcgcggtagctgggaccgccgttcaggtaagaatggggccttggctggatccgaagggcttgtagcaggttggctgcggggtcagaaggcgcggggggaaccgaagaacggggcctgctccgtggccctgctccagtccctatccgaactccttgggaggcctggccttccccacgtgagccgccgcgaccaccatcccgtcgcgatcgtttctggaccgctttccactcccaaatctcctttatcccagagcatttcttggcttctcttacaagccgtcttttctttactcagtcgccaatatgcagctctttgtccgcgcccaggagctacacaccttcgaggtgaccggccaggaaacggtcgcccagatcaaggtaaggctgcttggtgcgccctgggttccattttcttgtgctcttcactctcgcggcccgagggaacgcttacgagccttatctttccctgtaggctcatgtagcctcactggagggcattgccccggaagatcaagtcgtgctcctggcaggcgcgcccctggaggatgaggccactctgggccagtgcggggtggaggccctgactaccctggaagtagcaggccgcatgcttggaggtgagtgagagaggaatgttctttgaagtaccggtaagcgtctagtgagtgtggggtgcatagtcctgacagctgagtgtcacacctatggtaatagagtacttctcactgtcttcagttcagagtgattcttcctgtttacatccctcatgttgaacacagacgtccatgggagactgagccagagtgtagttgtatttcagtcacatcacgagatcctagtctggttatcagcttccacactaaaattaggtcagaccagggcccccaaagtgctctataaaattagaagctggaagatcctgaaatgaaacttaagatttcaaggtcaaatatctgcaactttgttctcattacctattgggcgcagcttctctttaaaggcttgaattgagaaaagaggggttctgctgggtggcaccttcttgctcttacctgctggtgccttcctttcccactacaggtaaagtccatggttccctggcccgtgctggaaaagtgagaggtcagactcctaaggtgagtgagagtattagtggtcatggtgttaggactttttttcctttcacagctaaaccaagtccctgggctcttactcggtttgccttctccctccctggagatgagcctgagggaagggatgctaggtgtggaagacaggaaccagggcctgattaaccttcccttctccaggtggccaaacaggagaagaagaagaagaagacaggtcgggctaagcggcggatgcagtacaaccggcgctttgtcaacgttgtgcccacctttggcaagaagaagggccccaatgccaactcttaagtcttttgtaattctggctttctctaataaaaaagccacttagttcagtcatcgcattgtttcatctttacttgcaa

SEQ ID NO: 1693 - DNA, 6111 bp, Homo sapiens
aaaaatttactcatgttttttaaatttagggctgaaagaatcaggattcctgaaccttggatcacacctccagatttgcaagagaaaatccacatttttgcccaaaaatgtctattcttgacggagagtctaaagcagttcacaggtaatgtgaggagaggtgtcatgaggggaaatggatttatactgagtatctgcatattgcctgatgaagaggataattttccagccagatagtgggatgcagactgaatttttctgatttcttttttagaaagggacggagcttcgaattcgtatgaaaaggggattttatctacctactgggcttttgatgtaaagttgcttggaaaaaagaacatctgcactgaaagtgggaaacgtgggataagggtgatacccattggccagccttccctgatattttacatcttccctttggtcttaattaattttctcaattaacagcttcttgttctaatttgaagtttgttaactgtatttagtcaattcgcagtctgcattgatggaggagaaaaataagcaatccaaaaattaatcaatccagaattaatttgattgtttacttcggaaagaatgaacaaaaactaccttggatacgtttcacttgagccagtgtttatcattgtaatttactgagttcctactgcttgtgggcacaggtgccagctcgggctggaggaatccagcagcactgacaggcagcaccgccagggacatggttaggagcgggcagtcaggagtcaggctgcctgggttctgggcctgcctctaccacttagtaaggattcaacaagtaatttcctcatctgtaacagaacagtaatagttcttacctcctgaggtataagaattaaggttagttaccatttctaacacatcctgtttcgattcgactcgtacctaatccttatttatgtttattaaatcgttctaggcatttggagaagcttttccaaattaaaatttttctgctcacgagccacattcagtaaagagttggccatatattattccacccaggaatactaaaattcctgggcagtctggtggattctgaaatccttatatgtaggtaaacccttctcttaattattagaaattacaaacccccacaatctttgataattttctattttgtatatgctgggttcatatatgcattgcatctattcagatatatactttttggggcatctagcaacatagagctagcagatacatgtcctctacaagcaagacaaatggggagaaactccactcaatacagtggataataccagaagtggttagttcaggcatgactttccttgatctggctcttcttttcttgccacttaaaagtcttagtgggataatgtgtgaaaaattctgtttcaactataaagtgccttataaatgaatggtcatgtttaccccagagtgtcagtgagtgtcacttgagccattcagctcttgtacacagatgacttatgcaactcaaaagttatgtatgacgtggggttggaaccgcgtttccctctgcagaatcagctgactcactggaaggtggaattcttgatcttggctcagttttatcccatattctaccagtctcaggcatgtggttatccctgtacttaagattcccaatccctctccccttaaagcttttggttggatgatagagccatacatcatatgaaaaaattagtgcatgactaacaacagaggttctggggtttctggtggagaccactgctttatgatgactaaccaaagcccccttagttatgtatttcctggaaaccctcatgacttccataactttgctcttttattctttcagaattaagagaggctcagttatactcaggtaggtgatgagagacaaaaccatattagggtaaggagtaaaaatccttgtgaacctaactactattatgaatgatttggaaattgcttagatttggattcttttggttacatgtataaagatgatacacaacaaccacaaaaatcctcagttgtttctatgtgttaacagtatctttgcctcctgaaatgtctcagagctgaagccatagggtaaaatcaatctcaggtgttaaagaaggattatagggtggaaaccgcagttccccaaaagtagaacagagctggtacactagtacactgctctgcccgcccagcttcagggtcaaaccatggtttgtgacaagcaggactgattgagctccacaatagtgctcttgagtgctagaggaagtctaggagtcttgtgtcatcccatcactgtgcctcagagcaaagtttgaaacttcccttccccctcacaaccgctttcaccctactatagagcctgggtaaatttaacattgcagaagtattcaaatctaaggtgtattcgtcccatagtcacagtcaccttctgttatgaattatcctctaaatgaagagaaggactctacatacagtggatctgcagtccttggtgtgcagtggctctgatccatatttattttcaacaagtattaaatgagtactttgcttgtatcctacactgcctaacattgtgcagggtattttagaggaacagaagagcataagtcatcctactcttggggtttacattgtctggttggaggtatacccatgacacaagaagaaggtaggcagctgttgtagacagattgttgaaccaggagccaagggttctggggttcttggttacctctatcagttgcctgtcttttgtgggagtaaaaatttgtgggcttaaatttctgagaggtaatgtttgggactcttcctcctgaacaagatgtgaggagcaaatgagagaatacatatcagtatttttatttatttatttattattttaattttttaaattttttattattcattttagaggcaggttctctgttgcccaggctggtgtgcagtggcatggtgatagcttgctgcagcctcatactcctgggctcaagtgatcctcctgcctcagcctcctgagtagctggaattacaggcatgcaccaccatgcttgcctaatttttttacttttattttttgtagagacagggtctcaaactcctgtatgcaagcaatcctcttgcctcagcttcccaaagtgctgagattacaggcatgagccacatatccagcccattatcagtgtttttgaagcaggaaaacacttgatgatagcaagatgctgtaatactaaatgccagaggagatgacatgggtcatacacagttttagatttcagaacagtaagtgtaatggcctgggcagattaagaaaaacttggaggatgtgtgttttggactggacattagaagaagatgaatagagcttcgatgtgcagagtaaagatcttatagaatggataaaagagtgatttgggctgggtgtagtggctcacacctgtagtcctaacactttggaaggctgaaatgggaagtctgcagtgagccatgattatgccactgtactacagtctgggtgacagagtgagacctcatctcaaaaaataaaaaaaagtaaaaaataattttaaaagagtgatttaaaaagtaagcatactgatacaggttcccagtcccttacccacagttctaaaatcccaaatctctgaaagccaaaacctttttcattattttgtgggaaattaattatagcatcaaaacctgaatttatgtggtactgtttagagcctttatccttcattatgtaaacattcatgaatctcacagcagatctattaatacttcattatagaatgctgcctgtctaaaacctgtaatattctgaattctgtgaaacttggggcccctggaattttcagaataagggatgatgagcgtgtaagaaaacctcaattcagcgtatctgccaggcacagtggctcatgcctgaaatcccattgctttgggaagttgaggtgggaggattgcttgaggccaagagttcgagaccatcctgagcaacatagtaagacctcatctctacaaaaaattttttaaaattagggtggtagtgcacacctatggtcccagctacttgggtgtcttaggcgggagaatcacctgagcccaggagtttggggttacaatgaactatgaccacaccactgcactccagcctaggcaacagagcaagaccctatctcttaaaatcagttcatgatggatattgtggcttcagatgtgaaagaaaagatacggggctaaaattctgtattttcagtgtattctggtaaccagctaatccaagcagtaatttttgaaatgtgaagtttagaatatattctaaataaaatacgtgcaacctccagtgggaacctcttattattggggaggtagtagaaaggcgctgggtgttctaaaataggctctcctggcccacggctgactgtcttccttgtgtctctgcagtggacgtgactctggacccagacacggcctaccccagcctgatcctctctgataatctgcggcaagtgcggtacagttacctccaacaggacctgcctgacaaccccgagaggttcaatctgtttccctgtgtcttgggctctccatgcttcatcgccgggagacattattgggaggtagaggtgggagataaagccaagtggaccataggtgtctgtgaagactcagtgtgcagaaaaggtggagtaacctcagccccccagaatggattctgggcagtgtctttgtggtatgggaaagaatattgggctcttacctccccaatgactgccctacccctgcggaccccgctccagcgggtggggattttcttggactatgatgctggtgaggtctccttctacaacgtgacagagaggtgtcacaccttcactttctctcatgctaccttttgtgggcctgtccggccctacttcagtttgagttactcgggagggaaaagtgcagctcctctgatcatctgccccatgagtgggatagatgggttttctggccatgttgggaatcatggtcattccatggagacctccccttgaggaggtgaattcaggccaaaagggctgttggctgtaatcctacgccaggcacaaggcatcttgttgccttgccacgtcctgtcacagctgggtatccttaccatgttccacgcccttgcagtgggagacaggatgtccatgttctctaccatccttttccttcccatgcagattgtgaaatgtaatgagatgtatcaagatatcctagaaataaaaaccagatgtccacctccagtgtttcatactttctggttttacacatcgctggagggataaagagtatggataatctttggatttggagagccgttcaagatacttccagcttcttggctcagcctggcttcctctggttcagccccacataatgattatggctatttgctgtcatttctgggctagggctcctttctaacaacctagactggaataaggccctgtcagcatggctccctttatcccagttttccgtctgggaacagtacctctgcccctgattcccaatgtgccatagttttattaactccattaaagaagcctgtatgtgttttggttagttacagttattttacaataatggtgggtaatggccccacctctgttatgagataatgttctaatcaatgtctctgcctttgtatcttttctgagggctttgtctgttctcttcattctaatgaaaggtgtattctagtgctgggtgcatatcatccaggataatattctgcccaactccatcctctgttactagatcccttaccagtcacatttgtggactggtggccagtcgtataccatccctggaaggattctgggacaatattccagggattcattgacttcttggctccttttctccatttcctttgggggaagggggaattgaccatgcttaagtgcatcctatcaaggggcagctccgtccccatggccattggatcatgagacactctgaagtcagaaggctggggcagatcacttcaagcaagcccccatgatggttctcagtcctgcttctctgtgggtacgtgcccctctgtttaaaaataaactgaatatggatgtttac

SEQ ID NO: 1694 - DNA, 1003 bp, Homo sapiens
tttttttcatttttcttttttgtagaggcagggtcttaccatgttgcccaggctggtcttgaactcctagcctcaaagtaattatcccaccttggcctccaaaagtgttgggattgcaggcatgagccactgtttcctgtcatgttacatttttaagtagatttctcaaaacaccatgagatacgtcttacttctcataggccagaacttagtcacaaggtcacatctagctatgagggactgggcagctgtgagccataaaaggcagaagatggcagaaggggtattggataggcaactggcagtctttgctatagacatccttgcagggctagggaattgggtaatgtcccccacagtgcctttctatctgaacatgtcattctttccatatttgggaacctgagaattcgggttaattgcccaccataaatatcaaggactgtcatggaatctagtgctttctggcaaagtcagcctcatatgtaattcagtaaacctttttgagtacttagtatttgaaaagctgtgagctaggtgctttggggggtatgagaatgagtacagtatcctattttggtctagaggatcatagctcaggaagagaaggtgggaaaagctgtagtggctgattttaaagactgtccgtgtacgctagacagtttaacttagcccctgtcctagttcctggaaggtcatggaattgggaaaaacacaacaatgctgggcatggtggctcacgcctgtaatcccagcactttgggaggccgaggcgggtggatcacctgaggtcaggagttcgagaccagcctggccagcatggagaaaccccatctctactaaaaacaaaaaattagctgggtatggtggcgcatgcctgtaatcccagctactcaggaggctgaggcaggagaatcgcttgaacctgggaggcagaggttgcggtgggccgagatggcgccattgcactccagcctgggcaacaagcgaaactccatctcaa

SEQ ID NO: 1695 - DNA, 922 bp, Homo sapiens
ccactctggccaatagtttacttcaaactggaaaataaaaccactttctcagtgccatgtcactactttctagtggtgctaagaaagtagtgttggacattcatagcgtacagttcttttttttttgaggtggagtcttgctctgtcgcccagtctagagtgcagtggcacgatctcggctcactgcaacctctgcctcccaggttcaagcgattttcctgcctcagcctcctgagtagctgggactacaggcgcctaccaccgcgcccggctaattttttgtttttagtagagacggggtttcaccatcttggccagggtggtcttgaactcctgacccttgtgatccacctgccttggcctcctaaagtgctgggattacaggcgtgagcaaccgcgcccggcctgcctacagttcttatattggttaatcctgtaattttactaggaaagtattttctcaagtcctttttgtagtattgtgccaggcattggggttccatggctgaggttcatgagttggtgatatcatgtcctaattcttcatttattcatcaggttttaaggggaaataatagaaccagggctatagaaagtagcttccatgaggctagattagcttttgctgaatattctgagatctaaatgtatacggtaatatatatacaggcacataaatactactaacaaacatagagcagtgcttggcacatcatatgaagagttttatgcacagtagcttccttaatgctcatgataattttatcaagtgtgtactgttgtcttactttacagataaactgcagcagagagggtaaatgacttatccaaggtacacagctaggaagcagcagagccaggattcaaactgagatggaacacatgaccacatcaggtcctgccccacaacatgtgttattgg

SEQ ID NO: 1696 - DNA, 520 bp, Homo sapiens
gttgatctgattattgagtggctgtggagctggtgccgcgttccttgttgagtcatttcctgtcttgattttaggaccttcctccgggcagcgactgctgctaccctgccgagaagtttgctgcccgtggcattgctacttccatgaaggaaatctatcttctcttttcatgtctttgttctgaaatttcgctgtggtatttctgagtataagttggtttggctgtgttgcctggcgctggccgtgtcttctcacctgagatagctaagtttcagttcccagcccttcccggccatctgtcctcccgtggcacctctgcaccctgacataattcttgttctggatctcctaaaagggagtagcttgcacccattcagtgtcttctccatctctcaaactgcgcttcccagtattggtctctgtgttctcagtttacgatcttccagtttactagttctgtctccatccaattagtttgtttaatctgttgagtttttaaataaaaccgcattggtctcta

SEQ ID NO: 1697 - DNA, 449 bp, Homo sapiens
cacctgtagttccagctgtgtgggagggtgaggcaagaggatcgcttgaacctaggattttgaggctgcagtgagttatgattgtgccacttaatgtcagcttcggtgacagcgagaccctgtctcaaaaaaaaagttttcgtacatacccaactatctaccaatcaggaagctgaaagcacaaccagtaccttctcaggagcgtggggaggccagccacccgggcagagcaaggagagaatgaggagtgacatgggtgttgccgtgagtggcgaaggggatggaagatttcagcacgatgctatttctaacaagtttcagcattccagtatctcttttcacaaataaaacatttactaaccatttgagcgtattccctcttgcttgttattgttgcctcaggtttttgtttcacatttttcatgctacattaatttttgtagtcagta

SEQ ID NO: 1698 - DNA, 335 bp, Homo sapiens
ggaaatagccaatagtgaatatttttattatgtgttagataaagcttctttcttcttatgcttatttaggtgaactagaaatatggtttcagtgaaatttaagttctgataagtacagatacatagcatattttctgaaaaatttgaaaaacacacacaaatataaaaaattaccataaccattctatcaagcaaccagtgttaatgttttaatgtttctttccaatgtctttttaaaaaaatctcattgagactattctatgtatttaatcttactatgtattcttaacaattattttaaatttttgatcactgcttaataattaggttggtgc

SEQ ID NO: 1699 - DNA, 335 bp, Homo sapiens; identical to SEQ ID NO: 1698

SEQ ID NO: 1700 - DNA, 764 bp, Homo sapiens
attaacttcaaaataagaactttaaaaattatggatataaatttttatgccctattttaagaaactaccctttttttcttatgagaaaaatgtctgcaagattgaaaaaagcttccatatagagtaatacattgaatgaaatgagttgttttctacttaatcagagtggccaaaggctatttcaaaacaaatttattcccatttctgaaccttcaaatcaagagaccatttaaggattcatttcaatttggttatttataagaagaaaagactattctgatggcatgtaggatggtcctaaagtaatcggctcagctaaaaacacacttataacagttgggcatgtcagctgaggagagacccttatagcctgtgtttcctacaaaaacaaaaacacagttcttttatgaaagtagacaagttgatggtatatttgggctaaataaaatacaatgttgacatatgttgaaatattctatagttgttacacatgttggctgaggtggttgtactgatccagacacatggctgatactttgagtgggaacatagccagtgtggttttaaaatattatgtccctctgaggagggattacagatgattttttgctttctacttacacctttttataggtttcttacaaaaatattgcgcatgcagtcttcttacaattagggaaaaaacccaagacatgctctaaggtgagatgagtggggggaagaaatctgtatacagtcagccctctgtatccaaggcttctgaa

SEQ ID NO: 1701 - DNA, 764 bp, Homo sapiens; identical to SEQ ID NO: 1700

SEQ ID NO: 1702 - DNA, 3080 bp, Homo sapiens
ataaattaaactttatcatgggtatgtatataggaaaaaataatagtttgtataaggttcgaatagtttgtataaggttcggtactatccacagtttcaggcatacaccgggggtcttggaacatattcccctcagataagagagaattcctgtgtatggaagagactcctcagatacagcttctcttcaactgtaaacctatgaattaaaaaaaagttattggtcctatccacccccgcacatacaacctacattgttatggcaaggatacgatgtcacatgaattgactaagtttacaagagaggaaattgaaggcatgtagcaatcccatggcagttgtgaaatccatctgcctatatgtcaccaattcccccaattccaggggtagggaacatttgattagtctactttggttctctgaagttggctcccttttctttttctcagttcttgacttttttctttgagctgtctttccttttccatgagaaatgtcctctttttgtagctttctcagcctgcttctaggctctgtcccaactggcacagttatccacactggcacaacttctttaaaaagctttgtggactttcaaattataaaccactcactccaccagagagaagccacacccacaaatttcttcaagaagtcctctatgtactttgaatgtcaatcagggaatgataccctttagagtcatatatgtcttttgtctacctgagagcgtcagctagacactggcttaaatctttctgaagtacaggtggtcgtccacttatgatggttcaacttagaattcttttactttaggatggtatgaaagctatatgcattcagtagcaaccatacttcaagtacccatacaaccattctattttttacattcagtacagtattcagtaaatcatgaaatattcagcacttcattataaaataggctttgtgttagattactttgttcaatataacataatgcaagtgttctgagcacatttaagcaatgacaggttaagctatgatgtatggtaggttacgtgtactattcaacttaatattttcagcttacgatgggtttatcaagacataaccccattgtaagtcagggagcatctgtagtagtaacaaggttgtattgcatgtgctttattttatcttgatcctcagaccataatcttacagttaacaccctggatttttttttttttaacttcagaaccttttgctgaagaagctggtaacgagaaagttttattttgtaaccctgcaagtcccaggttgaaagtattttcctctaaattctgcttgaaactgagcagttccttgtttagttcttctctcttttaatacctttctacaggtgttttttgaaaaattgcttatcactttcagcatttttcctggaaaccttagccagatctataacttcaataggtactttttctatcttccaagatactgtctcacttgttttgtcagtagattacatggcttctgtccagcctgaaataccaatttcctcagtggttttccagcctccgttagtagtctctttgctgctcttccaccaaatgtctataacccagtccccaaactagtgctacatgtcttaagtttctgtcatggcaatgccctgtttaaataccaaatactatttcagttatctttttctgcctaacaaatcaccccaaaatttactaccttaaaacaaaactattctttgcttaagattctactgtctgaactggactcagctgggcatttcttctggtctcacctggagtcatttatgcaactgcagacatgtggggactccaccaaagatggctttactcaaatgtctggggcctcaactggggtggctgcattagctctggcacagctgcagttccctctccagcagggtcctgggccatttcacatgatgactgagggctccaagagggtgaaagcagaagcatctgggctaggcctcttagagcctgtgcataaaactgaaacagcactacttcatccatgctgcctttcaaagcaagtcccggggcctgctcaaaattacaggcagggaaaatatcctctacctgatggtagtgacaaagaatatgtgtcccatcgttaattcaccagttgccttcacagttgcaacaatgagactgttagcttttaaacagaaatgataaaaactagaagccggccgggcgcggtcgtcacgcctgtaatcccagcactttgggaggccgaggcgggtggatcaggaggtcaggagattgagaccgtcctggctaacaaggtgaaaccccgcctctactaaaaatacaaaaaattagccgggcgcagtggcgggcgcctgtagtcccggctactcgggaggctgaggcaggagaatggcgtgaacccgggaagcggagcttgcagtgagccgagattgcgccactgcagtccgcagtccggcctgggcgacagagcgaaatccgtctccaccgacaaaccccccaaacacaaaactagaagccattgtaacaacatgtttaaagtgctagaataagaaaactgcaggcttagaattctaaaccagccaaaatgttcttaaaagattaaggcaaaacaaatatgtgttcaaacaaacaaaaacagagacaatttggcaccagtaggcctgcactgaaaaagtaaaggaagtttatcaggaaaataatccaagatagaaatatggacttggaagaaagaatgaagaacactgggaaacatatgtaaatgaatagtaactgtacaaaataataatggtacaccctgaggagtttcaattttatgtactgtatatctaaaattcatggtagcaataacttaaatgatgagagggaagcaaatagagtttaaaagtcctaaggcttaattggtatcagccaagtagtaaaagtaataatttgcattggccttaataagtaaaaaagcatgttttaaactctaggctaacaactaaaaattatttttaaatgtaacttaatagaaggaaaatggaatcatgtagaacatttgattaatccaaaggaagtcaagggaagataaaggtacataaa

SEQ ID NO: 1703 - DNA, 3083 bp, Homo sapiens
ataaattaaactttatcatgggtatgtatataggaaaaaataatagtttgtataaggttcgaatagtttgtataaggttcggtactatccacagtttcaggcatacaccgggggtcttggaacatattcccctcagataagagagaattcctgtgtatggaagagactcctcagatacagcttctcttcaactgtaaacctatgaattaaaaaaaagttattggtcctatccacccccgcacatacaacctacattgttatggcaaggatacgatgtcacatgaattgactaagtttacaagagaggaaattgaaggcatgtagcaatcccatggcagttgtgaaatccatctgcctatatgtcaccaattcccccaattccaggggtagggaacatttgattagtctactttggttctctgaagttggctcccttttctttttctcagttcttgacttttttctttgagctgtctttccttttccatgagaaatgtcctctttttgtagctttctcagcctgcttctaggctctgtcccaactggcacagttatccacactggcacaacttctttaaaaagctttgtggactttcaaattataaaccactcactccaccagagagaagccacacccacaaatttcttcaagaagtcctctatgtactttgaatgtcaatcagggaatgataccctttagagtcatatatgtcttttgtctacctgagagcgtcagctagacactggcttaaatctttctgaagtacaggtggtcgtccacttatgatggttcaacttagaattcttttactttaggatggtatgaaagctatatgcattcagtagcaaccatacttcaagtacccatacaaccattctattttttacattcagtacagtattcagtaaatcatgaaatattcagcacttcattataaaataggctttgtgttagattactttgttcaatataacataatgcaagtgttctgagcacatttaagcaatgacaggttaagctatgatgtatggtaggttacgtgtactattcaacttaatattttcagcttacgatgggtttatcaagacataaccccattgtaagtcagggagcatctgtagtagtaacaaggttgtattgcatgtgctttattttatcttgatcctcagaccataatcttacagttaacaccctggatttttttttttttaacttcagaaccttttgctgaagaagctggtaacgagaaagttttattttgtaaccctgcaagtcccaggttgaaagtattttcctctaaattctgcttgaaactgagcagttccttgtttagttcttctctcttttaatacctttctacaggtgttttttgaaaaattgcttatcactttcagcatttttcctggaaaccttagccagatctataacttcaataggtactttttctatcttccaagatactgtctcacttgttttgtcagtagattacatggcttctgtccagcctgaaataccaatttcctcagtggttttccagcctccgttagtagtctctttgctgctcttccaccaaatgtctataacccagtccccaaactagtgctacatgtcttaagtttctgtcatggcaatgccctgtttaaataccaaatactatttcagttatctttttctgcctaacaaatcaccccaaaatttactaccttaaaacaaaactattctttgcttaagattctactgtctgaactggactcagctgggcatttcttctggtctcacctggagtcatttatgcaactgcagacatgtggggactccaccaaagatggctttactcaaatgtctggggcctcaactggggtggctgcattagctctggcacagctgcagttccctctccagcagggtcctgggccatttcacatgatgactgagggctccaagagggtgaaagcagaagcatctgggctaggcctcttagagcctgtgcataaaactgaaacagcactacttcatccatgctgcctttcaaagcaagtcccggggcctgctcaaaattacaggcagggaaaatatcctctacctgatggtagtgacaaagaatatgtgtcccatcgttaattcaccagttgccttcacagttgcaacaatgagactgttagcttttaaacagaaatgataaaaaactagaagccggccgggcgcggtggctcacgcctgtaatcccagcactttgggaggccgaggcgggtggatcaggaggtcaggagattgagaccgtcctggctaacaaggtgaaaccccgcctctactaaaaatacaaaaaattagccgggcgcagtggcgggcgcctgtagtcccggctactcgggaggctgaggcaggagaatggcgtgaacccgggaagcggagcttgcagtgagccgagattgcgcccctgcagtccgcagtccggcctgggcgacagagcgaaactccgtttcaaaaaaaaaaaaaaaaaaaaaaaaaactagaagccattgtaacaacatgtttaaagtgctagaataagaaaactgcaggcttagaattctaaaccagccaaaatgttcttaaaagattaaggcaaaacaaatatgtgttcaaacaaacaaaaacagagacaatttggcaccagtaggcctgcactgaaaaagtaaaggaagtttatcaggaaaataatccaagatagaaatatggacttggaagaaagaatgaagaacactgggaaacatatgtaaatgaatagtaactgtacaaaataataatggtacaccctgaggagtttcaattttatgtactgtatatctaaaattcatggtagcaataacttaaatgatgagagggaagcaaatagagtttaaaagtcctaaggcttaattggtatcagccaagtagtaaaagtaataatttgcattggccttaataagtaaaaaagcatgttttaaactctaggctaacaactaaaaattatttttaaatgtaacttaatagaaggaaaatggaatcatgtagaacatttgattaatccaaaggaagtcaagggaagataaaggtacataaa

SEQ ID NO: 1704 - DNA, 101 bp, Homo sapiens
aggctgaagtgcagtggtgctatcttggctcactgcaacctctgcctcccaggttcaagtgattctcctgcctcagcctcccaagtagctgggactacagg

SEQ ID NO: 1705 - DNA, 101 bp, Homo sapiens; identical to SEQ ID NO: 1704

SEQ ID NO: 1706 - DNA, 830 bp, Homo sapiens
gttttagtaattctatgattcagacctctttttaattcagctttcctgctaattaatgtaaattagtaaggtttctgctgggcgcagtggctcatgcctgtaatcccaacactttgggaggccaaggcgggtggatcacgaggtcaagagatcgagaccatgctggctaacatggtgaaacctcgtctctactaaaaatacaaaaaaaaattcgccaggcgtggtggcaggcgcctgtagtcccagctactcaggaggctgaggcaggagaatggcgtgaacctgggaaccagagcttgcagtgagccgagatcacacctctgcactccagcctgagcgacatagtgagaccccgtctcaaaaaaaaaaaaaattaataaggtttcataattattatatttaccaaccaggttctttctacataattattgtttaccttctaataaattacttacaaaggccacctacaaatccaaattatatacaaaacgtttcatttcctatttccttcccagggatgcataattattttggaaaaatcagtggcagctgggcacggtggctcatgcctgtaatcccagcactctgggaggccaaggcaggcggatccatctgaggtcaggagttcaaaaccagcctggccaacatagtaaaaccccatccttactaaaaatacaaaaattagctgggcgttctggtgcacgcctatagtcccagctactcaggaggctaaggcaggagaatcgcttgaacccaggaggcagagatcgcagtgagctgagatggtgccactgcactccagcctgggtgacagagcgagactgtctctt

SEQ ID NO: 1707 - DNA, 803 bp, Homo sapiens
gttttagtaattctatgattcagacctctttttaattcagctttcctgctaattaatgtaaattagtaaggtttctgctgggcgcagtggctcatgcctgtaatcccaacactttgggaggccaaggcgggtggatcacgaggtcaagagatcgagaccatgctggctaacatggtgaaacctcgtctctactaaaaatacaaaaaaaaattcgccaggcgtggtggcaggcgcctgtagtcccagctactcaggaggctgaggcaggagaatggcgtgaacctgggaaccagagcttgcagtgagccgagatcacacctctgcactccagcctgagcgacatagtgagaccccgtctcaaaaaaaaaaaaaattaataaggtttcataattattatatttaccaaccaggttctttctacataattattgtttaccttctaataaattacttacaaaggccacctacaaatccaaattatatacaaaacgtttcatttcctatttccttcccagggatgcataattattttggaaaaatcagtggcagctgggcacggtggctcatgcctgtaatcccagcactctgggaggctaaggcgggcggatcatcaaggtaaggaatccaaaaccagcctggccaacatggtgaaaccccgtctctactaaagatacaaaaaattagccaagcatggtggtatgtgctagctacttgggaggctgaggcaggagaatcgcttgaacccaggaggcagaggttgcagtgagccgagatcgcgccattgcactccagcctgggtgaca

SEQ ID NO: 1708 - DNA, 830 bp, Homo sapiens; identical to SEQ ID NO: 1706

SEQ ID NO: 1709 - DNA, 126 bp, Homo sapiens
atgctaaagacgagttaatgggtgcagcacaccagcatggcacatgtatacatatgtaaccaacctgcacattgtgcacatgtaccctaaaacttaaagtataataataataaaataaaaaaaaaa

SEQ ID NO: 1710 - DNA, 558 bp, Homo sapiens
caggatgattgcttgagccttggagtttgagactagtctggccaacatagccagaccccgtttctttaaaagaaaaaaaaaaacaattagctgcatgtggtggcacacatgtagtatcagctttgggaggcccagatgggaagattgcttgatctcaggaggttgaggctgcaatgagctatgatcatgccactgcactccagcctgggtgatagagcaagaccctgtctcaaaaaaaaatttttttaatagataaacattcaggcattccaaactcctaatgtattgtctactattaagaatgcatgctggctgaggcaggagttcaagaccagcctggccaacgtgatgaaaccccatatctactaaaatacaaaaattagctgggccaggtggtgggtacctgtaatcccagctactcaggaggctgaggcaggagaatgtcttgaacccgggaggcagagattgcagtgagccgagatctcgccactgcattccagcctgggcaacagagtaagactccatctccaaaaaaaaaaaaaaaaaaaaaaaaaagaa

SEQ ID NO: 1711 - DNA, 560 bp, Homo sapiens
caggatgattgcttgagccttggagtttgagactagtctggccaacatagccagaccccgtttctttaaaagaaaaaaaaaaacaattagctgcatgtggtggcacacatgtagtatcagctttgggaggcccagatgggaagattgcttgatctcaggaggttgaggctgcaatgagctatgatcatgccactgcactccagcctgggtgatagagcaagaccctgtctcaaaaaaaaatttttttaatagataaacattcaggcattccaaactcctaatgtattgtctactattaagaatgcatgctggctgaggcaggagttcaagaccagcctggccaacgtgatgaaaccccatatctactaaaatacaaaaattagctgggccaggtggtgggtacctgtaatcccagctactcaggaggctgaggcaggagaatgtcttgaacccgggaggcagagattgcagtgagccgagatctcgccactgcattccagcctgggcaacagagtaagactccatctccaaaaaaaaaaaaaaaaaaaaaaaaaaaagaa

SEQ ID NO: 1712 - DNA, 166 bp, Homo sapiens
ggggggaggggggagggatagctttgggagatatacctaatgctaaatgacgagttaatgggtgcagcacaccagcatggcacatgtatacatatgtaaccaacctgcacattgtgcacatgtaccctaaaacttaaagtataataataataaaataaaaaaaaaa

SEQ ID NO: 1713 - DNA, 312 bp, Homo sapiens
ccatgatgtttgggacaacttgcctctgcaaccaattaggcagctgcagctcatcacgagagagttacagccacctggcccctgcaagagaggggactggagtggagaaaggaggctgcgccatgtcatagagcagccgttggtcacagacaccttgtgttagggacctggcactgccattcacaggctgcgtgaccttgagcaagtcgcttaacccctcccaacctgtgtcttcatctgtaaactggaggctgtcctccctgagctggctacctcaccagaatgtggtcataggcaaccatggctgtgaaa

SEQ ID NO: 1714 - DNA, 312 bp, Homo sapiens; identical to SEQ ID NO: 1713

SEQ ID NO: 1715 - DNA, 440 bp, Homo sapiens
gcttccacttaaagtcagcagctgcattattccctaccaagatagtcatccagtccttttaagttttaaagccaggctttaacttcacctctctagcaatgaaagtcctagatgacatctgcttccatttatataaggctgttttatctacactgaaaatctgttgtttagtatagctgccttcatcaaggattttagctagattttctgggtaacttgctgcagcttctacagcagcacttgctgcttcacattgctcttatgttatagagacatcttctttccttagacctcatgagccaacctcagctagctttcaacttttcttctgcagtttcctcaccttactcagcattcatagacttgaagaaagttacagccttggtctggatttggctttggctttaaggactgttgtgactggtttggtcttctatcca

SEQ ID NO: 1716 - DNA, 135 bp, Homo sapiens
gtgcatgcctgtaatcccagctactcgggaggctgaggcaggagaatcacttgaacccgggaggcagaggttgcggtgagccgagattgcgccattacattccagcctgggcaacaagagtgaaactccgtctca

SEQ ID NO: 1717 - DNA, 114 bp, Homo sapiens
gctgaggcaggagaatcacttgaacccgggaggcggaggttgcagtgagccaagatcgcgccattgcactccagcctgggtgacagagcgagaccccatctcaaaaaaaaaaaa

SEQ ID NO: 1718 - DNA, 546 bp, Homo sapiens
ggaggactcaggccccgctggccgcgggctcggtacccggtgggtcggtggagcgtctgttgggtccgggccgccggcttcgccctcgccatggcgccctggctgcagctcctgtcgctgctggggctgctcccgggcgcagtggccgcccccgcccagccccgagccgccagctttcaggcctgggggccgccgtccccgcagctgctggcgcccacccgcttcgcgctggagatgttcaaccgcggccgggctgcgggacgcgggccgtgctgggccttgtgcgcgaccgtccgccgggtgaggaacgcccgggggcgggggcgccaggcccgggtccaagggataggagctttgacctaacattgggatggggcctgcccgctggacgaaccgatctctggtgatggggaatgggcagcgccgcacgggcggggccttgggcgccgtcaagggccgactgtcccgcctcacctactcctctctccaggcgggccaggggtcgctgtactccctggaggccaccctggaggagccaccctgcaa

SEQ ID NO: 1719 - DNA, 88 bp, Homo sapiens
cggggtttcacctcgttggccagactggtctcgaactcctgagctcaggtgatctgcccgcctcggcctcccaaagtgctgggattac

SEQ ID NO: 1720 - DNA, 6892 bp, Homo sapiens
atgactttcattttatgtaagaattttgtgaacactttctctttcagcttaccaataaaactttaagcaatagcagtcagtctgagttagaaaatcgactccatcagctaacagagactctcatccagaaacagaccatgctggagagtctcagcacagaaaagaactccctggtctttcaactggagcgcctcgaacagcagatgaactccgcctctggaagtagtagtaatgggtcttcgattaatatgtctggaattgacaatggtgaaggtaatcaaaaaaggaatctcaaaagaacatttcattcaaacatgcttttgaaaagttatagaaggactatttttatttgaaagaaacttcatccagtgaaggactcaattttctgatatgagacctgggccacgtactgtttagtattgttagtgaaccggataatggactaattaatattcctcaccagtattagacttggggaaagtagtctgaggattgataattatattgtaatgtctgagacacttaacaagatgatgctgacaaggcgaggaattcagtagagaggagctttcaggacacttgaaacaagatttgctttaataatcttccagtaaatagttacgggtattagagctaatacatagttcacataaccatatctaaagaaatctatagattcccaacatatgtaattaaaaaataatgtgtaagatagtataagcatcaacagatcagatttttaatcttggaacttcgtaaagtctacaaattgtcattcagcaaatttctcagttctttggctttaaattatttcttttaataaaaaaaattgtttaagagacgctgggtgccaggtatggggatggcactgtaatttaaaaagggtgatcaggaagacctcgttgaaaagtgtcacttcttttttttttttaatgtataattatcattttatttgtaattgttaattacaagtaaaaatgaaattataaataagtaaatcatactccttaatggcataaataaaaagtgcctcgcttaaattaataaaattttcctgaccataacttctgtgatttttttaagggttttcagtttcttttaggtttcacctttttttttttattttatttttttattattattatactttaagttttagggtacatgtgcacaatgtgcaggttagttacatatgtatacatgtgccatgctggtgtgctgcacccattaactcgtcatttagcattaggtctatctcctaatactatccctcctcccccctcccccagccccacaacagtccccagagtgtgatgttccccttcctgtgtccatgtgttctcattgttcaattcccacctatgagtgagaacatacggtgaaaagtgtcacttctttaaagtcccaaaggaggtaagatagtgaacaatgaggaggcatagaaaaaaagtgttccaggcagaaagaagagcaggcacaaaggccttgaggcaggcatgttcctggcatatttcaggaacagcaaggaggccaaggcctctggagtagactgagtgaagaagacacttgtgtaagatgaatccagagagcttagaataggccgttgaggcctgtatggggacttttactctgaatgaggtaggaagccattgaaggatcttgagaggggggactgatctgacttgcaccttaataggctgcctctgactgccatgtcaagaatagactgcacagggctaaaagtggaagcagggagacagggcaagaggaggccggaggtgggtgggtagccattgcattaatccatgtgagagatggtagtctagaactgagtgggattgtgaaggtggactgagaatttattttaaaggtaagctgacagaatatgttggcagatgagatacggagtttgagagaaagaagtcaagagttttggcctgagcagatggaaggattggaattgtgatgtcctgagacagggaaatggcagctgaggcaggttgacagcgaggacaagaactctgaattgtagtgttaggcaggctttggggtgcccgttagatatctggatggaagcgaataggcagttggatgagtctggcaggggatgaagcctctgggctggagtacacatttgggagtcctctgcttcatagaaagaccacccggcctcactcctcctcacataggaacaaagggcccattaatattgactcttgtcaacgcttagtatttgtaaatttcttaatttttgctaaaatcattttcttatttaaaacttttttcttgttgtggatatggatgtttaaatatttatgtcatcaaatttacctgtcctttctttatagtttcatctactttggggtgatgcttagaaagttgcccttgaaaattccttccacatgtaatacagtgtatttccaattataattgtcttagttaatttttatgtcagtacactaatttattttcttatttaaacaggcactcgtctgcgaaatgttcctgttctttttaatgacacagaaactaatctggcaggaatgtacggaaaagttcgcaaagctgctagttcaattgatcagtttaggtaagcaatgccagtagggatgagtgatggaccatcagctgtttttacgtttttcagggtttcaatcacagtgactcccatcaggcagagtctatatttaaagtgacttactcctttcaagatattttatacttatatacacttttatttatttcacagttatattacactttcatgaagtgacttctttcatgatatttgaaatatcatgtcagaaattatgtcaagaggtctgccaatgcctacattttattgaagatgattaaccctgactgtatctcttttttctataataaattctatttttaaaaacttcattaaattttattgagaaagcctctacttcatgtaaaagtatccatttgaatgttttatcccagaattttatcatgctattagaataaaagatgctactatatatagctgaacagcactcattgtattatatattttatataaataacaaaatttatgtttatgtatatgtaaattttttatattagcagacatctgccttatcaaaaaaatattttaatagtttacatatagcattgataaggttcttgtctaaataacctactgtaccctttttctttgtagtgtttataatgaaaagttttaatgaattgtggcataataatctttttgtacctttttgtgtcagaattgagctattgtattaaaaataagaatgatataccaagatgactgaagcctcagaactaggatgccatagccattatgtccaaattaagcacatctagttcaactattcatttattcaacatacgtagttgttagagaacctaagtgcaagacattgtgctagtggcaatgaaagaagcagaaaggggtattgcttctgcatgtatctgtcttgatagggaaaaaaatgttgcagaggcataatagatctggacatcatattgcttccacactatttattcaaatgcatgagtttatagctttgtaccttttagaagcatgtatctatacaaaagcttctagattagctatttgcaggttaatgccaaccagactctttttttccccagtcacatagttgacacccacctaatctttcgtaacttctgtaattccactaaaaaaagatttaggccgggcacggtggctcacacctgtaatcccagcactttggggaggctgaggcaggcggatcacctgaggtcaggagtttgaaatcagcctggccaacatggcgaaaccccgtctctactaaaaatacaaaaaaattagccaggcgtggtggtagtggcgcacctgtaatcccagctactcgggaggctgaagctggagaattgcttgaacccaggaagcagaggttgccgtgggcagagatcgcgccattgcactccagcctgggcgacaggagagaaactccgtctcaaaaaaaaaaaaaattagggatcaagtttgcctcctacagttgtggctgtagaattaagagaaatacctgtgctgaagtttaacagccaagccccaaataatgataaaagcatttatttacctctatgacatttttatattattatttcaagtaatcatttaacagtctgctataaaaattgttcttctgtggtagccacataaatagtttaaatgagttaaatttatcagcatcattagatattaccacaggaagatttgttttgactgtgactcttctctctcctctccccctcacacctgtgtctgcacagtattcgcctgggaatttttctccgaagataccccatagcgcgagtttttgtaattatatatatggtaagtaaatttatttgaaaaaacaatgatgcacttgatttttaactagtttttttttttgtttgtttgtttgttttggctacagatcttattgatattttagcaatcaatcaatttttttttgttttttttgaaacagggtctggctcttttgctgaggctggagttcagtggtgcagtcttggctcactgcagcctctacctcccaggctcaagccatcctcccacctttgcctcccaagtagctgggactacaggcgtgcaccaccatgcccagctaatatttgtattttttgtagagacagggtttcaccatgttgcccaggatagtctcaaacttctgggctcgagtgatcctcccaccttggcctctcagagtgctgggatttcaggaatgcgccaacgcacccagccagcagacagtttggaaagagagaactcagttttagtaattaagatttcttttggtagagtataaattgacaattcattatgtctagaatataaattcctcaaaggcttttcctacaaataaaattaaacgcagtctaatagttacctccattttaaagcccttctaatgataaaaacaatttgaatacaaaacaattttttatcttgacgttgtaaagttgctttaattgttttcatgtgttttgctttattttctaaaagagcctcaagattgatttactttctcccagatttcttacctctagtaaaatggttacggtagtttgggatgccatttcgcatgtaccgtgtgcctaaaaaggctgctaactatttggagtgggtatgtctaaaagtagttgggttgaatgaaaatgggctgttttcttgaaaagaaatttctttaaaaagaaatttctctgtgatccactagagggaagagttattcctttaaatacaggttttgtgttgttttttttttctgagactgagtctcgctctgtcacccaggctggagtgcagtggcatgatcttggctcactgcattctccacctcccaggttcaagcgattctcctgcctcagcctgccgagtacctggggctacaggcgcacgccactgcacctagcgaatttttctgtgtttgggagatgggttttcactatgttggccaagctggtctcaaactcctgaccttgagtaatccgccctcttcggcctcccaaagtgctgggattacaggtgtgagccactgcacctggcataataacaagtttttaagaaggaaagcgtggggagtacaaaaaaaaattgaatggcatcagaaagcattcagaatatgccccagaggggttgatttcccaggtgttagtgatgatgagtaacacgggcactgtcatgagatggtgcccatgagatgtgatttctggcacacgacaaagtggtgaggcacttagtgatggaatctcgtatcatttcggtactaccatgagggaattaaatttgtcactatgaatcgtgttctgggccctacatcagcctctgaaacgacacattatttctgtctagaatattttcccatctcttcttcaccgaacattggttaaactctctttcagaataccaactataactgttctaaaagtgttttctaaccaacttcatgtgtatctagcagttttaatcactctgcattataatcaactgattattttgcatacacgtgcatattgtgaatgtgttgaagttcagagctgactcctctcaactgaattctgtaggagtagcaagtctttattaccttccattgcactgagctcatttagttgtttcattcattccttcatgtgtcccataggggatacagaggcaggtaagacacagtgcctgccctcagtgtacagtgggcctttggtaaaaattggtttattggctaatccacaaattgctttttctttctctaggctttgcttcacctctgggtcatgattgttctgttgacttacacaccagaaatgcaccacgaccaaccatatggcaaatgaaccaagcccagttgttgcagtgattggttgtctttttctagacttgggatctgcaagaaggccaattgcctaaaatttctgagaacagtgcacaagattattttatcactacaagcttttaactttttaagttattgtacaagtattctacctaaatcttccaatttcctttaaatggtaagagtttctaaaacagacaataatttaacaagctcagctctgctttatctgagtttagtggtcctaatatatatgtagagaaagatggtggggttgttcacctctgtacagaccatctgtatgttaggtgacattgattatgggttataatcagggaaactaattgtatttagtgacaaaaataaaaagtttttttttataattcagtctgcttttggattttcatatatttaactttgcaaaaagatttactttgtacatgttacaggcttgattggtgtaaatctttttataaatacataaataaaagaaaaatatgcatttttcttttctaaaataa

SEQ ID NO: 1721 - DNA, 527 bp, Homo sapiens
gtttttgcatctagaaaaatgtaagcttaattccagagaccattgtaggtgtaggaaaaatacattactgcccttgagtaagaggctgtaggctatccacataaagtggtaataccaccttattcttgtatcacctcctgtctctcctaggttatcttagagcattttgcaaattacagtcagccctctgtatccatgggtttcacatccgtggtttacaccaattgcagattgaaactatttggggaaagaaaaattgtgtcgtactgaacatgtataggctttttttttttcttgtctcagtattccctaaacaatacattacatagcatttacattgtattaggtactaaaataatctagagattatttaaagtatacgggaggatgcgcataggttatatgcaaatactacaccattttatatcaggccactttgtacatttgtggatttgcagattttgctatccccaggaggtcctggcctcaattccccatggataccgagggacaactatgtttcattt

SEQ ID NO: 1722 - DNA, 527 bp, Homo sapiens; identical to SEQ ID NO: 1721

SEQ ID NO: 1723 - DNA, 703 bp, Homo sapiens
cttctttgggggagaatagaagagggatctgaaccacccaaatggcaatagataggattcgttctaagttaccttgattgtatctggcaaacagctgaacttaacatcctgcagttcaggagagaggttcctttactcccaagccacctggatcagcatctgttttcccccagtgctagaggtggaacccaggcctctgctaggttgttttggacacactgttgtatctcagttaaggtggctgattcccaggtgtgtgatctgatccgtgctgcactttctactcaccaaggcctccaggctgccctgctcagcaaggtgggagtgcccccattgaccctcctccagtccatgaatctccacaccctcccctgcctgccactgagccagcttctcggttatccagtgaggagggcgaaggcgatgacaaagaagagtctgttgaaaaactggactgtcattattcaggtcatcatcctcagccagcatctgtaagttccacgtccacccccgcgttgaccctccccacacagcatggacagggcactgcaggggggcgcgccagggatcttggcatgcccgtatgtgtgggacgcggtcaaggtgtgagagaagttcaaaacagggtgccccagaggcagcacacactctgtacgggggacatctcgtgcttttttccctttctcttccatgacgctcaggg

SEQ ID NO: 1724 - DNA, 6761 bp, Homo sapiens
cccttctttgggggagaatagaagagggatctgaaccacccaaatggcaatagaaaggattcgttctaagttaccttgattgtatctggcaaacagctgaacttaacatcctgcagttcaggagagaggttcctttactcccaagccacctggatcagcatctgttttcccccagtgctagaggtggaacccaggcctctgctaggttgttttggacacactgttgtatctcagttaaggtggctgattcccaggtgtgtgatctgatccgtgctgcactttctactcaccaaggcctccaggctgccctgctcagcaaggtgggagtgcccccattgaccctcctccagtccatgaatctccacaccctcccctgcctgccactgagccagcttctcggttatccagtgaggagggcgaaggcgatgacaaagaagagtctgttgaaaaactggactgtcattattcaggtcatcatcctcagccagcatctgtaagttccacgtccacccccgcgttgaccctccccacacagcatggacagggcactgcaggggggcgcgccagggatcttggcatgcccgtatgtgtgggacgcggtcaaggtgtgagagaagttcaaaacagggtgccccagaggcagcacacactctgtacgggggacatctcgtgcttttttccctttctcttccatgacgctcagggctaggcattgtcactctcatgcttcacagcctccggtactcagaggcagttctgtctttcctgattagctcctttcctgaaggatctagaaccctgactgggcatgccagtgtgggagtcagcaagcacgcggctatgttttctcttgcagttttgcacatttgggagccggcagataggaagaggctattacgtgtttgactccaggtggaatcgacttcgctgcgccctcaacctcatggtggagaagcatctgaatgcacagctatggaagtgagtgcctgttgttcttgggagaggagctgactttacacagtgctgcattgtcttttatttcctgtgagactgatgttatgaagatatgcttatctaaacaaaactggcctttggccctgagaagaaggtgccttgtcattcattcattcatttacccctttaccccacaactacatattgttgtgggtgctggcattcaaagcagaaggactcccacatgtatggagctcacagtctagttgggattgggtaaggggagaaaaaaactagtctacagaagaataaggagatgatagcttgtcctaagtgacagaatggaaacaataacaatcagcaagacttagtgagagccaactatacaccaaacaacttaaatatacttaacattcacaattctctgtcaggtgaccatgattataccctccccccacccctggttttttttttgttttgtttttttaatagatgacaaaactgagatacagtgtcatgcagcaagttagtggtagggccaggaattgaacctagaggtaacatgttttcaagtaaagagctgaaaatacagaggccagagggattcagggaaagcctctctgaagaaagaggcagtccttgaactgagaaggatggatgagaaacagcagtcactgggacagtagggaggagtgggttctgggcagaaggaagcagctgtgtcaaggtcttgagtcagaaaagacagtttgttgaagaaatagcaagaaattgagcacagtacaaggatgaggtccaagaaaccagcaggggccaggtgacactgaaattgtttcagtgttgaaggttttaggtagaggagccatgtgctccagtttgcaatttaagacaccttgtgtgatattatgtacctaatgcttcccaaacaggattttaagtggaagaagagttccatggccaaaaaggtttaactcagcctttcctgtaaaaaaaaaaaaaggttctgttttttactgcagaacttgtcagagccttaatgggcactgtgctttgtaactcttgaagcagggaatgtcacgtcatgtataatgtggaacatgtcccaagctcttttcacctcggaaccttttttaggggaacatcttggagaactagtattcggtgggagtgactttggtgaatagtaagctttgctaaagtgactgtccagtaatccccaggccatcccagatcctctgtttgggcattatttactagtgcctccttaaatggactctgccagtacattcatttgactccctgccttggtttcctaataaagtcagacgctagtcggaggccttggattgtctgcaacccaaagaaccatctccatgatcattagcaggacttacatccgtttccttagaacaccagattcagagcactgttactctgcttttctttttcatatttctttctggttcttgctggataagaggttcttctttatgaaggaacattgtccctggctagacacagaatcaggggactgggtttgggggttctgcaggggtttttccacaccagaactccctaagatacatgaaatctcaacttcatatttcttcagactacccattgggagttggaaagcacactgagctcatgaaactatgggtttaatgtactcctaagagtttagaatggatttctgaatgttttatccacattatgttggtatgtggctcatgaccaacagtttgggcaaagatagtttcagttcctagtggcttgtatagtgagactttcctcttgatgtgaactttttaaaaagtaagatcataaggtcgactctgctgtctactctgttctgtctgaaggctgcctacttgcttccggggagaaggaaaccaaccctttccattagcatgaccattggtttttaaaaagtctacagcaacaagggacgtgttgctcagtaatgagctgacacataggcttggggcagaggggaacttggtgcatgttgcctcccaacataggagtgctggcggccttttcaggcagcccctgagattttctctggggagctcagcacttctcatccagagaactattctcacctggcatctttgaagccctcaaggaaactttcaaagtgatccaggtcccaccctaccggctcagcccaaaatccttccttacagggttattgtggtaaaattgaaggtaagtgaggtgggaattgagtatgaaatgagtaaacttcagtttgtggagtctcaggccagtggtgaaattagaccagcactttctctgcagcatggccataacctgaaaggccactgcccaccttctatgatttctgtgaactacttgtcctctgttgatttgggaccagtatcccatattccctaagaaggggctgggatggttttcaaagatttttgttggtgtattttttttttttttttttttttactttttgaaatggtaatacaatcactgggcttaaaaaaggaaaaccaaggctgaggcaggagaatggggtgaacccgggaggcagagcttgcagtgagccgagatcgcgccactgcactccagcctgggggtgacagagcgagactccgtctcaaaaaaaaaaaaagaaaaacgagtataaagaggcatacattgaaaaccgagtcctcctgtctcctacatgcttgttttccacctagcccccacagacatttttattattttttatgtatctctacatagtttatttatgcaaacacaagtcagtatgagtacatattgttactttgcctctttatacacaaaagagtaattaactacttaaaagagcttttctaagaggaacttgtgattgcctcccggagagatccacatccttccctgctctagaaggcttttcctttcctcgagatttggttccaggcagcctggtctttaggccctggcttcctgagccacctggtggtcatgagaagccactgctcccagtgagcagtagggcctggacttcatttagagcagggcttctgaatgctccagaatcacccaggggccttgttgccatgcagcttctgatgcatcattctagggtggggcccaggaactcagttttcctaaccaacctctcaggtaattaatgacactgcctgccaccctcctctatgagtagtgcggggagagagagcctagcctctcaatcttggctccacattagaatcccctggaaagatttagaaatgactgatgtctgtccccactccccgcagagacgctggtgtaatcgttatggatgtggcttaagctccacaggtgactgtaatgtgcaacagctggagttgagaagcactaacatcaggccagagctgtacccttgaatggggttttgggtttttttgtttgttttgttttgtttttgaaacagggcctcactcagtcaccgaggctggagtgcagtagtgtgatttcagctcactgtgacctccacctccccggttcaagcgattctcctgcctcagccttctaagtagctgggattacaggtgcacaccaccatgcccggctaatttttgtatttttagtagagatggggtttcaccatgttggccaggctggtctcaaactcctgacctcaagtgatccaccagcctcagcctcccaaagtgctgggattacagttgtgagccactgcgcctggccgaatgggatttttaaagcatttgcaaatacttgcagtcattaattcattttattaataacagtagtctttaaaagcatctggaaatcacctgggcagcagtctaggccagctctctcactggggtagtggccaggtcagccagggctaccccttaagtcaggatcaaggcaatcctggcacttgccttccagtcaggcctttttgtcttctgccacctcggtttaaattctgccaaagaagtttttgaaattttgttactgtcacatttaagattcagagctaaaataaaaggagaccctccctggtttgaatttagatggtttccgcatcccctaataaataccttgcccacacattcttaacagaatccattgttacaacaccatgctgaatatcccttgatactgtggggctttattcccttgttcaggccaatagttatgacctagcagttgctgttaattagctgcacccttccttttctctcattcattcctgacttctctcgacatttattcagtgccttctgtgtttcctgcactgtgctgaacactaggaccacaacggtaattaagctggggatgactctctctgcagaggatttggtgattagcaatccgacacttaaaggatgagcagaagctggggtattgggtcatggcattttctcagaatataaggaagtacagtggctggaagcagggaacgggggcgttgggggtgggaggtggagctagaggctggggcaatagcagcggggagttgcacacatacagttctgtaagaactgtaccaggaaggcattaaagaatttgaaggagagaggtgacaggattggctttgtagttcagagtgattgctttgatgtggatggtttctctttgtcacaagcaaagagggtggtgccatctgaaagtctctgtgaatggctgtggtcagtgtcattcactgtcctctaatttttttcaggaaaatcccaccagtgcccagtaccacctcacccatctccacacgtattcctcaccggacaaactctgtgccgacatcacaatgtggagtcagctatctggcagcagccaccgtctctacatccccagtcctgctctcatctacctgcatctccccaaatagcaaatcggtaccagctcatggaaccacactaaatgcacagcctgctgcttcaggggcgatggatcctgtgtgcagtatgcaatccagacaagtgtcctcttcatcctcatccccttccacgccctctggcctttcctcggttccttcctcccccatgtccaggaaacctcagaaattgaaatccagcaaatctttgaggcccaaggagtcttctggtaacagcactaactgtcaaaatgccagtagcagtaccagtggcggctcaggaaagaaacgcaaaaacagttccccactgttggttcactcttcctcctcctcttcctcctcctcctcttcttctcattccatggagtcttttaggaaaaactgtgtggctcactctgggcctccctacccctcaacggtaacatcttcccatagcatcggcctcaactgtgtgacgaataaagcaaatgcggtgaacgtccggcatgaccagtcagggaggggcccccccaccgggagccctgctgaatccatcaagaggatgagtgtgatggtgaacagcagtgattctactctttctcttgggccattcattcaccagtccaatgaactgcctgtcaactcccacggcagtttttcccactcacacactcctctagacaaactcataggaaagaaaagaaagtgctcacccagctcgagcagcatcaacaacagcagcagcaaacccacaaaggttgccaaagtgccagccgtgaacaatgtccacatgaaacacacaggcaccatcccaggggcacaaggactgatgaacagttccctccttcatcaggtaggaaatggactgtgagccccatgggaatgcccatttcttctcccttaagatcttttgtcagctcagaaatgtgtttggttgggttggttggttggtttgtaaacagatattcagcttcatggtgtcttcttaaaaaaaaaaaaaaaaaaaaaaaag

SEQ ID NO: 1725 - DNA, 206 bp, Homo sapiens
cagacacattccttaacccagcgcagggctgtccagggtagaagaaaacgatttgatgtgttattagccgagcacaaaaacaaaaccagggaaaaggaattgattcgccatccggactctcagcaaccaccgcagcctctcagggacccgcatcccgcccctcctagaacgtcacaggagccgcaccaaaaccctcacggagtgat

SEQ ID NO: 1726 - DNA, 8473 bp, Homo sapiens
gtccaaaagcaaaggaggcagtgcaagtggaagcaaccgttcttccagtggaggtgttcttagcgcatcctcatcaagttccaagttgttgaaatcacccaaagagaaactgcagctcagggggaacaccaggccaatgcatcccattcagcaaagtagagttccccatggtagaatgtgagtatggccaagagggtttttaaagcttacctgctggaaatgaaactgtgtacactagtggcatgtgagagtgcctgtgagtaatataaaagagagtctacttggggaagaattcaaatgtatgttgtattgtttcttgatgtttccctgtcatgtcataggaaacttttcagagtagtaatagcagtgataataaggttactaacatttattgatccattcttgtgtgctagctactgaaacctaactctatgtgtgtactatgtcacttatcacaacaaccctatggaataggtactgttactatcctcgttttccagatgaggagaaggaagcttcgtgaggtgggggagttttgtccaaaaaggcctcaagtcacataggcctggatttgtgtcccatttctgtcacttcttagctgtaggggtttgggcaaggcactgtttctgtctaagaataacagccactatgctgggttattgagaatattttagttaatatatgtctagcacctggcatagtgtctggccataggggacggttaacaaatggatactggcactcctgctactgctgctgtggataatagtaatgataaaaagatgcagagattcccagatgctgctgtagaatttttgggggtctacggagcaaatagggaagcagtgcttcctcccttcagccttaggttcacatcacagcagtgatgagggaagactgaaggaagttcacacctgccaggcatggctttggcaagtttccatggtcactcagtagattgacaggtttcttgaggtcacgtgagggagcagccacgcactccaataggaacatgcttcgccttgtcatggcatccctcagcctggtgacggatggcttttcttgggccagcctgcttttggagggtatagcacacatcgtaggtccaagatccggtaacctggttaatctcagggtagggtccagcacctgctgctgcataaggaccttgccagctgggagaggatgtgacatcttgcagtctctctactgctgtcaggctattccaggtacagttgtttggggctgtttgtcctggttgctaagcccccagcccctgttcttctgtcagaagtacagtacagcaagcttggtttttgttccgggagcagtctgaaagccacaaacggtgccagtgtagtgtgtaagtcactggccagcttaacagctgttagagcactgactccactgaacaaagtttatacaacctcattgattcaaatcttctttacttagagctaggcctttagataggaaccaggccagttgttagcttcctaccagtattttcagttttaccaagcaaaatgatagtgtcagtaagattccaagattcatatctttgttaatggcacaggtattccctaagctcctgtcatagaaacatttttcaaggactggagaattaccactttagtgacacaacatatatttattaaacactagtctcccttattgacagaagcaaagaacctcttcttggagatatgttatttagcatgtttgagttctcataagtctttagtgacatttattggaaatatttgctcactcagaagtttactttgttttgatgaatcctttcgtacaaatggcagtcctcaaaagatattctccaagggttctgcaaatagtctttgtttcttttagaccttctcatgttttgcttcttatagaaattgcattgcattgggtatcaggtctgagtttcccattgcctcatgtgtaaaattttttgaaatgatgaaagaccaggcaaatttgatggtccactgagggttttgcctcaccagaagggcttatagacttaatcagtatgaaccttactaacaaaactcataaggagccttccaagaggctggccctgtgcagcgcttgggtaggcccaggctctatcctcatccctctggctcaccattcacctgggggctgctgaggcactcaggcactggttttctcacttcctcctgtgacagcatgacaccctctgtgaaagtggaaaagattcatccgaaaatggatggcacactactgaaatctgcggtggggccaacctgtcctgctactgtgagttccttagtcaagcctggccttaactgcccctcaataccaaagccaaccttgccttcacctggacagattctgaatggcaaagggcttcctgcaccgcccactctggaaaagaaacctgaagacaattccaataataggaaatttttaaataagagattatcaggtaacttcaaattttctttcttcataatgcttctctatatattaaatgggcattcgtggggagcaaatcaactgcaatctagaattcctatttttaaaactggtcaacttcagctttaggaggaagttccttagttaatatgtttgttcttttcactcttgggttttaaagagcatgagtgtgtgtgtgtgtgtgtgtgtgtgtgtgtgtgtgtcatgtaaaagtagctttctagtggtgtatttctgaaggaagtaatacagacttaaacaatatcttttctaccatctgatggcagtagtcaccccctgtcttagtgatgttgctgctttgttgcagcactcacacgttgtatattttttattttattgataatgtggcttttattccagctataatttatctaactgttgatttcttctattttcttgcttaaaaaatacatggaggagagtttgtcaggccacatgtaatgcctgtgttcttttgacagaaagagagtttgatcctgacatccactgtggggttattgatctcgacaccaagaagccctgcacccggtctttgacatgcaaggtaggtggactcctgaaagtcaagtcgaccatcctgataaacatgggtgactgggatgtaccacactactcccacagtctctctaacccagagaagatgctctgtggattgttgtgaattgtgtaggtgaaggaataacttggttctgttgaagaaagcctcagattgacaaaatgtgaagtgcgttgttataaattataatcttgacagaggttttgtttctaatgagcagtgttgtatccacaggaatagtgttctctcccagtctgttatttttaaaaacttttaatatttccatataggctacccttgactgtgctttaaattatactggcttaaagcaagtgcagaaatttcccttgcgtgtgtatgaacatttaaaaaatgtgtcacccatggtcttaaattttaaagaaccactttttaaaaaatctgtgattttgaaatatccctgttttctagtttaaaaaaaaaatactgcaagccaggcatgcctgtaagtcccagctagtggggaggctgaggcagaaggattgcttgagcctaggagtttgagtccagcctggagaacattacgagacccatctcttttaagagaaaaaaaaaactagataaaatatattaataatttatatacaagctaagaaaatgtaatggtcttcctttttgctctggggtcttccttcttttaaaatgccagtatgctaataaggtatatttgctgaaaagtgtgggttattgatgtggggtggcttcaggtcatcagtgaacacctctacataaatgagcttgtatgttgatgtgcatttctctggagggtgtccccagctaccccccagataggttcaagaagcattcagagtcactgctttgaagtatgtaattttaaaaccttagagggaggaagtaaaaatgataaaagttagcattttcttctaaaaattaataaaattgttagtgttttactttaaattttattaaagtgtatttgaataaaggacttcaggccctgtcccatgccccagccagtggaggcatgttacagtcttctggagtgggaaatttttaagtggttcttactttaagcttctaatttaattttagtatatagattttgtcttacaacagtggttcagaacctttttggggaaaagggttggtcaagagtacctttaaatatctcatttttaaaaaaaaaaaaccacggtccatcttccgagaataaaatagtgcatacacatacacattctgaatttttctatcttggattaatggacacccccaccccaagcccatccttggatttctaggttaaaaactctcataaaacaaactgctttttttttgtatagggtactaattggacacacagtggtgtagtggtggtggtgtatgaagatagccacctgagttctgtagaattatgtcagtttcagctgtccctaagagaatgtgtgaaagcatgcctcagccctgtccacatcatgatcacaacttgccattctccttctgcgctcttcctgcctacctgactctcagtaacatggatttctcagtaatacagtacctgtgggcaatgaggtttgcttttttcaaacccaagatgttctttttcagtcatttacaaagcgtggcagggaaccacacctttaagtgtgcaagacagtattgttgactgtgaaagaatattatacagcagatgtctagaacttgttcatcttgctataactgaaactttatgctcattgattagtaactccttatttcgctctcccttcagccgctggcagccaccactctagttgttgattctgtgagtttgattatagatctcatataagtggaatcatgcggtgtttagtcattatgtgactgggttatttatcttagtataatgtcttcaagcttacctcatacttgttgtagcatattgcagaatttccttctttttaagggctgaatagtattccagtgtatgtatatactatgttgtcttcatccagtcacctgttgacagacatttatattgtttctacatcttgtctattataaataatacttcagtgaacataggagttctaatagctctttgagattctgatttcagttattttggataactacccagaagtgaggttgccaaaagttttttttcaactcaaaatcttcaaggagcttgactggcattcttcctgtgcctttattgctaggtggagtgactttgaatgggtctgcatttttctcacatcttccttttcaaatgatatatgctccccttgtcgtccttctttaagggtgtcattactctccgtggcattgggctaagcctgtcattgcattaataagtcttgagacccagcttgtcatgagatcagcatagaactggcagaaaatgcagcatccaccaggcctgcccttttacaggatgacttgactttttttcattgttttgtcagttcttttccttttccttgccttcacgttggtctgaatctattaagcttggtagggctaaacatgcctgcatgtccctaccctgagtgtttcccaagttgctgccaggtctcttctgtcttagacttagaacgttatctgttctcttcaccgtcaggggatttgctgctgttcattcccattactcattctctgttgtctgtctcccatcctcactgcccctcctcacttcttcatctgtctaatatcccgtcgaaagtcctctgtgccttccacgcggagagatttgtgactcctgtagcctttgtccattcactcattgtagaactttttattacgtacatctgtgagcacaggcctcactctttctaggtcgcagggaataaagggtttagcacaataaccacgtgttccctatgcttgtggtgcttacagtctaatgaaagagatggagagtattaatcaccaaaataactgtaaaattaccactgatgagttataaaaagatgagaggactacattatgaaagcctgcaaaaatgaagtttttccagggaaggctttcttgccataggaacattgggctgaaatcaatgtgatgatttatctgggcttgagagggatgggagaggtaggagaggtggaggaaacaatatgtgtgaaggctctgtgacaggggcagagcaaattccttagaaccttaaagccagccaggtggctgaacagaaagagggaagaagaggtacgcgggaccaaaggagcagggagcagtaagcaagggtcttagagtgtgcagggttccggagcctagttatgcagtcagtctttatcctgtgagccttgggcaacccctatcggatttctgtttggaatgttcttcacagctcagtggaaaccctacttaggcttcaaactgagctgggaaaatgtatctgcctgctttcttcatttggctgtactgtgctaggcaccgggaacattcaagctgaggagaggtttatacatctgcttggagagacaggcaggtggaccagtaatattatatgttcattcgttctttcaacacacgttggagggccattatttttataaactttttgtttgaagcatttgagcgtcaggtactcttctagatgctggtacaacacaaacaaaacaaagttcctggtctttaggttactttcttagggatattttccatattaaagaaaatcaagtaaaaatgtaaaaagctaaacacatttgtctgtgccaggttagattatttaggtagacatagtttgcagtgtgtctcgtaaggaggtgggttgtgttattcaaccgaaaatggtagttagaagcataattccctttttaagtccctaaagttgtaccaactatgccaatacatttgtattatgtgtaggggcatgcacacacacatttacaatattttgtaatataaaagaaggaaacgtgggtgaattcatttatgtttatggatatgtgattaggggccactgtagctcatgtaaactcatccactcctcaggattagcatctccttgcatttttacagactgagatctcagcagtatggaatggtcaggtttaacttgagtgattggactcaactgccaataagatttgcccaactctgaccagttcacacttgtacattcaactttatcttctgttagcaatagtattaggcttatttgttttgttttgttttaatgccagtaactatgaaatgcgtttggactacagacacattttcttatacgatttgcttcaaccacaggtgtgtgtattggttgccttaagacaaacactgccataatttgacttttctttttcctctgtgtatccatttcttaattctgaaattagacattgtctgaagacccaggggtgttgtccatcccatttccttaatttccatagccagtgtctatctatagggattactttgtctcccttcctgttcatagcatttcttctcagcctcatcttctgtccagtgctccttggctgtggcagtctgtctgcagaatgctttgggccactttctatttttgcatggcattttcattggaatagagggacgcaattgtgtttaatttttattctgtggaagttactaaaagaacactttctgatacatgttttatggaatgattgtttcttccctttacattaacattcaaaattttaaatggtccaaagagggtttttctaatggagtcaataagagcccccaaaaccaaattgctgttgtgtcacaaaacatgagtacttgttatatagcgctaatggttgctcttagttacataccaggtgtcaccgctcacatatcttttttcttctgatggaaataacatttccagattcttctgcatttagagcctagaacgtatgcttctagtctagctagggagaaaataatgggctcttaaggtttttagcttatcaaatgctgagtagcctttcactatgcttatggtctagattgcttatttattgggagtggtgttttgggatataaggcagaccaaaaattattaatgagattcctcagtttctgtatttttttggtccacagacacattccttaacccagcgcagggctgtccagggtagaagaaaacgatttgatgtgttattagccgagcacaaaaacaaaaccagggaaaaggaattgattcgccatccggactctcagcaaccaccgcagcctctcagggacccgcatcccgcccctcctagaacgtcacaggagccgcaccaaaaccctcacggagtgattccttccgaatcaaagccttttgtagctagtaaacctaaacctcacacccccagtcttccaaggtaagccaggccctccaactctttctcccaccttcagagatgagacttgcagatactgtaaaatttcagtatggtcatgctgttgagaaacatatctcaggctcactgtggagatagttttttaaggagttttactatg

SEQ ID NO: 1727 - DNA, 262 bp, Homo sapiens
aaataaacctttcagttgagcagtaacaagagagcaatctattaataaattgcttattataaattataagtgaatgctggctaaaaaaatcatgtagactaagttttcagtttgaatcttttattgctgtgataaaaatagatatgtttcaaagcatgtaagtgctttcacaaatagaatcagatttcaaattcaggagtatgtttctttttttcatcattataaattaagctccatcctctcatttccctcagtcttcttc

SEQ ID NO: 1728 - DNA, 262 bp, Homo sapiens; identical to SEQ ID NO: 1727

SEQ ID NO: 1729 - DNA, 718 bp, Homo sapiens
ttagaactgattttctaattcctgtttttaatttagtgtggactaatttcagagtctgaattagagatattaccgtcatagacagtgaataagaaacaagacattcgtgacttttaatgtattatgttgactcaatttgggccaaatactttgaagtaaatattaatttaatataagccttattgttatgaaatgttaagtaaaaaattattgttcatattatgctatattttctaagttaatatttgtcagtctgtaaaaattagtaaagaagataatatcttaaaaatattttaacattagctgcattccaattgttaatgttcttaaatatgttggaattaattgcatattacataattggggttttcaaagcgctatgttttgcttaaattttcattaatagtgtggaaaggagaatgtaactgtatagtgactctggctgagttctcaaaagaaggaagagaagatttgttatacaaattgaattaataatagtatacatataaactattttaatttagtaaaacctaaactggtctttaacaagaagtgacaggataggtgaaaatgtattttggggaaaagtattttgagttttgctgaattaatatggttggtaaatctctctctgtgtaggatcactgtttaatgaaataatgcatattttttttctgccacccaaataaagatttttatctgtgttgaatttagtgca

SEQ ID NO: 1730 - DNA, 273 bp, Homo sapiens
ggatttcaggatcaggaataagtgtcttcagccttctaacaggccatgccttatgcctaggctgtcatacacattctaacatttaatttcatttaattcactatgttaatatttatttgctatacaagacaaggattctaaacttacgatttttaagtacgtcaagggatagcctgacgttaaaatctttttaaaaaattggtttgtggtgtacaattttatgcatgttcacttctttttttttttttatttgagacagagtctcagtctgtc

SEQ ID NO: 1731 - DNA, 273 bp, Homo sapiens; identical to SEQ ID NO: 1730

SEQ ID NO: 1732 - DNA, 718 bp, Homo sapiens; identical to SEQ ID NO: 1729

SEQ ID NO: 1733 - DNA, 21606 bp, Homo sapiens
aaggcttgcgagcagaatgccttcgcgatggacgcccgcattccacccccttgaccgctgggacccctagtggcgggtgggtggagcgcgctccatttacctgctggttacctcgtgaggcgcctcaggtctgtgtgtcttgtaaaggccgatctcggaatttaactctgaaccttactcagaaacaaagcagggagagctcttacgatgtgattttattttatttattcatgtatttacttttgagtcggagccttgctctgccgcccaggttggagtgcagtggcgtggtcttggctcactgcagcctcctcccgggttcaaggaattttcctgcctcagcctcccgagtagctggaaccacaggcccgcgccaccacgcccggctaatttttatatttttggtagagacgaggtttcgccatattggccaggctggtctcgaactcctgacctcaagtgatccgcctgcttcgtcctcctaaagtgctgggattacaggcgtgagccaccgcgccgggccttttacaatgtgattttgaagctgacactggcagtgggtcctcaaagtgcagactcactgggtatggtgcttcccccaactcccagggccccactccaaacccatggattcagagcattgcaggagaagaggataaaacgagcaattaattccctttccatatgtcaggttttcctcttgccttgaaaagtcacagaaaaatgctttagacatctgaatctcaggaaacaaacaatggaagataaacatccgcatttactgggcctgaaatgggaaaatgaaagatgtggcaagaaactgacaagggcccaagaagggcgatgggtatcggaattcttttcatcccggaatgaaatgctgcttgctttgtgtacccaagctctttttttatttttatttttttgagacggagtctcgctctgttgcccaggctggagtgcagtggcgcgatctcgggtcactggaagctccgccacccggattcacgccattctcccgcctccactccattcgcccgcattaggctcctgagtacctgtgactacaggcgcctgccaccatgcccggctaattttttttttattttcggtagagacggggttttaccgtgttagccaggatggtctcaatctcctgacctcgtgatcagcctgcctctgcctcccaaagtgctgggattacaggcgtgagccaccgcgcctggcctcccccaagctcttaatgttgcttcctgagttcttggtaactggggaaatctccctatttttttatttttatttttttttgagacggagtcttgctctgtcgcccaggctggagtgcagtggcgcaatctcggctcactgcaagccccacctcccgggttcaacgccattatcctgcgagcctcagcctgccgagtagctgggactacaggcacccgccaccgcgcctggctaattttttgtattttttttagtagagacggggtttcactgtgttcgccaggatggtctcgatctccttaccttgtgattcgcccgccttggcctcccagagtgctgggattacaggcgtgagccactgcgcctagctatttttattttttctgatagggagactcgctctggcccaggctggagggcagtggcgggatctccgctcattgcaagctccgcctcctgggttcacgccattctcccgcctccactccattctcccatcttaggctccagagtagctgggccaccatgcccggctaattttttgtatttttagttgagaccgggtttcactgtgttagccaggatggtcttgatctcgtgacctcgtgatctgcctgccttggcctcccaaagtgctgggattacaggcgtgagccacagcaccctgcccttttttttgagaaataagtctcactgtgtcacccaggctggagtagagtgacacaattttgggtaactgcagcttccacctcccaggttcaagtgattctcctgcctcagcctcccgagtagctgggactacaggcgcccaccactacgcccggctaatttttttgtgtttttagttgagacggggtttcactgtgttagccaggatggtcttgatctcatgaccttgtgatctgcctgccttggcctcccaaagggttgggattacaggcgtgagccacagcacctttttttttctgttttgagagaaagtctcgctgtgtcacccagactggagtgcagtggcacaattttgggtaactgcagcctccgtctcctgggtacaagtgattctcctgcctcagcctcccgagtagctgggattataggcgtgcgccaccacacctggctaacttttgtatttttagtagcgacagggttttgccatgttggccaggctggtcttgaactcctgacctaaagtatctgcccaccagcctcccaaagtgctggaattatagtcatgagccaccgtgcccggccaaaaatctccagtttacccttcctttgtgaaatctgttgagtacccaaatgcagccactcatgtcaaaccctaacaaaatcgaccccagagcccacgaggagggggtggcctcgcacttgcgcttgataggagctgccacaaaggcctttcccaaccagaactttgggtccagccacttctgtgaagagcctctttgctagcaatagccagccccaccggtgaacaaagtagcatgaacaccagaggtccacaaggaagaaaacaaagcagtccatatttaacatttattttactttgctgagcaagaatcatagacagctactaccacggctgcttcgtttggacaaaaataaccaggaggcatccacgggattagttacacggtatcaacttaccaccacagcagaatcaacagtgactcgctaattaacagaaccgtttgctagaaagcactaatctagttatataaatactgaaataggtcacatgcaaaacactataaacgttttgtgtgatgtacttttagttctccatagttttgtttggtataaaggaaatataatttggctgtgacgtagactgttgatgtaattttcaagttttcctgtatggggaaagttgccctgactgtggcccttttcaaggtggagcctccaacaccacgttggcagattcagactccgtgaacagtctaaatgagcaagtcagctgaatgccactttcagatggaagggaaatgagatggaaaacaacaaaaaaggactgccaggcggaacagtttccaaccgagttttcgttgagtgaggatccagcagccatcaaactcaaacataggggcccgcagggaaactggaggaaatacttcagagacagcaaagctgaaggtttctgtgctctgagggatccgagagtggatgtcccactcctgtatcctcagccagacacagaactagccagattcattagggaagctcagatgctctcattctataaagtaaggcccccagcagggcacgtacatacattgggaaagaagaaaccccttagtaccatgttggtcaaaggcaagagagagaattctatttccatctggaatgtcattcttgtttacttcttccaacagtgaaatacttccaggccttcgaaaggccatcctttggacacatgtaaaaagctgtcttgttggcccgttattcccactgacccgtctgagtgatcacccaggagcgcggcggcagcaagcagagctcaccggatttgggacaaggattttaaaggcagctacaaagctgagctctatttgctgatgatagtctctgttcagctgtttaaaatgactgtctgactcaccatggtaatttttcacaaattaaaaacacattttgggttgtgcaacagtgttctcatctttccaggcaggcagattattttaatgctgttatacagggaattgggactctcggattttcttttttaacctttttatgcctttcagtaggggaagtttccttgaaagttagagagctgcaaatctctaagtatcaatgtaaagaagccgatgacccaattcggaaggtggttcaagtgttctgtttgtttacaaaggcacagaccacgaccatggacacacccagtggaagtaaccacacccggtgtgttcctagaagctcatctgtgacagttcaacaagaacttactattctagaaaagtattacacaaagttatttaaaaaaatgtctgtacaatcgttaacacggccaagccaggccttgggttttgcctcttggtgtccagctgtgctgggaatgccatgaagaccagcggctggaaactgacttgggcatggagaagagactgagggagagggaggggacagcacgactgagcaagggcacagtgctggctgcctcatgggctccaggctccttctgccaggatgaggaagaggccccagagcagcgttacacaggaaatcaacctatttgctaatcctttggaaaaacgtttgtttctggtccacaaacagaaaatccaaacaggatggcagctccttgtgagggtggaggggagggcaccagattctgtgcggctggaaattccaaggtgctcagaaccaggcgcctgcacctctccttatgccagaccacaatcttcaaagaggccggcagccatattctcgatggggaggtggacaaggccaccctgggagttgctttcaatctgtcctcacaaatcaacaactccccgccacctccagagcattttctaatagtgtttgtttttgagacggaatcttgccctgttgcccaggctggagtgcaatggcacgatcttggctcactgcaacctccgcctctggggttcaaacaattctcctgcctcagcctcctgagtagctgagattacaggcacccaccatcacacccagctaatttttgtatttttggtagagacagggtttcatcatgttggccaggctggtctcgaactcctggccttgtgatccgccatctgcagcctcccaaagtgctgggattagaggcctgagctaccgcagccggtcttctattagtttttgaggaaagcagaaaaaaagaaatggaaacccagggaaagtcacgtgacaaaacatcttcgcagcgcagtgagcacacacctggcctgtcctccacacacaggtcagcggttttatagaagcggctgaagcaggtgtagtagcccacgcctatattctcgacactacaggaggctgagtgggaaggattgcttgagccgaggagttcaagaccagcctgggcaacaaagcgagagcccagctcaacaaaaaaatagccaggcatggtggcacgtgcctgtggttccagccacatgggaggctgaggtggatcacttgagcccaggaagtcgaggctgcagtgagccaagatcatgccactgtactccagcctgggtgacagacagagcaagactgtctcaaaaaaataaaaaggttacttgtgggttaaaaagcctcacttcggtccatcatcatggcagacttttttgagtaggtagaagttaatgagtcagaattattgctctgtttctgaacgattttatcttcaggaggggctatttttgtatttcccaggtgagaagccaaatggaaaaccagtgaagtgaccatgggtgccaaaggcctaaagagcaggcagggaaatgagactcgggaccactggagccccatgctgcctctgacaagccctggagctctgggtctcaaaggctggctggcaacaggctgcaccgggcatgggaatccgccggctgcgagattgggggtaaagagctcagacatggtcagaagcctctgcctaacacacggctccagtagccactcctcaggcctcctgcgccctcgggggtgcgtgacacaggaggatgagttgagctggctggtggccccagtgtgccgtactactgtcccttggggagagtgggacagggtgggcgcctgacacacaccacgcgccccagaaacattcagtgtggacgtttcctttttcagcaaggacggcgcccaggtaaacgccacgtaacccaaaccatcaacactgcagcgtcctgcccaaggctcacgtggggaaccggacaggtgctagatgatgataggaacggtgggctctgagggaggacagacaggctcaccccacggggacctcagaacagcctgcctcatactcagagtccaaaaaagaaaaggaacgtacacatctcctcccaagttaaacacgagaggtttgtcctcaacctcagggctggaaaccaccacaggtaggaggctgggcacgggggctcggcctgtcatcccagcactgtgggaggtcgggtgctagaatcccagcactgtgggaggccaggcacgggggctcacgcctgtaatcccagcactatgggaagctgggcgtgggggctcagcctgtaatcccagcactgtaggaggccgggcgccgtggcgcatgcctgtaatcccagcactgtggatggccgaggcaggcggatcacgaggttaggagttcgagaccatcctggctaacacggtgaaatcccatctctgttaaaaatacaaataactagctgggtgtggtggcgggtgcctgtaatcccagctacttggaaggctgaggcaggacaatagcttgaacgcgggaggaggaggctgcagtgagctgagatctcaccactcactgcactccagtttgggtgacagagcgagactctgtctcaaaaaaaaaaaaaaaaacaagaacatctcccacacactcacagtgcctttgtagccccagggaaagcaatcccttaagatcatttgttgggtgaaaagggtaccaagtacacagtgttaggaccgtgcaaaaaaagggtgacaggaagtaccctttgcaaactttccataatgtgtacttaattcactgctcttataaaatgaaattaaataaaacaaaaaaatactactgaaaaataattgggcaacatgcggtggctcacgcctgtaatcccagcactttgggaggccaaggcagacggatcacctgaggtcgggagttcgagaccagcctggccaagatgatgaaaccctgtctccactaaaaatacaaaaattagctgggcatggtggcaggcacctgtaatcccagcttctcgggagactgaggcaggaaaatgtcttgaacctgggaggtggggttgcagtgagccgagatcgcgccactgcactccagcctgggcaacagcgtgagactctggctccaaaaaaaaaaaaaaaaaaaggaaaaataattgggctgagtgtggtggctcataattgcagtcctagcgctttgggaggccaaggtgggtggatcacttgaggccaggagttcaagatcagcctggacaacacagcaaaatcccatctctcaaaaaaagtaaaataaaataaaataacaaaaaacaaaaattagcccagcgtggtggtggacacctgtagtcccagctactcaggaggctgaggcgagaggatcacttgagcagggaggcggaggttgcagtgagctgagatggcaccaccacactccagcctgggtcacagagcaagactctgtctcaaaaaaaaaaaaaaagttttttttttttgaaccactgctaacaatcactaatgttcactaaaacactaggcttcaggagcatttggaaataattcctgaccgcacaaagaaacatgctggtgagagacagtgaccaagcccaggagaccaccatgagttccagaaaaagtgagagagagcggccacttttcctgtctcggagatacctcctactcaggacgcaggaagcatggggcagggcagcgccatggacaaggcgactcggtgcagggcctgcgggacctgcaggtgagaggaagcacaagctccagctcctcagctgtggaacgctgcgtgcgtggtgcacagctaccagctcggatgggtatttgagaatttaccgcactgacttggaccagacggaaagcagagaagagggagagctacacctgactgtccaccattcccgccagccccaacgtcggcttttcacttcatgtttggggacaattacacctcctcatgacagatcagaagtttcagaaaaaaggtccgctgatttccgcaacagggtatgaggtggccagctgctgatgccagctgcatggactcctatacttgctggtaacataacctcattcctttgtatttgccaccaaaaagtctccagtctttttttttttttttttttttttgagacggagtctcactctgtagcccaagctggagtgcagtggcacaatctcggctcactgcaacacccgcctcccgggctgaagtgattctgatgcctcagcctcccacgcagctgggactacaggtgcatttcaccaggcctggctaattttttgtgttttagtaaagacagggttgcccatgttgcccagggtggtctcgaacccctgagatcaggcaatctgcctgccttgacctccagtccacctggctagtctccagtctttaaattgcacctttggccgggtgcagtggcttgcacctgtcatcccagcactgtgggaggccgaggcgggcggatcgcctgaggtcaggagtttgagaccagcctggccaacatggtgaaaccccgtctccactaaaaatacaaaaattagccgggcatggtggcacgcgcctgtaatcccagctacttgggaggctgaggcaggagaatcacttcaacccgggaggcggaggttgcagtgagccgagatcaaaccaaagaaatccagctctgggtgacagagcaagactctgtttcgggaaaaataaaatacataggcagggcgcggtggctcacgcctgtaatcccagcactttgggaggctgaggcgggcagatcacaaggtcaggagatcgagaccatcctggctaacacggtgaaacccagtctctactaaaaatacaaaaaaaaattagccgggcgtggtggcggacgcctgtagtcccagctactcgggaggcagaggcaggagaatggcgtgaacccaggagacggagcttgcagtgagctgagatggcgctactgcactccagcctgggcgacagagcaagactccatctcaaaaaataaaataaaatacataaacaaataaattgcagcttcattcaatctgcccagttacagaagtggaaagaagctgaaggatcctccccgtttctagagctgcaccgcatggcacaggaagcagtggccacaggtgtctgttcaagttcaaactgacagcaatcagcttgaattccgaatctggttcttgttatattctccacatttcaagggctcagaagccgtatgtggccagtggctcctgcactggacagcccagaagagaccattccattcctgcagacaaaactagtcgcagcaccctgctattctagacagaaagcactcaatttcaaaaaccttcaaactcagagacttctagtggagatttccctaaatacctatttcacacagtttacggtttattttacagtttctcatttgtttttttgttttatttattttttttgagaaggactctcgctcccatcccccaggctggagtgcagtggtgagatctcgactcactgtaacctctggctcctgggttcaagtgattctcctgcctcagcctcccgagtagctgggattacaggtgcccagcatcacacccggctaatttttgtatttttagtagagatggggtttcaccatgttggccaagctggtcttgaactactgacctcaagtgatccacttgccttgtcctctcaagtgctgggattacaggcatgagccactgggcccggcctatcgtttgcatttcaaacagcatgggtataaaatagcctagtaattacactgcatagccacagtcatccccgtggaagagaatcacatgtgtcccttataaaaatacctagatttctggtctcctttgtaaacaacctggacacactcaactcttgggaagttcctctgctcacctgaaagtcaccggggagattttccccatgagggcgtacgccgtgacgctctgaaggtggaacaggactccgtctgtcagaagcagcagcaccacgtcctggttgtagctgaagctcttcccgctcctcccgatcactgggacgtcctatgtggcaaacaaaagggtactctattggtttccattttccatttactaatcatccaccacgaacacccagcgccactcctgcccagaaactgggtaaagctgctgccactgaggacagccctgaaaatgcctcgaggggacagctgaactgtgcactcatccattttctgttttttgtttgtttttattattttttgcactaattaattttcaccatgcagatgcaaatggacaacaagcacatgaaaaaggctgaacatcaccatcatcaggaaaatgcaacagaaaccccaatgcggggccgggcgtggccagtctggccaacacggtaaaacctcgtctctactaaaaacataaaaactaaccaggcatggtggtgggcgcctgtaatcccagctactcaggaggctgaggcaggacaatcacttgaacccggaggcggaggttgcagtcagctgagatggcaccactgtaccccagcctgggcgacaagacagagacttctctgggctgccagaggctccggaagccgggtgcctcaggccgtggcagttccgtcactctccaacgcctcccccacagacttctttttgctaaatggtatcaagattttctcgttgttgtcagcaagagagttggttttctaacatctcatcgaccatggctggaggtcaaatcgatgttttaaacttgctggaaataaacggttcctttcttgcatggctcgatgagcaataaggttcctctgtgtcattttgtttacgatttttaggattgctttttaaagccggacacggcggctgatggctgtaatcccagcactttaggaggccgaggcaggaggatcacttgagataaggagttcaggaccagcatgggcaacacagcgagaccccatctctatagaaaacacaaaaatgaggctgggggtgctcatacacgcactgagggttgaccctggtgttcttgccttcttagattcttctggagctggagatgaactcggacctcaaggcccagctcagggaactgattattacagcagcgagggaaactgaagttggtggtggtgagaaagttatcatgggcaggtacagcagctcacgcctggaatcccagcactgtggggagctgaggcgggaagatcacgaggtcaggagctcaagaccagcgtggccaacatggtgaaaccccgtctctactaaaaatacaaaaattagctgggtgtggtggcacgtgcctgtaatcccagctactcagggggccgaagcaggagaatcgcttgaacccgggaggcagaggctgcagtgagccaagattgcgccactgcactccagcctgggcaacaaagcgagactccatctcaaaaaaaaagagggccggctgtggtggctaacacctgtaatcccagcactttgggaggctgaggcgggcggatcaacgaggtcaggagatcgagaccatcctggctaacacaatgaaacccagtctctactaaaaatacaaaaaattagccggatgtggtggtgggcgcctgtagtcccaactactcaggaggctgaagcaggagaatggcgagaacccgggagatggagcttgcagtgagccgagatcgcaccactgcactccagcccgggcgagagagcaagactccgtctcaaaaaaagaaaaaaagaaaaaggccaggcgcaatggctcacgtctgtaatcccagcacttagggaggccaaggcgggcagatcacttgaggtcaggagttcgagagcagcctggccaacagggtgaaaccctgtctctactaaaatacaacagaattagctgggtgtggtggcagacagctgtagtgccagctacttgggagtctgaggcaggagaatcgtttgcacctgggaggcagaggttgcagtgagccaatactgagccactgaactccagcctgggcgacaaggcgacactctgtctcaaaaaaaaaaaaaaaaaagaaagaaagaaagaaaaaaaaaaaaaaggaagttatcataatctttgttcttcttctgccactgaaataattccagaacatccaagtctggctagtacgtgaattggagaaaaagttcactggtaagtatgtcgtctattgcttagaggaaaattctgcctaaaccaactcaaaaaaggtgtacaaaaaataagcaaaagcgtcccaggatccacgctccgacagctgcgcacgtcgcaatcctcgaggactcggtcttcccaggtgaaattgtgggcaggagaatccgcgtgaaatggacacagcagctcacaagggttcattcggacaaagcccagcagaacaacgtggaacgcaaggtccaaactttttctggtatcgataagaagctcacagccaaggctgttaattctgaatccccagagttcccagtttcaattgttaagaaaaatgactaacgtatactcacagtgaaaaaacaaaaagacacacaaaatacaaaaattagctgggcatggtggcacatgcctgaggtcccagctacccaacaggctgaggtgggaggattgcctaagcctgggaggccgaggttgcagtgagtcgtgacctcgccactgcactgcagcctgggcgacagagcaagaccctgtctcaaaaacataaaaaaaacaaaagaaaaaaaacaaaaaaaaaccagagttgacttttaggctttgattttgttataatcacctaaacgtgtgtgcgggtctcaagtgcatgtggggcaagcccaaccccatcctggaccctcggcctcctcccgtccccaaaggcagacagacacttccctcggccttaagatcttgtcgtttcttaaataagcgaacacgtgtgcacccccacactccgttcaagatgccgcgctctgtgggcgcctctgctcctcgctggttttcatgcagccacactgggtacgcgacatggggctgacatgtcactggaaatcgcctgtgagtcattaagaggtgggagaggcaggagcctgggttgcagctgaggtcaggggctggggcccaggacaggcctgtggtggcgggtgctggggaggctgtggggtgctggcacaggagggcccacggaccaggggccacggccgcctgtatggtgctggccgaaggcggcccccgcccgtcctcttcggatcagtgattggcacctgcagtaatcttgcttgccaggaatctgcccagcccccacctgtctccccacccagttagggccacgagacacaaccctgccctgacctccgcatgccagtgtgagaacacctggcagacgccaggctccaagacacccccgcacatgtgaccgtgagagaagtgaaggcactgccagtgtgggcaccactctgagtggtcctcgcggcagagccccatggcaggcagcagagacgggcaccacggatggaggcctgggatggtggggcgcaggcggaggggtggggcccagggggcctcacctgtgtactcccccagaatcatccgagacatgatcaccgtgaagatgggggcggagctcttcaccgtctcagcaaacgaaaccgccacatttttcaggctgaccaaacccaaaaccacagttgcaaacctaaaaatgagccaaaagcaccatcaccttagaacgagtctgtctgcctgcacccaccgggcaggctctccaaggggctcgctcgctcggttggcacgtcggcccctctccgcccacctcctcatcaccaacatggtgcctggacccgcttctgtgacgctttaggtcgagcccccaggaaacggcactgcgtccaatgggaagtgacttctgccaccccttgaaaacgtcccagagacaaggaggcaccctgtcctgagaccaccagcccggaaagaagctgactgaacacacgtggcagtgagagccacgaagccacattcatttggtgtcctgaaatctggacagccctggtgcttttataaagtctgcactgaaaactcaccagccagcagagtccccgctctagtaacgagagggactttacatttaaagaaaaagagacactcaaccaaaaccaggagattctttacctcatcagacccacaaacagcatcgtcataaggaagttgggtgggtaggaaagccgggccttgtgctgatataaacagcaaggaacgagggttttcacacacccgataaccgtggtggacagcatctgcaccgcacctgcgggagggagggggccgaagacaagagggagaatcacccctcccgtgcctgcagtgggctccacccccggtctcccatcctgacctgggctcccccggccctcccgggtggttgctggctgctccctgtggggtggcaggtggccggcttccaccctgcccgagccgccgcctacctagcatgctgggctcgcctcccagcagggacaggatgtacttgttgaggaagagcgtgcagaagctgaagaagaaccacagcgtgaggtagagcagcgcccgcgagctccacacacccaagtctgactcgatgaccgtggtctccgtgatggtgacggtcagtacgttctcatctgtgccgccgtcgctcttggcaaaaacaatcttctcacttcggtgaccaaacagagagccccagctgagaggcgacctgcctttcggcttctcttcggagccaggaaccagctcttccagtgctggggttttcaccgaggacgacatgctgaagccacagccacgaacgattttacctccaggctgggcagcatgggtcaccgtgaccgcccgggggtggggccgcagcagggactccgggcgccaggaacgaggccaccagggcctctcccaggcaaagcgtagaagcagacgctaaaatattaagaaaaggaaacacatcacccgttttgaacatttaatgtcctcaaaggtttcaaccaccaatttaaaatcactttgaaaatgcaattgggccgggcacggtggctcacacctgtaatcccagcactttgggaggccgaggcaggtggatcaccttaggtcaggagttcgagaccaccctggccaacatgacgaaaccccgtctctactaaaaatataaaaactagcagggcatggtggccggcgcctgtaatcccagctactcgggaggctgaggcagaagaattgcttgaacccaggagacggaggttgcagtgagccgacatgataccactgcactccagcctcagtgacagagtgagactctgtctcaagaaaagaaaaaaagaaaatgcaatcgttcactgtccaaagatttttagcaattgaatcccgtttttctctgcgcgtgttggcggatccttgctcttgagagacggtctcctggcacacttgactgtcgtcctggcagacctggggctgtgggtccttcacgccctgcctggcagctgcaccttctcgatgggctttgtggctgccgctgccgggtgcccaggactaattccatgctactttctttttttttgagacgggagtctcgctgtgtcgcctagcctgaagtacagtggcgcgatctcggctcactgcaagctccgcctcgcgggttctcgccaatctcctgcctcaggctcctgagtagctgggactacaggtgcccgtcaccacgcccggctaattttttgtatttttagtagagacggggtttcacagtgctagccaggatgatctcgatctcctgacctcatgatccgacctccttggactcccaaagtgctgggattacaggcgtgagcctccgtgcctggtcttttatttttttgagacagagtctctgtcgcccaggctggagtgcaatggcgcaatctcagctcactgcaacctctacctcccgggttcaagtgattctcctgcctcagcctcctgagtagctgggattacaggcacccgccaccatgcccagtgaatttttgtatttttatttcattttttagatggagtttcactcttgttgcccaggctgcagtgcaatggcacgatcttggctcaccacaacctccgcctcccaggttcaagcgattctcctgcctcagcctcccaggtagtggggattacatgcacgtgccaccaaaccctgctgattttgtatttttagtagagacgggttttcgccatgttggccaggctggtctcgaactcctgacctcgtgatctgcccacctcggcttcccaaagtgctgggatttacaggcatcagccactgtgcccagcctcccttttcttttttttttttggctgactcatgggttagaattctggattgggcaaacacataaacattttgtacatgacgagagccagatttcatcatgtgagtgaagcgagatgcaaacacgaaaggaagtccttcaaggcagccttgtagtgaaaaaataaaaataaaaatgaaaaaaagaggctgggcacggtgactcacgcctgtgatcccagcacttcgggaggctgaggtgggcggatcacaaggtcaggacatcgagatcctcctggccaacacagtcaaaccccatttctactacaaaaaattagccgggcatgatggcgcgtgcctgtaatcccagctactcaggaggctgagccaggagaatcgcttgaacccaggaggcggaggctgcagtgagcagagatcgcgccattgcactccagcctgggcggcagagcgaaactctgtcccagaaaaaaataaagcttagaaacaagaggctatgtagtctcgagatagatccagccctatgaggcacatgtcaatcacagagggaaagctatgcacgcacaaagcatgtgtgaatcagagagaaagctatgcacgcacgatgagtagaagacaaacacgtcctgcaaggagacggaggcgcagggagggggtggcagccgtcctcccaagacatgaggacttctagttcagtctgagaccttggtgcagggctgggcgagtaaacaaatgcaaaagaataaggacctcgaggtcgggcgcggtggctcaagcctgtaatcccagcactttgggaggccgaggtgggcgcatcacgaggtcaggagattgagaccatcctggctaacacagtgaaaccccgtctctaccaaaaatacaaaaaaattagctgggcgtggtggcgggcacctgtagtcccagctactcgggacgctgaggctgagacaggagaatggcgtgaacccaggaggcggagctttcagtgagccaacatcgcgcctttgcactccaccctgggcgactgagcaagaccctctctcaaaaaaaaaaaaaaaaaagcaaaacagaataaacatacgtaggccaggtgcagtagctcacgcctgtaatcccagcactttgggaggcagaggcgggcgtatcacctgaggtcaggagtttgagaccagccttgccaagatggcgaaatcctactaaatacaaaaattagctggacatggtggtgggtgccagtagtcctaagtacacaggaggctgaggcacgaggatcgcttgaacctgggagacggaggctttagtaagctgagattgcaccactgcactccaacctgggtgacagagcgagactgtcttaaaaaaaaaaaaaaaaacaaacaggtctggtgtacgcagaatggaggcaccacgaattgctgaagaaggaaactttattcagtctatgataccaggacagttgtccatgctgccaggcaaaaagaaaaactggattctgatctcattatcagtagacaaacagcgacaattagtaacactgacacagccctgactgtgctgctggagggtccgaagcactctctgcacagcggtgaatccgcacaacagccctctggggaaggtgctgttatcacccacgtgagacacacgaaggaaagacacggcttcgcagcagcagcgtcatgattcgaacccaggcggcctgctcttatgataaacttaaatgtgtaaaactttatgctcaggaaaatataagagaatgtcttcctgaccctttttggggtaggacaataatttctctaaccaaaccccaaaagcatgacccattaaaaaaagggtcaggtggactaacttggctaaatgaagaattctgtttcaccaaagtacactacaaagtgggccaggcgcagtggctcatgcctgtaatcctagcactttgggaggccaaggtgggcggatcacttgaggtcgggagctcgagaccagcctgaccaacatggtgaaaccctgtttctactaaaaatacaaaaattaaccaggtgtggtggtatgcacctataatcctggctacttgggaggctgaggcaggagaattgcttgaacccaggacggggaggttgcagtgagcccagactgcgccgctgcactccagcctgggcaacagggcgagactctgtcttaagaaaaaaaaaggccagacttgtctcacgcctgtaatcccagcactttgggaggctgaggtgggcggatcacccgaggttgagagttccagatcagtctgaccaacgtggagaaaccccatctctactaaaaatacaaaattagccaggcatggtggcacatgcctttaaccccagctgctcaggaggctgaggcaggagaatcacttgaacaggggaggcagaggttgtggtaagccaagattgtgccattgcactccagcctgggcaacaagagcaaaactctgtctcaaaaaaaaaaaagaaaaaaaatatatatatatatatacatatacacacacacacacataccacaaagtgaaatgaacagccacaacctggcaaaagatacttgcaacatgacaaaggattaataaccagaaagtataaagaattcctacaaaccaattagaaaaacaggcaaaaaaaaaaaaatattggcggggcatggtggctcatgcttgtaatcccagcactttgggaggccaaggcgggcagatcacctgaggtcaggagttcgagaccagcctggccaacatgatgaaactccgtctctaccaaaaatacaaaaattagccaggcgtggtggcaggcgcctgtaatcccagccacgcaggaggctgaggcagcagaatcacttgaacctgggaggcggaggttgcagtgagctgagactgcgcctgctccagcctgggtgacacagcaagactccgtctcaaaaagaaaagaaaaaaaaaaaacaaaacaacatatttcacagagaagaatttatgtttttggagaaggagtttcgctcctgtcgcccaggctggagtgcagtggtgagatatcagctcactgcaacctcaacctcccaggttcaagcgattcacagaggacaatttctaaaaggcaaataagaagcaggaagggtgcatgctccttctctactgccctgtaacagtcattccacacttaccacctcaaaacaacaaatgcttttgatgttggctcctgtggggcagcaatctgcgggaagcttagccaggcacctctggcttaaggtccctcctgaagctgcagtcacaccatggaccagggctgtgacctcatccgaaggctcaactggggctgaggcccacctctgagctcactcaggtggacgctggctgggttcagttccttgctggctataggtggaaagggcccccaccagtttcttgccagcttctccacaggacgccccacagcctgacaggagctttcatccagcaagctcatcagggagtgggagagagcagccaggacaggagcccaggcctttctgaacctcatctcagaagtgacatccttcccttctgctgtctgggcacagctccccgggtggagcccgaggactagaaggaaaagaaaacttggatttaaaatgggataaagccataggagctgctcgtcccaccacaggaatctcaacgccgggttactgacaaagcgtcactttgcacctcgtccaactgtgcagacctctcctagccaggcccctgcaccagaggttaagaatccgtgcccctggtcaggaagtccaggtgggttcaaacggccagcagggaatttcaggcaaaatgtgtcccaaatcttcaaaccacgccccagaactcagacctccccctgggagttcgtcccaaggaaaccacctgcaagaggctcaggctgcaggggacactccgcttccaaaacccggaagctggagaccacacaagtgcccaacgccaaaggcaccccgtggagggacgccctgtgccctcccccgaccaggtgacccgctgcgccctacacatcttcaccaggaaacatctgttatcgatgtggacgaagcgcagcctgcactcccagatccgctcattttcgttctgccctccgttttacgattcgcctacactgaaaatgcgtgagtggagtggaaagccttcctactcctgcctcagcgaccccttctaaaatactgcctcgtttggcctgaaaatgtgatttgcaggcttcctgagcaaagtagatttcactccattaaagaaaaaaaaaaagaaaaggcaccgaacggggctcggctgtcgggagttttgctttagttttttgcgtgttttgttttgtgtttttttgttgttgttgttctttttgcggccacgcacaccgcgttcccaggcttcagggcgtgggggtcgccgtggactcccggacgtgaaaacgcttaaagccagctgggaaaaccccaccagcgttttccgcgcacagcgccagccataggaaaggacccccaggagcgaatccgggcagggaaaccccggacgcccgcacactcagcatcagtaccggcacccagcacccagcaccgagcaccgagcacgcagcaccaagcaccgatcaccgagcagagcaccccgcacgcagaacccaccgagagcctgatgcagtctccgccgcaggcatagcgctaggccccggcgccttcacaacaaagggacgctggcgggcggggcctaagaggtgcgcggtggaggggccgggcgcgaggccgcggagacagctcggagctcggcactggggagtggcacagcgctggcggatccaggtgggcttcacggggcgcccgcgggaccggaaatgacgcgcagaaccctgcatcgggctcctcgctgccccgcgggcgccgctcctcagtgccccagagccacggagccggggaaacgcgccgcggcccacaacgcccccgcggctgcccgttggttccgcccgagccgttctactccaggcagacgggaggagaaacacggcgcgctcagcgtcccctgccccgttggttctgctcgggcccttccactgcaggccgacgggggtggaaacacgcagttttttttttttttttttttaaggtctagggtaacacggggcttttaagtgcctctccgcggccgc

SEQ ID NO: 1734 - DNA, 21129 bp, Homo sapiens
gctttcctcgaagaatattttaatacattttaaaactcaacaaccttgtataaaaacctgtcgagtctgctggcacagctggggctgggggttgggggccgggggcctgtgtggacagggctggtctggacgagtgggttggggcaagagggcatcgctcatcccaacacagaaacaggtctccagctccgaagattaaacaatccacccggctcccaccagttcctttccaaatcacggcccagccagccccgtgcgtgtcgagagtgggagagggtgtgtggaggtttgtgctgccccacgtgggcacccgaagatgccctggcaagtcacggagaaaacacagctctttcctccacaacaaggaaaatgatttaattctacaaatttacaaaccaaaatacaaaaacaaaacatggagcacaaagtaagacgaggagttccgagtctcatcgcagctccagccgcagtagccacgcctgtggtcccggctgagttctccccatgacggggtccactctgaccttcagaacttgaggctgaagccggggcccgcggcagaggccccctggttcgtggtggtaaggtggaagcccgtctccttcaggtcgtcgtcaccctgggacgagtcggctaccgtgagaaccctgcccaagccagccccacctgtgggcacgccccacccgccaggcccctcaccagctggctgtagcccaggcctccctcagggggcctcgggctggtgccccgcttcacacgctgctgctcgctcttggcgggccacgtggggaacatggaggggtcgatggggaggggggtctcgcggaaatactcatgcttgaggccgtcctcagcgctgatcctcctcccggggaagtaggtcaggaacctggggggagagggccagaggcccaggaggtgctcgtgtgctccactgggtcccccaaagatgggctgtgttgggacggggctcagggcatgggacgccaggcaccagagcagttctggaacgtggtgagccagcaggtaggcctgggactgggaagtcaccgctatggctcgggacctcccgccacccggctgcactgggctcacttgttcatgaggtcgaagccctggtctgagagcagagccccgaagcgcttgcggaggttgttgtaggggtgctcgctgaaggtcatctttttgactactgggagctcactgtagccgggccagattttctcactgggggtccccagctcctgaaagacagaggtgcttcaacagccacaccaagtggcccacagtgttggcacctgtgtcccgtcagagaagacaagccaccaggagggctctcagtggccctggtccccatctcaacccagcacctgtgcgccccgcagccccattcctgcaactcctctgaaatccatagcgcacctgcggcagggccagacccaccttgaacactttgttgatctgatcgatttccgaattcccggggaacagaggcttctgagtcagcagctccccgaagatgcagcccactgaccacatgtccacggccgtggagtattcctaagacgccaggagaggtgttcaggaaggccagtgcccgcgaagctgtgggaggctgcatgggggacaggggaggcactcagacgcccaggactcaccttggcaccaagcagcagctctggggcgcggtaccactgggtcaccacgaccggggtgtaggccttcagaggggatccgtactcccgcgccagcccaaaatcacccacctgcaacgacagatgggcggctgtgggtgggcctgggcgggtcaccctgggatgggccactcggaggggggctcaccttgaggatgccggcgtggctcagcagcaggttggacgtcttgaggtcacggtgcaggatccagttgtcgtgcaggtgtttcaccccccgcagcagctggatcatcagggtcttcacctcccctgggagggagggaggctcccatgtggacccggccgccccaagcccagggcactcagggtggcccgctcgcctcggcagcaacagaggcttctcagggctttccctgtggatgcagctggccctccctgcagcactgtcaccgcgggggtgaccaggacactgcccccacttgtacgcagacaggaccccggggcgcggctgtacctggcaggaagggctgtttcatggtctccatcaggctcttgaggtcgtgctccacgtagttcatcacgatgtagatcttgtccatgttgctgcccaccacaatctcctgcagggcacggctctgtgggtgctgggcacctccaggcccccacccacccctgcacccgggcgcagatgctgagggacagtaaggacctccggtgccacccgggaggcaaatacttgcttctgtgtggtctgtgaagggctccactaagtgcaggagagtgtaggaagcacccggccccaggacagcacggggccctgtcggaaaagccttccacccggggccaggcgtggtggggccatgctcactctaacggtgacaatgttgggatgctgggccttgaggatggtgttgatctccctcagggacgtgatcgggaagccctccttctccttctccatcttcagccgctttagagccacaatttcatctgtgaagaaaatacagacggcactgagaggcattctcaaagtcacggtaccaacagtggactcgttcagtgaggaccgcaggcagtgcccaaagcgccagcatttcacggaggggggtctcgttctaggtgggggcacgtgggcaccaggagaacgccccagctgaggtctcggcaacacccacggcttcccactcaacacaccacagacactcacagccacctacagccacctgggatcccagcggccacgccgactccacatcgacttccccaacagagccggcctcacctgggatcccagtggccgactcccaacagagttcccggctcacacacctgcttgggtgggacgctgggaacgcaaacctgcacaccagccccggcacagaccactccacgcgctgggcctcggccctgtggggcaggccgcctgctactgcaagggagtggcaaagccccagggccaggctgacctctggcttctagaggtgctgaggggtccaacctccagtagctgctcaggtgaagcgggcccaggtgcagtcgcagctctcgggcagccagcccctgccccacttcccctgcctttgtggggtgaggggaccccacccacctgttttcttgtcttttgctctgtagaccactccataggtgccctcctcgatcctgttcaggcactggaactcctcgacgctccggcagccctgggaaggaagcgcctgtgtgaggtctcagtggccatgccagctggagggagggcggctgcgtccacaggcacggcacacccagcacggggcaggtgcagggcagagccttgggactgggccgggggtggagctgggagcagctcagttctttcaaagtctctttccttgcaaaaccatctgacactttattatgaaacaaaaccagtgtgaacaaaaggccatcccagccaggtgcaagggctcaggcctgtaattccagcactttgggagggcaaggcaggaggattgcttgagcccaggagttcaagaccagcctggccaacatagcaacactctgttttctttttttctttttgagatggagtctcgctctgtcacccaggctggagtgcaatggtgagatctcggctcactgcaacctccacctcctgggttcaggcgattctcctgcctcagcctccctagtagctgggagtataggtacgcaccaccacgccaggctaatttttgtatttttagtagagacaggatttcaccatattggccaggctggtctcgaactcctgacctctgatccgcccaccgcctcggcctcccaaagtgctgggattacaggcgtgagccactgtgcctggccaaaactcttctctacaaaataaaaaaattagccaggcatggtggcttgcgcctgtagttccagctactcaggaggctgagatgggaggattgtttgagcctgggaggtggaggctccagtgagctatgattaagccactccactccagcctggatgacagagacagacccagtctccaaaaaaaaggccatccggagagtctctctgtcaaagtggatgtgtcccctgcttgtaccaggatgacactgaggacgggccctacctgccaggcgcagcatgatgccccatgccagggcacctacccctcggtgtaccttggggccggtgcccaggccggatgtcacgtactctgggtggcctgtggcccgacgcctacgctcagcagcactaaggggcagaggcgctcacaaggcatagggcagtcgacagaggcctgctgcatgcgccagagagaacctctccgcccacaggcaccaaggagggggccgagtccctgccggtctcccaggcccccgaggccactggtaccttctcaggcttgtcccttccaaatcactcccaacaatatcctgccttattgatagctgcctgagcaaaaggcttctggtcacacatctacactgactcccgtagccgctcccccatccaagccctgcacagatgccggtaacaaggccttggtgcctacataacccgcccacgcaggggtcaagtggaaggcactgctctccagtgcggaggaggacgcaactcgggcagcagtgacagcagcgcggccgcacgcccaggctgcctttcaagccgcagagcagtcctgcgggcagctccctgtccacccagttccgtccagcatgagaaagaggcgggacctagaagcatgaggggccagtggctgtgcccgcccgtcactgccccagtgggcccagcagccctgtgaggcgacagacgccaacacgggggccaggcttcgctcagcccctgtggtaactccgactgccaatgcggacagcggcccggggcgaggggagggcctgacctgcagggccggcaggtacttgggcagctcctgcttgagctcgatgggcaacagggcaggggagtcgggcacatagtcgccctctgtcagggcgctgctctgcggcgttccctcacccacttcttcctctgcttcttcactctccccggaatctcggtcgaaccgtgactctggaactggaaaagttgaacctaattacgaagctaggagtaagtaaggatcatgaacctcctcctgccccgggggcatcaagcgcgtggcagggctgccccgtgtcccgctgggaggtgctggcgctgggctctcgtcccctggacacagggcaccgaggcctaagagtgctggcaggctcggctgagacagagcccggatgctgagctgggaggaggcgtcgggtgtcatgtgggggacaagcccacatccacgtccaccaggctgaggacataacctcactgcctgtcggaggctgggccaggcctctgttctgcagggacaggcccggagccaccatctgacgggcctcccctgtggggaactggtcctgggcttcccagctcctcggccctgctgggcactcaggacgcccttggtcagcactgtgcctcgctgaggaatgcgggccccaccggcacagcctggagcggccaacgaatcaggcggcctcccagaccctggcgtgccccacgccgcgcaggaccggctgtcttaggagagggctgctgcactcggagacagacaaggagggggctctgtctccagggaggttcttaccaaccaagaggtggttttcattttctcgttcttcatcttcactcatttcttcctcacttacttcttctgcaagagaaaggaggcgtctgctcagaccagcaccggggcgagtgctgccacaggcaggatgcgggctccgcttcagctaagcaacaagtgttcccaagaatggatatggaggctgggcgcggtggctcacgcctgtaatcccagtgctttgggaggccgaggcgggtggatcacctgaggtcaggagttcgagaccatcctggccaacgtggtgaaaccccgtctcgactaaaaatacaaaaattatccgggcgtggtggcgcacacctgtactcccagctacttgggaggctgaggcgggaggatcacttgaacccgggaggcagaggttgcagtgagccgagatcatgccactgcactccagcctgggcaacagatcaagattccatctcaaaaaaacaaacaaaaagaatcgatgtggaggtgtcccgagagagtcctagatagaagggagtttcaactcccccgcccgccagctacttctctgcggtttctaacactatagtgaagtcacaacacctcacacagtcgtcgcggtgcctcaccggcagactgctctgatgcctcctcagagttgctgccggtctcctcctcctcctcttcctcttcctcctcctcctcctctgattcttcactggtgctcccttcctcctcctcctcttcctcctcctcctcttcttcctcagaacctgagcctgattccgctgtagaaagacagcagagcagagggtgaacctgggccttcctgggcagcagtggtcaaggccttggccaggcggttccaggtacctgacgaggactcggccgagctggtcttcctctcgctgtcgctgatgtcctgtaagtcggacagcaggtccctttcttccattttctcttcttttacttatgagataaaccataaaggtgaatttggggaaatgtttttaaacaaacaagctaccaccaccccaaaactagtgcctttcacgtaacgattaactttgcttggtcggaaaccagctcatccacagacgctggaagccacttctctaacggggccagtggcgaatgtcccagcggataaacacacgtcctgtgtcctggccgcacacagacactcacggtccctctcacgacacgagaggacttcagccagcacatctctcactttcttctgaagcggttacttagctgggctttaaatgaatcctacacacttatgccaaacatcccccagaaaagactcacactgtgctggcttctgcgcaggcgccggcctggcctcacctggcttccggccgtctcccaactcgaaccgctcccgcggcggccgaggcgggctgcgactccagtggctggctttcactttgtcgctgtagtcctctctcatcgttcggtgatgtgcagacactggcgcgcagggcagagagggagatggcactagcagcactgccttcctcaaaaggccccacccggcacagctgcctcgtctcccacacccgcacctggcagacacacccacagcgtgcacagggtgctgacagcatcggggtcagaggccagaggtctcccaggaagcccagggagaaaaagctccaacctggaggccgtgagcccgaggacccaggtggaccttctagactgatcttcactggtcaaaaaggaaggggcgggagaagattctggaaagatggagtaggaagcactgggaatcagtctccccaccgagacaacacttgcatcacaggatcaggcctgtgcaactactgaggtgctctggagtctactgaaggtttgcaacttcagggggaatcttggagagtaaactgtgattcattaatcaacgtcaccgcttcgcacattagtggctcccacctcactccccgctggcaggcagcagcctgcatgcagctcgccggacccaggtgggcagacggacacacacacccgaggtcagtgtgatgactgcgtgtcccaccccagaggcatgaagaggcagcagccacggccacccccaagctgaaggtacttccagggcatgagcaccacgtcccccgttgcccccttcatttctctctattccccctttaggaggcagacacttcaggacaagaacattaaaaacatctgtattgacgggaacgttaaaaagtggctgcacgtgaccaggaaaaggctcaggctcagaaaagacccgtgaagaccctgagtttccacaacaggccgaccccacagacacagcccagcacaaccaaaacaacaagtgcacacccttgagtggggaccaggaagaatcacatcatgagaatcaaatgtccatttttttgactaagaaaaacacaagagaaacaaagaaacaggacagtatgtcccattcagaggggaaaaaaagaagccaacagacacggttcctgaaaatcacctgacggtagatgtcccagacaaagattttagggaactgtcttaaaccttcagttcctcagagaacgaaaggaagatgtggagaaagtcaagaaaatgacgcgtgaacacgacggaaatatcaacagagacagaagatccaacaagaaaccagagagaaattccagagctaataagtacatgctcacaatagacactaaaaagtaaatattcacaacagaaactcacaggcagatgtgagcaggcagaagaaataatcggtgagcctgaagacaataaaatcacatcgtctgaggaaaagaaagcagaagagactgaagaaaagggagcagtgctgagcggcctcggggaccccaacagatctgtgggagcccaggagggaggagaggagcagagagggtatctgaagaattcctcaaaacccccacattggatgaaaaccgtaaatataaacattagagaggctcagtgaactccaggtagaatgaagtcaagaggcccacaggaaaacccattattaaacagttgaaagcctaaggcaaagagaatcttcaaagcatccaagggatcctcaattaggtcatcagattaaagcatccaagggatcctctataagatcatcagatttctcatcagaaactttggaggccagaagacaatgggctgaaatagtccaagtgaaaaggaaaaactgtcagctaggcatgagggttccttgagcccaggaattcaagaccagcctgggcaatacagggacaccttgtttctactgaaaaatgagccaggtgtggtggcacacgctacgcctgtaggtcccagctacgcgggaggctgaggtgggaagatcacttgtgcccaggagttcgaggttgcagtgagctatgatcgctccactgcactccagcctgggcaacagaagaagactctgtctcaaaacaacaacaacaaaattgtcaaccaagaaccacgtatccagcaaactttccttcaaagatgagggagaaatgaggatattctcagataaacaaaagcagagggagttcattactactagacctagacctgccttgaagaataagctccagggagttgtgtggggtgtaaggaaaggacgcgagacagaaaccggaagctgggtgaagaaataaagatctccattaaggtgaggacgtgggtgactataaaagctcgtactggccggccgcggtggctcacgcctgtaatcgcagcactgtgggaggccgaggtgggtggatcacgaggccaagagatcaagagactattctggctaacacggtgaaaccctgtctctactaaaaatataaaaaaatagctgaacatggtggcgggtgcctgtaatccctgctactccggaggctgaggcaggaggatcacttgaacccggggggcagagggtgcagtgagccgagatcgcgccaccgcactccagcctgggggacaagagcaaaactctgcctccaaaaaaaaaaaaaaaggcaggggcgaaaagcaagcaccggaaccaagcgcccgcctgtgacagcaagtgcccagcaccagggggcagcagacacgcgtcccgccgagcacagctgcccaccgcgccgcctaccttccctgcgggcctcccgctccttgcgccgctcctccgcccgccgctcgcgctccttctgctcccgctgctccttctgctgctcccgcatcttgcgctcccgctcccgcttcctttctaactgctccaagcggtccctgaagaggcacacgccatcattccccctaaacagaagcttgcttatcgcgtttttgtccacatttgtaagctggctttctacgtaattcaatccgtgaagtttttttttcatttttttattttattttctttgagacggagtcttcatctgtcccccaggctggagtgcggtggcgcgatctcggctcactgcaacctccgcctcccgggttcgagcgattctcctgcctcagcctcccgagtagctgggattacaggcgtgcgccctgtactcccagctaatttttgtatttttagtagagacgagggtttcaccatgttagccaggatggtctcaatctcctgacctcgtgatccgcctgcctccgcttttcaaagtgctgggtttacaggcccgagccaccgtgcccagctgccatttccaattctaattaataaatgatccatttctttccattcgatcggtgtttgcttcatggattttgggctctgtggttagatgcattcacatgtatcattgctgtatcttcctgctgtattggcctgtttctggctgtgaagtccttgctccttcttgtttctagctttttttttttttttgagacagggtcttggtttgtcacccaggctggagtgcagtggcgcaatctcggctcactgcaacctccatctcacgagttcaagtgattctcatacctgagcctcccgagtagctgggattacaggtgtgcaccaccacacccaggtgatttttgtatttttactagagacagggtttcaccatgttggccaggctggtttctaatatttcttaacatctgttttgtctggtatgagtacagccattcaagctctcctatgacagctgatgtttgtacgctgcgtcttttcctgttctctagcagacagcatacagttagatcttgtttttctatctgataatctgccctgtctgtttggggcacagagacctttcacatgtcatataattacacgtacagttggatttactttccttgctttgttgtgtcttttttattcttccctttttgattttaaattacatacgtttagcataccattttaatttatttgtactttttagaacactaagaaaacaactttcttagtggttgctctagggatcaccatatgcctcatgatactagctcaagtccagtacaatataaaactgttgtaacacagcttcattccctgtcttctttgtgcagtccatttatgccacataccacgacaacagtgtaattattttacacaatcgtagttccagtaaaacctaagatgtgaggagagatatttacaggatattgacgtcaacctacacttgctatctgcagtgcctgtccttccttcctgaggattcaagttaccgtctggtgtcatttctattcaacttgaaggtcttcctttagtatttcctttaaggcaggtttcgccaacaatgaatcccaccagtctctgcttctcagggaatgtcgttcgttccctttcacttgtgtagaacagttttgattcctggctgatggttcttctctctaagcagcttgagtatgccactccactgccttctggcctccattgtttctaagaagtcagtggctggcggtattgaagctcccctttcatgggatgggtcattcttctctgagccctttcaacattttctctttggcctttgccagtttgactatgatgtgactttgcatttattctagttcaaacttcctgtgctcttgaatgtgcatattttttaattaaaatttggaaagtttttaaccattattgtaacaaatatctttcctctctcctggaacccccattcgacgtgctttggtacagcagatgttgtaccacgggtttctgaggctctgtgcatttttcttgtttttttctctctgttcttcagaatggataatttctactgctccatccacaagttgtttccaagcctttactaaattcaacatctggacactcaagacagtttctactgatgatgttcttcctcagtacgggtcacactgtcatacttctttgtattttagataatacatttgtagcaattctggattctaagttttccctttcgttgttaccaccaaggcctgtctggttgtccgtgaaatccatctccctcatagctcatggccaccccgttccttcccacatgcctattttaattttcaaccttggcttcctaggggtcaccaccatggctgcacagcttagcaattagccagcactggaaaaaggctgggctcaaatacctcgagcacagtaaggcttccttggcccacggctgtgtgtggacagggagcacactgaacgttcaggcgtcattcgcatctgtggcggcttctattttctgctaggtcctttcacgcagctgcatcctcagggctggtcacaagtgggtggcggctcgagctctctccagtctctgctgcacgtctttggcgggatcacagctgctcccaaccacactgtacttcattctagcagacctcttggccttttcctccctccactgaggatgctggtgggcaaggccactgcccactgctctaaacggagtaaccccttccaaggcagcaaggaaactgcaggtcctgcagctgccctgtcccagtggaacctccgtgcttccaagtgcagagtggaagcagtaaagggagcagctctcaggccagaaggtcagattcttactgcttttacccacagctcagcagttttccaagcatcagtgcttctcagattatccttatcagtttcctttttgtcagagacaaggtctctctacgttgcccaggctggcgtcatgcggtcctctggccttagcctcccacgtagcatatgctaccacacccagttctggattggctgatctgaatcggccctacccagaagtctgcccccaacaatttttgttcattcactctcctgtctttaccttctgggaaatcaatatgacagcccaaatttcatctaccaacctccacttctatcccaagctctactctcgtgggacaagacacactcaatgtctggcacagggcgtggcatacatgaatgtttcacacactaacaggaactaggccaactgaaaccttgctcacccagcagcggtctcggaccttgacccctgggcctcagtgtctcccacacccttcggcatcaacaagaaccagcgccctctcatcatctttacatgctgtgtacccagccctggctgctggcaaacatcgctgcacacgcccttccgcttcagactcctctcttcctggagcagcttgcaagctttctgtggactcactctgaaggcggagatgggcctgctcgcacctggcctacagcctttttcctggttcacagaacagatctggggctacaccgatgttctttcttgggaatctggctcataaaggggaacgaatatacagactaatggccaggagtcctaggagtccagtgtcccgatttccagactgtttcaaggtttttgggatctcccttctcctttttttgagacagtctcactctgtcaaccaggctggagtgcagtagcatggtcatagcttactgcagccttgacctcccaggctcaagggatccaaccacctcagcctcgtaagtgctggaattctagcgtgagccactgcgcccggcgggacgtgcagatttctgatcccttcattgtcttccctcaatcaaatcacacccgttcttacttccagatgcagtgaaaactcactccctcaggacagttctcttggtcagcctcgtccagcgttcactgtgctgtttccatgtctaccacttctgcaacaaatgtgacttctattgccaaattcttcttcattgctgtgacaggacacactaccacggccctttcataaagtcctcaactgacccagcccactcacctttctctcctggaatgctcccttgccatttcccttctcttctgtctttcccattcccggcgagctttatcctgttcttctcgatgtcgtttccgacgttcgtgctctctttctttcactctagcatgcttccctaatgagaaataaagtgtcatgcaaagaaacctcacttcaaaaatttcacgaggccgggcacggtggcttacgcctgtaatcccagcactttgggaggccgaggcgggtggatcacctgaggtcaggagttcaaaaccagcctggccaacatggtgaaaccccgtctctactaaaaatacaaaaattagctgggcgtggtggcaggcacctgtaatcccaggtactaagggaggctgaggctgtagaatcacttgaacctgggaggtggaggttgcggtgagccgagatcgtgccactgcactccagcctgggcgaaaaagtgagactccatctcaaaaaaaaaaaaaaaaaaaaaaaaaaaaaaaaaaaaaatcacatgaaaatgaaattaaatcaagaacattaaatatttaaataatgatgttaagtaatcctaatctttttttttttttttttgaagagacagggtctcactatattggccaagctggtcttgaactcctgggctcaagtgatcctccatccttgtcctcccaaagtgctgggattacaggcctgggccactgcacccagtcgaataatcatgattttatgttaaataaaaaactttgaaaatagaaaactatctgcagtaagcgtctaattatgaagaaagaagaaaaaagaaaaacaattctgctatcacagaagagaattgtaatattcatcttttaaaaattttctatactgaataaactataattatcagttttataatacaaaaaccactcttcacaaagactacagaacaaagctttgctatcagtgggcttctccactgtgcaatgaagccacattaattaatcaagcgtatttataataatgagatttcaatcgggctccaggtccaattttcctaacacccgtaagaatctcctgatgttggtacgagatcaaactgctcaagcctaacccattctttggacttgagcaaatacccattttggggtgtgtttttctcctatacttgttgaattcaggtcattttaaatgtaaacaaactgctcccaaacaatataatgggggagagaaaaccccagaggaaaaatggactagccattctgaatggtctgtgacacacgcacgctttcagctagagtttgctctctctggttttcggtctgtgacacacgcatgctttcagctagagtttgctctctctggttttcggtctgtgacacacgcacactttcagctggagtatcctctctatagcccctctgaacggtctgtgacacacgcatgctttcagctagagtttgctctctctggttttcggtctgtgacacacgcacgctttcagctagagtatcctctctatagcccctctgaacggtctgtgacacacgcatgctttcagctagagtttgctctctctggttttcagtctgtgacacatgcatgctttcagctagagtattctctctatagcccttctgaatggtctgtgacacacgcatgctttcagctggagtttgctctgtctggttttcggtctgtgacacacgcatgcttttagctagtttgctctctatagcccttctgaatggtctgtgacacacgcacgctttcagctagagtttgctctttctggttttcggtctgtgacacacgcatgctttcagctagagtttgctctctctggttttcggtctgtgacacacgcatgctttcagctagggtattctctctatagcccttctgaatggtctgtgacacacgcatgctttcaggtggagtttgctctctctggttttcggtctgtgacacacgcatgctttcagctagagtattctctctatagcccctctgaacggtctgtgacacacgcatgctttcagctggagtttgctctctctggttttcggtctgtgacacacgcaggcttttagctagagtttgctctccatagcccttctgaatggtctgtgacacacgcacgctttcagctagagtttgctctctctggttttcggtctgtgatacacgcacgctttcagctagagtttgctctctctggttttcggtctgtgacacacgcacgctttcagctagagtattctctctatagccattctgaacggtctgtgacgcacgtatgctttcagctagagtattcttttttttttttttgagacggagtcttgctctgtcgcccaggctagagtgtgcagtggtgcgatagcggctcactgcaagctccgcctcccaggttcatgccattctcctgcctcagcctccagagcagctgggactacaggtgcccgccaccacgcccggctaattttttgtatttttagtagagactgggtttcaccgtgttagccaggatggtcttgatctcctgaccttgtgatccacccgcctcagcctcccaaagtgctgggattacaggcttgagccaccacgcccggccttcagctagagtattctctctatagcccttctgaatggtctgtgacacacgcatgctttcagctagagtttgctctctctatagcccttctgaatggcctgtgacacacgcatgctttcagctagtttgctctctctggttttcggtctgtgacgcacacatgctttcagctagagtttgctctctatagcccctctgaatggtctgtgacacatgcatgctttcagctattctctctatagcccttctgaacggtctgtgacaccattatgctttcagctacagtttgctttctctggtttttcagtggtgctctggggaaggcagaagagtaggaacaggaaagaaaccacacttgaacatgatgtcaaagaaagtaaatgcttctgtacccccttctgctgaatggctatgatgcctacatttttcttttctcttttcatcttttctgtgatgaactttttctttccgagacatttgctggggtggtttgatggccaaagaatcatcttcttctcctctgaaataaaacacaacagcactgcgtcatgcttgagaaagtgcggaaaagcatcaggctattatgaggttttttcaacccagaaaaatgcatgattcagataggaacgaagctgaaacatcatttaaaaaattacattaattctccaacttcaggcatctttttttttttttttttttagacggagtctcgctctgtcacccaggctggagtgtagacacgcgatctcggatcactgcaacctccacctttccgggttcacaccattctcctgcctcagcctccggagtagctgggactacaggcacccgccaccacacccagctaatttttgtatttttagtagagacggggtttcactgtgttagccaagatggtctcaatctcctaacctggtgatctgcctgcctcggcttcccaaagtgctgggattacaggcgtgagccaccgcgcccggcctaggagtcttaagattcagatgaaaaatgtaagaaatcaatgttttgtgcagatggaacgaaatgcctctcagaggacctgcagggggtgaggggcaggttcattagcttgactgtggtgacagtttcaggggcatgtaaaaatacatcacatcttatttatttaatttaattttatttatttatttattttatttgagattggagtcttgctctgtcgcccaggctggagggcagtggcgagactctcggctcactacaagctctacctcctgggttcatgccattctcctgcctcagccttccaagtaactgggactacaggcgcccaccaccacgcccggctaattttttttgtattttttagtagagacggagtttcactgtgttagccagggtggtctcgatctcctgaccttgtgatctgcccgcctcagcctcccaaagtgctgggattacaggtgtgagccgccacgcccggcctgtatttatttttttgagatggagtctcgctctgttgcccaggctggagtccagcggcgcaatcttggctcactgcaacctctgcctcctgtcccaggttcgagcaattctcctgcctcagcctccggagtagctgggagtacaggcgtgcgctaccacacccagctaatttttatatttttagtagagacggggtttcaccatattggtcaggctgatctgaaactcatgacctcatgatccacccgcctcagcctcccaaagtgctgggattacaggcatgagccatcgcacccggacttattatttttttcagacagaatcttgctatgtcccccagggtagaatacagaggcacaatcttggctcactgcaacctttgcctcccacattcaagcaattctcctgcctcagcctcctgagtagctgggactacaggtgtacaccaccatgccaggctaatttttgtatttgtagtagagacaggctttcaccagtaaccctaggaaagagtaaacctcaatagttgtaacagcatgccctgtcacagtaatcctaggtcgtggctcgcacctgtaatcccagcattttgggaggccgaggtggacggatcaccaggtcagaagatcgagaccatcctggctaattttttgtatttttagtagagacggggtttcaccgtgttagccaggaggctgaggcaggagaatggtgtgaaccagggaggcggagcttgcagtgagccgagatggcgccactgcactccagcctgggtgagcaagactcttgagacaccgtctcaaaaaaaaaaagagtacacttcagtatttacaacagcacactgagcacactgtcacagtaaccctaggaaagagtaaaccttaatagttacaatagcacaccccgtcacgtaaccctagggaagagtaaacctcaatagttaaaacagcacaccccgtcacagtagccctaggaaagagtaaacctcaatagttacaacagcacaccctgtcacggtaaccttaggaaagagtaatctcagtagtacaacagctacaacacgccctgtcacggtaactctaggaaagagtaaaccttaatagttacaatagcacacagttgtcacagtgaccctaggaaggactggccaggccagggctgtgtacagttgggtcttgcacatctgtacatccgctcacctgtcttccattgagtcttctcttctatacggggagttccttattgtgatctccatgcagtgatctctcagctccccctcctcaagggaatcccgcttggaatcccggtcatcagactaagaagcaaagagaaagttaatcattttctttataagtttttttttcttcatagataaaagtatttttaatgataatcaaacctgggcaacatcccaaaacaaactttcacatgtactctgaatgagccagtgttataaaatataaagaatttttggccaggtgcagtggctcacgcttgttaatcccagcactttgggaggccgaggcgggtggatcacgaggtcaggacattaagaccatcctggctaacacggagagaccccatctctactaaaaatacaaaaaattagcttggcatgttggtgagcccctgtagtcccagctactcaggaagctgaggtaggagaatggtgtgaacctggccctgggcgacagtgcgagattccgtctcaaaaacaaaaaaaaagctaacaaagtgagcacatgctattggaaaaatactcaaagcagagttgctacaaacctttaatttggaaaaatttcaatatctgtgaagcataataaagtgaagtgcaaggtatgcctgtactcactaacatcccaaatgatgctacaaatcttagcaaaagaggtactttgccaatgcctcttaccaaattactaaaaaggtttcctgagtacattaccatgcaaaccaagaaagacgtaaaatatttatattaatttcaaggcaagttcccactatattaaaaatacttagagatagtattatgaatatactaataatgaaccgagaaaaattagtccagttttgctaatgacttaacattcaacgtattttattctccatgtatgctcaatctagacacagctttagtgtgttaaatctgcctttaatgtcaactgaatattagaatacattttgggctcacctgcgacatttggaagtacaaaagaacttcaccgaagaagcgttgttctaatggaaaaatgagggcaaagaaattaaatctcctttaagaaaaccacttacttaaaaaaatatggcttacattttttaagcgttttatctctgctttctcctcttgttccttccttcgtttcttttcctgaagaatttcatctaaagttttcactttccaagagtccttttcatcacccatttgagttaaaacactgcaaaaagaaaaataattcagcctacatcaggacacagcaagctatggtgctgaacacttgaacctagtcacttttgagggattcagaataaatcctcattaagaataagaagttgtgcccggcgcagtggctcaagacggtaaccctagcactttgggaggccgaggcgagcagatcgctggagttccggagttcaacaccagcccgggcaacatggcaaaacctcgtctctacaaaaaatacaaaagttagcccagtgtggtggcgcgtgcctgtattcctagctacaggaaggaggctgctagaggcaggaggatcacttgaatcagagaggtcaaggctgcaatgagccaagactgcgccactgcactccagcctagataacaaagtaagacttggttaaaaaaaaaaaaaaaaaaaggtaagctctaggctgaggcgggtggatcacaaggtcgggaggtcaagaccagcctggccaacacggcgaaaaccctgtctccactaaaaatacaaaacttagctgggcgtggtggcgggtgcctgtaatcccagctactcgggaggccgaggcagcagaatcgcttgaatccgaaaggcggaggttccggtgagccgaggtcgcgtcactgcactccagcaagaccccgtctcaaaaaaaaaaaaaaaaaaaaa

SEQ ID NO: 1735 - DNA, 7537 bp, Homo sapiens
ggaagcggtgagactgtctctcggctgcagccctggtgcgacccggcccgttgccgtagagatgggcagggctggatggagtggggtgcggtgagctgagctgaccctgcttcgccacggggactgcagtgaccccggcttgccggcagggcgggtaacaggttgagccagggtggggctgctcaggggcgtggagccgaggccaggatttctctgaagacccggcacaggctattcctttctgcgacgagcccattgctatggaaaccaaagcgttaggccagcggggattgaggctgcgggatcatgacgggtctctctcccgaagaaccttgcctaaggcttccccaagcggctacttcctgagcgaacccgcccacccgcctgaaggagagaggtaaaaccctgggggtcctgacactaagcaggcgaagaagcctattccaatgccagctcccctaggaaacctacccggcccacccctagaagtgatgcttcgctctcgttaactcttggactttgttccatgtttataacttagtatttcacgaacgccccgcggtgtttgttcatttttcccacacataatggaccataaaggtcggcttctttgctttatgactcgttctgaacaagtccttttccgcgctgtgtctcactttcctcttttgtaaaatggaaatattaactctagacgccggtctgattaggttgctttgaagatcgaaccagatgagggaagccaaatacttcataggctgtaaagtggtgaagctgaactgctaccgagttgctatttttttctcctcctccctctcaagctaaacgttctttagatcttttgtgatttcttcaggtggtctttgcgactccctaggctccgacctggaagaaatcttttttacacttccctttcacagagccctgcattttaacttccctatcagaagcgagaaaaatagttatcattttgagagggcttactctatgccaagccctgagaaaactctttacgtggattatctcgtttaatttcacaacatccttttaaggtaggtactgttatcctattttcaagctctgtctgcctgtaattgcctgtttactatctgtttctcccactagtctttgagctccctgagaaaaggggccatgcctgtcttgtacatttcagtatctccaacacctaatacagtgcctgatagagattgctttttttttttttttttttttttttgagatggagtctcacgctgtctcccaggctggagtgcagtggcacgatcttggctcactgcagcctccgcctcccgggttcaagcaattctcccgtctcagcctcctgagtagctgggactacaggcccatgccaccacgcctggctaatttttgtatttttagtagagacgggggtttcaccatgttggtcaggctggtcttgaactcctgacctcaggtgatctgcccgcctcggccttccaaagtgctgggattataggcttaagccaccgtgcccagccctgatagatatttcttaactagcatgaaaatgactcctcgcatcactaccctcacctgcaagagcattgtcacttctgcagacttttagtggctataatgaacagcacattcctctattcccgttacccactgggcactggtttggggggacatcagttcacttctctatggattttctgatgacgaggatccagaacattccttagcatttagacttccatctgggttcaggaggctttttctttgcccttcatatcacctctgtagcaagccagccctctctgtccttccgggaatgagcctgatgcatttgagtctggggcattggcaggtaggatttgcctatacaacctttggtctttctctttagtagcctcagaaccacccccatccccacccagcccctccctggaattctggagacacgctgccagagaactcattctttccagaaaacctctcagaaggcagagtcatagctgttgggagtcatttcttcattcaacaaatatttatcaagcacctacttgtggggacacagcgcttggcactagttggtgatagagtgggagtgaagacagacaccatcatatccctaaagggctcacagtctcttggggagacagacattaatcaaataatcagacagatcggagcaaaactacgtcttcagtaagtgttaggaaggagagaacatagggctaagaaagcctggagcagagttggtcaaacgtgagggaggggtgtgatctaaggagatttcccttaaaacagttacctttaagttgatatcttaaggctcctcagacttctgcagtcctctgctgaatggaccagatcaggatctgatgggttcataaggaaagagactgagagatcagcaggggcaaaggccactggctggagaggacaggttgtccctaaggaactgtaagtggctcggttcacctgaggcccttcagagcatggagaagcctaataagaggctggagagacaggcaggagccaggtcacaaatggccttgacagccaaactaagtggctccatcttatcctcacagtggatagccactgaaatatattaagcagggaaacaaaactttggctcctcatttctcgtgcctggtgaagactgccacttggccttgaaaggtgtgatctaaatccaaatgtccctatttcagcggaatgtataaagatgtcctggtttttgcagctttgtttaagactgagaaagtgagggtccgagagtctaatgaatgctctgggcacccaggccgcacctgaggagcaccgacgactgcacggtctgcggcgcgggaagcagatctgcggctgaacctctaccccaattacttagcggcgactgagcctatcgagcaggtgaagggaaggggtctgcctctccctggggtgtgtttcacagctctgctgcaggcagcatgatgcaggtgtggcaggtcttcctaaggccctgctgtctctgtgcttgtccctggggttgctgtggtgcccattatgctggcttccaggaagctttcagccactccctttcccaggccttcttcagaggcaaggtgcaggagcatgtctaacaatttaggactttgtatttgacatcagcttcgcatgggcatatcctgtctctttaaagagatggttcttagagggggaaaatgggaaccctccctactcttataccagcctcctcagtgactgccagcacagtgggctctggttccatgccactggctcaggaccttatgatttgggcataaagtcagaagactgaggaggaagactgtacaaatggttcccactcagaggggctggaaggaaggagagaatttggaagagcagcaagaaaagggctctgtgagcttaaatggagaatcaggccaaggcacagctgagggacacaagtcatctgcccaactagagctgtgggacccctcaagggaggcctcaagtgccagacttggggacttgccatttgtcctatagggcagtgcacattagaccacctgagaagcatgctgaaaatgcagattcatgctcttcaccccgagagtctgactgtgggtttggagagggacctgggtatctgtactttaaatgagtttgctgggtagttctgctgtgatggtcagaggactgccttggggaatgctataagcctatccatccatttcccagggatcccctggaattggccctctgggcacctgccctctaaacatcctctccctctctgcagttttccatggacacagcctagcagaaagacgcagccttcgtgcttcgctgactgctgaccactgacccaccgccttgatgacagcaccctcgtgtgccttcccagttcagttccggcagccctcagtcagcggcctctcgcagataaccaaaagcctgtatatcagcaatggtgtggccgccaacaacaagctcatgctgtctagcaaccagatcaccatggtcatcaatgtctcagtggaggtagtgaacaccttgtatgaggatatccagtacatgcaggtacctgtggctgactcccctaactcacgtctctgtgacttctttgaccctattgctgaccatatccacagcgtggagatgaagcagggccgtactttgctgcactgtgctgctggtgtgagccgctcagctgccctgtgcctcgcctacctcatgaagtaccacgccatgtccctgctggacgcccacacgtggaccaagtcatgccggcccatcatccgacccaacagcggcttttgggagcagctcatccactatgagttccaattgtttggcaagaacactgtgcacatggtcagttccccagtgggaatgatccctgacatctatgagaaggaagtccgtttgatgattccactgtgagccatcccacgagcccctgcattggagtcagaggtacagatctattgttgatcttacaccaagatccaaacttgaacattctacttttgttgatacagaaaaaaacagatgatgccttttatgagcacaaaaaagagttgctgtagcttttaactttataatccattttttttaagattaaactaattgtgagatggtgaagataaattttctgccctgtgagtgacactggccaggggataggttgaggcagatggtgcccagaagaaagagggcagcacccattgcacatggcaggcctggaatcctgcagccctccccaaaaacagattgacccaggaatgaatctgctacaattccacctcattctttcacacccagagccagagccttaagcatcatggtacctcttgcgcttcttacagtgagtgccaatctactagataaatggccttcaggcagtgctccaggaatcctggggggtcccaggccacctctgcttccaccttcactataagtggcccagttctggttttctagattgtacttatgcataagatagtttttaaagaaagcattccactgtgtaaatttttttttgtctttttttgaaactgtcctgctctgtcacccatcctagagtgcagtagtgtgatcatggctcactgtagccacaacctctcaggctcaagtgatcctcttaccttagcctcctgcgtggctgggactacagatgtttgccaccatgcccgcctcattttttttctttttttatagagatgagattttactatgtcgcccagactggtctcaaactcctggcctcaagcaatcctcacgcctcagcctcccaaagtgttgatgagccactgtaccccgataccactgtataaaaaatttaaaaaaaattgtgagtgctattgtacatggcaaagtttcaaagagctcttggccatccctcaccaaactttggcaaaagatggtgttagtccccttctccagggcacatgagaaaaacaggcctaacatcaggtctcagcggttcctctcacaggccttggcttggaaggctggagcttcggaccaaggcccagccctgtcacctcctcttcatgtgatgtggacccctgggagcatcagtgtcctcatctgtccaatgacagcccttttctcacagagttattgtgaagattcaacaatttcttggcatagtgcctggcacatggtgtgtgcttagcgcaaatggcagctctcatcatgaatgatagactctttcaccctgctggtcccaggtcggcacacacatccccataatggcatttctcctttctgtgcacagcactttattgttacaaagtactcttccaaaaagttaccctgtgtgtaaaaaaaaaaaaaaaaaaaaatggtttaagtcctttcagaccctacctcacaggaggcctagacttagagccttttgagagcttccgtcttgtttaatctaggtgcaatctagaggtcctgaaacaaggagcacagttccagcttcccccaatcacttctaaacagtgactgcagccttgtttagaatcactatgaaaacctgcaccccggctgactactgggatccataagggggccgtgtcaaagggactaactagtggactccatcagtaggccctggaattcaggattgttcacatcctcttggtgccaaggacctggctgaagaccagctcttctgatccagaggttttcagcaaacagcatttgaaacaaaagcacagctgctctgtttgacaccaaactgtggctccagattccagtagaagccaaatgctttttcttttaacagctgggtgcctgtaatcccagttacttgggaggctgaggcaggagaattgcttgaacccaggaggcggaggttgcagtgagccgagcttgcaccattgcactccagcctgggcaacaagagtgagactccatctcaaaaagaaaaaaaaaaaaaaagaaaaagaaaagaaaaaaagaaatgcttgggaccagaaatattttggattattttcaggttaatatttgctttacctgaagcaaatattacttgagcatcccaactctaaaatccagaatgcttaaatgagtatttcctttgatagtcatttcagctctcaaaaagttttagattttgagcatttcacatttttggatttgagatccatgaatgggtctcaaactatatttcacttggcgggggggtggctattgtagattttttttccaattgctcattattagtatatagaaatacaattgaggccgggcgtggtggctcatgcctgtaatcccaacactttgggaggccgaggtggccagatcacttgaggtcaagtgttcgagaccagcctggccaacatggcaaaagccttgtctctgctaaaaatacgaaagcagggcgtagtggcaagtgcctgtaatcccagctactgagattagagaatgaaacaggagaattacttgaacccgggaggcagaggttgcagtgagccaagatcaggacattgcactccagcctgggcaacagagcaagactccatctcaaaaaaaaaaaaaaaattgttctatgccttctggcctccatggttttttctcagaaatccagaggcattctaactattgtttcccaacaggtaatgctttatttttccccagctgctttttaagattttctccttgtctttggttctcatcagtttaattatgatgtatatggacatggatttctttcggttatccttatcagagttcacagagccacttgattgtgtttcagatatctgggaagttctcagctatgatttcttcaagtattgttttctgtaccatactgtcctgtacttctgtgtcattgataacatgaatgttagagcttttgacattgtccgtgaattcctgagactattcattttttaaaaaattttctctaggtgggtgtggtggcatgcacctgtagtcccagctatttgttggggctgaagtgagagatcacttgagcccaggagggaggtcaaggctgcagtgagccaagatcgtgcctctgctctccagcctgagtgacaaagtgagactgtgtttc

SEQ ID NO: 1736 - DNA, 314 bp, Homo sapiens
caaacttagtggcttaaaacaacatccatatattttctcacaatttctataggtcagaagcttgattggacttgactaggtcctctgcttagagtctcacaaggtccaaatcacgtttcatacggccaaaaccaaatgtgtttttccctggaggctctgaggaagaatctgcttccacattcatttgggttcttggctgaatttagtgtattgcagttgcagggtagaggaccctgttttcttagctgtcagctgggggttggccttttctctgtagaagctgcccacattctggtgctttctacgtgtgcccc

SEQ ID NO: 1737 - DNA, 384 bp, Homo sapiens
ctcccttgcgggtccgagagtctaacgaaggctctgggcacccaggccgcacctgaagagcaccaacgactgctcggtccgcggcgcgggaaggagatgtgcggctgaacccctacgccgattacttagcggcggccctatcgagagggtggttcgagcccgaggtggcgccggtcccgtaaatcgtggaggatctcaggtcccctgtgaccaagggcgtagtcagctgtgtcatggcggcttccctgttcgagaaacagttggaaactggaggccggttgggagtcatggtcgttgggcgcacggaggccggttggaagccatggtcgttgggcgccaggaggccggttgagagccgtgctcgttggacgcgcgcagacctgg

SEQ ID NO: 1738 - DNA, 7911 bp, Homo sapiens
gcaacaagatgatcttggggcagctttccagacgtggatggacaccagtggagcactcaggccagaggtatctccaggggctctccccatgtgggatcccttcctgggagaaacgcaaatagataatggcccacatgtggtcagtgccttccatgtggcctgcatggagcatttcagagtcctggtcttggtggcatctcgcatccacaaatgggggtttgtactgaaactcagaatgggcagtgagtccaaggtcccatggccagtgcaggcagagcaaggccagaaacaggccctgaacccttgagctttctccggaggcctctcagagtctccaagctcttgctggctggagtcagggggagaagcttgcctgggcccagagcccgcagcagcttcccagagctcatccccacgtttcttcaggagtaagaagctcatggttagctcgtggggctctgctaagaacctgccctgtggttaactcagctgtaagactccaggctgagaagggagtcccatgtcctctagtccagcctcggtcaggagccccctttgcagccttgcctccttcacatgacagggaacttactgcccccagctcaaacctcctatgaacatttcggtttgttccctgtgctggatgctgagacagatggatggccagtcacagccttgactttcagagggctcacagtctagggtggaggacagcatggatgagccccttaccatctgtccggggaggtcagtggaaagagaggggaacactcaggatccagtgcggctggagaagggaagcgtttccttccatccctagaagccagtgatgccgcacaggagagcgctgacctgcaacatccttaacatgatgaaggaaagtggctccgtttatcaagcacctcctacccactctgcattggcggtagaatagaggcttatttctcgtgcacgtaaaagttaattggcttgttgatgagagaccttggctacctgccaggggctctgccctcttcctctcccacacgtggctcccaaggtcactccacaccagggggaggcaccaccggggaaagagagtgtagagaattgtgcaggagggtctctgggccaggcctctatggggctagcatcgctccacttccatcccgttggctagagcacaaataaggctgaagatgtagtctgtccaggcagaagaaatggattgggtgagcggctgctggtctctgacacacgttcacacatgcgtgcacacacacacgtgacctccgccacccccagtggaaggagggtttatttagctctgatttgtagctctggaagctgaggcttaagggagaattctggccagggtaaccctgaatggccggctgtttagcatctgtggtcccctcctgccccctagtggagatctgctccttctctgagctgaagtcctcctcccagcacttgtgcctgctggccccagtcccgtctcctggtgcctcacagagaccctggctcccaccctaggggagcccagtgggggctgtgtgacccccaagtcagctccccccagcacctccccttcctccacaggctctttgcagatagagattgggccgctgccgagtgtcccacgcaccctcgcctacctcattcacggggctctgcctgtcccatatcagagaacatggtctgaccctgagctcttttcaagcctctgagccattgtgatagcctctcctcctgcactttgtccctggcccgttttcttgtctgcaaaataaagagaaacccaacccgtgctctagccatgaccgtggaaccgagatacctcccaggttgtgagaactgggggctgtggaggcttgaaccccaggctggaccaggaccctaaggtcccaatgaccaccctctcctcgtgacagagttacagctatccagaccggctggtactggaccagggaggagagatctttaaaaccttacactacctcagcaacctcatccagagcattaagacgcccctgggcaccaaagagaaccccgcccgggtctgcagggacctcatggactgtgagcagaagatggtggatggtgagaaggcttcctgccgggggtgggtgcgcctggcggtggggagctggggcaggtggagtatttgatttccgccgcattttggctgagtttttgtcctcagcaagacagatacactggcagtcatttattcactcagcagtcacagagcctcacaatataccaagatccgcatgctggggatgaccatttcagtgcaaagagacaagagctctggcagaaaaagctcctgaggctgtaagagtccccacccccggggcccatcctgtcacaggctcccgggtgagccaggattttccccctttctgagcatgaggactctgctctctcatctgtgagctgatgtggtgctgtgaaggacaagctgcggagccagacagacctgagttccaatgtcagttctgcctcagacttggtctgtgagctggggcaagccacggccccatcccgagctgcccttgcctcctctgcacaagcggctgggactagatggctggttgttccactcttgagctgcaaaggttttggcttcctgagaagcccagtggggaagctagatgtaagcagcagcgctggctgatggggtgggagacctgactcctaccctcccccggcaggccctaggaggagccctaggcctcgaagaatccattcaactaggtgatcccccaaacccttgtgcaagtgacccagcctctctcaatgtcagttgtcttctctgtaaaatggatacatcccagtagcaacataggcaagtacttagccatgtgacccctcctctgggggctctgccagttgtgagctctgcccagaaggtttccttccatctcggttggaggaatcccttttctgctcacccaacctgacttcatgctcacctggggctcggcaggtcacaagatgcagggtccatctacagaaccaaggaatgggctcatcccccagatacatacatcacctccatcccacgctgcctgcaggtacctactgggtggatccaaaccttggctgctcctctgacaccatcgaggtctcctgcaacttcactcatggtggacagacgtgtctcaagcccatcacggcctccaaggtacccatcagctcccacactgcccaccaggctgtctgcctctatccccagcctgccctgggccacaaccaacccaggttctgttctgagctgtgcctgtcttactgcatgcccttgggaaagttatcgcctccttccgagactcagtttccttatctataaattgggagtgagtaggactaatttgtaaccacaaaccctttcgagtcatatgatgctgatgattctttcttcaaatagaatcttctgcctaatatctaaagcagagcagttggccaagctggcctggcttgtggaactatgaatcatcagcatgaaataaaagagaaaactagcatgatgctcatctgaagcatgttgtgtgaattatgtatgcgaatacttaactcatgttcaatgcctgcgtaccacgtgcctgtttctgggttgagcattttaggtggtacagggccactcaacaacaaaccaaggcaggtggcagcatgagacctgacagctccctcgcccagggatcctcagtggattgtgggtctgtagttccactaagccttccgaatttgggggcaatttatgccacagtgagaagctgctccgactgcgggggaaaggaaccctcccatttcatcagccacatcccctaggagatgccttgtgctgactgggtcagactggcagtttgagaatctctaggagaggcagccagccagtcgccaggtctttgttgggtccctatcatgtgccaggccctgagccaggacggggaggtcagactcgaaactcccctgcggccagagctcacagtccagcagggacttggtgacctccacaggctctcttccctggtgactcaaaggttttgggatcacgcagcaaacctgcctagcagaggggtgaggctggagttggcgcctgggttggtggcatgaatgcccaactgggtcaccttctccatcagaaacaatggcagggagaggccctggctctgtgtgggaaagtgctgaagccacaaatcctgccatgttgtttgctctcaggtctgccatttccggcagcaccccatcgcacctcacagggatcttgggacttaggaagggtctcgaaaacacctctcatttcctctgcattccataagcctcttagtcttgggcaaaaccctctccctcgctgagctcctggatcctagctcagcccaaagaccccccatacagtaagggagtggatcagatggcaccaagatctttgaagctctggctctggagtcaggcaggcccttcccacttacgcagccaagaacctgtaagaccagctcacgcagacctcagtttccccgtctatcaagtgggcacatgtctgggagcatatcaggaaatgcttgccaggaaggggcctatccctgttccctccatagagaggcagggaaccctcggtgtgggggggtgtggggggcagcctgagccgctcactgccgttgcttctctataggtcgagtttgccatcagccgggtccagatgaatttcctgcacctgctaagctccgaggtgacccagcacatcaccatccactgccttaacatgaccgtgtggcaggagggcactgggcagaccccagccaagcaggccgtacgcttccgggcctggaatggacagatttttgaagctgggggtcagttccggcccgaggtgtccatggatggctgcaaggtaactctcagagcccctcctaggcccttcatgtggggacaactggaaaaacacttgtttggaaaaatgtgtttctattataagattatatctaacattttaatagtatactatattaatgtgatagatatgatttcatctttgtgtaatataacagttttctaaaatcgtttttactcactttcctctctgggaagctatgaggggaggtctgggctggtaaaaattctttgggctagtagatgttgtacttacttgcaaggctctttcaaagaagatacatttcttcttcctgctcccaccctagtcaggctaatttcttctcattatattttttggtcattttcaaatgtcctgaacagggtgggttgtcaggggaggggaagacagaaagttgagaaaaggcaaaaatcagttttataagactaaacaaaactaataatactacacagtgttcatgaggatgtggggaaaccaacaatctcgcatgaagctgttggaagaaaataaattggtagaggctttctggatagcagctctaatatatatccaaaaccttagaaatgtacttattttcaggggagctaagctatgaagacacaaaggcataagaatggtacaacggaatttgaggacttagggaaaagggtgggagaggggtgagaggtaaaagactacacattgggtaccgtgtacactaaagaacttattcatgtacccaaaccccacctgttccccaaaaacttattgaaaaaataaattaaaaaatatatatatatgtatatgagatgtacttgttttttggtctagcaatctagaacaatccttctagaatttgttctagggaaataagaatgcacacaaaggtttagttacagtgatgttcatgacagcattacttacaagaataaaaagagtggaagcaatctaaatgtgccatataggtcattgctacaatgaaatacagtatagccattaaaaattgtgaggaaagatggaagggaaaatgctcatgatgtatgataagaatcacgatggatgtacgtgtgcacttttccttctgccttcaggtccaagatggccgctggcatcagacactcttcaccttccggacccaagacccccaacagctgcccatcatcagtgtggacaacctccctcctgcctcatcagggaagcagtaccgcctggaagttggacctgcgtgcttcctctgacctctgacctcgtggccactctaggcctcatggaggagggaagaggaagaggcaaggggagggtactgaggggcagatggctccaggagaggcagctcccctgcccaagggtccttgggcagaccccagctgttgtctgcccagtagaagtgggtgggggtaggaggggatagggtgtccttgggaacaatggatcccagcttagccccaaagaccaaccaaagagccagccagagtaagctggacctgcaacctgcctgagccccgtggcctctcagctctgcggccaccccgttccctccccagcttcctgcccaaagagccccacattcaagccaacttgagggaaaggggcgtctcgtcagctggtccctgctagggagctattgatgtgcaatattagaaaggagacatgaaaaaaggagaaaaggaaagacagaagtgtatatatatattatttaaacaaacaaaaagaaggtgcgttactatttttttttcacccgggaaagaggtgagaggatgggaaggagcagccaggcgtgggaagcggcgagatcctcgggctgggggtgcccacgtttgctacctcccactgtgaaatcgctggtgctcacaattgtctctcacagtgtatgtgatttttttaaggaaaaaaaaaaaatccctatttaagattctgaaggtgctaccattattttgccacagactttgaagaaacttttggatgtggggcatcatccgcatctttctctctcctccaaatgacaaagtttggggaatttttgaattttcctagcatcgcccttgtgctcatcaggtaatctgctaaggaggaaaaaagaaaagaaaaaaggaaaaaaaaaaaaaaaagcaaaacaaaaacaaaaacaaaaaccctaccagaaaccagaagtagagagatttaccatataacttatggactttgaaatgtctgtccttttaaggcagcagggaggcctgggtgcgaagcatgttggcttggcccttcacggtcctggagggaggtgaggctggccttggaaggcgtgccctggagaggtcttgggtgaaaacttgaccttgaagaaaccaatcacaaaagcggcgttgggtcagggctaggcttagaggtgaagcatcaacatggaaccatctcaggaagccgcatcgcctcttccgaggtcctcacttccaggagcctgtccttgcaagatgcaatcatcgttcctgctttttcattgtcattaaattctgtagaaacccattgtcattagctccaagtgtaaatttgggtcaaggagacagaataataatgggaatctcggagttcgacaccatagtgacgttcagcgtcctctgaattgtgctacatcagcgaacaagttggcgcttgaattggattttgaggttattttaaccatggaattatttttatagaaggggaaaatgtatgtgaaagtctctatttgtgtatttctctcctaaagttgtgtctctttgggaattggatttgatttttattatttaatacctcactttggcccgtcccccctcccaacacttctgtatcctcgccctgccgccccagcctggacgctctgcgtggaagtgcgtgtttgtagcagctcgggcctcatctcagcgctcggatccctcctgctgccagaatccactggcctctgtctcattcttgggttttcctgctgtcttcgtttacgtctctgtccacatgtcagtgtattaaaaccccaatgggttccgtttctccttttcccctctggattttaaataaatatttaaaactgaggcaatggaatgaca

SEQ ID NO: 1739 - DNA, 493 bp, Homo sapiens
ggaagctgaggcttaagggagaattctggccagggtaaccctgaatggccggctgtttagcatctgtggtcccctcctgccccctagtggagatctgctccttctctgagctgaagtcctcctcccagcacttgtgcctgctggccccagtcccgtctcctggtgcctcacagagaccctggctcccaccctaggggagcccagtgggggctgtgtgacccccaagtcagctccccccagcacctccccttcctccacaggctctttgcagatagagattgggccgctgccgagtgtcccacgcaccctcgcctacctcattcacggggctctgcctgtcccatatcagagaacatggtctgaccctgagctcttttcaagcctctgagccattgtgatagcctctcctcctgcactttgtccctggcccgttttcttgtctgcaaaataaagagaaacccaacccgtgctctagccatgaccgtggaaccga

SEQ ID NO: 1740 - DNA, 5628 bp, Homo sapiens
ctaaggtcccaatgaccaccctctcctcgtgacagagttacagctatccagaccggctggtgctggaccagggaggagagatctttaaaaccttacactacctcagcaacctcatccagagcattaagacgcccctgggcaccaaagagaaccccgcccgggtctgcagggacctcatggactgtgagcagaagatggtggatggtgagaaggcttcctgccgggggtgggtgcgcctggcggtggggagctggggcaggtggagtatttgatttccgccgcattttggctgagtttttgtcctcagcaagacagatacactggcagtcatttatttactcagcagttacagagcctcacaatataccaagatccgcatgctggggatgaccattgcagtgcaaagagacaagagctctggcataaaaagctcctgaggctgtaagagtccccacccctggggcccatcctgtcacaggctcccgggtgagccaggattttccccctttctgagcatgaggactctgctctctcatctgtgagctgatgtggtgctgtgaaggacaagctgcggagccagacagacctgagttccaatgtcagttctgcctcagacttggtctgtgagctggggcaagccacggccccatcccgagctgcccttgcctcctctgcacaagcggctgggactagatggctggttgttccactcttgagctgcaaaggttttggcttcctgagaagcccagtggggaagctagatgtaagcagcagcgctggctgatggggtgggagacctgactcctaccctcccccggcaggccctaggaggagccctaggcctcgaagaatccattcaactaggtgatcccccaaacccttgtgcaagtgacccagcctctctcaatgtcagttgtcttctctgtaaaatggatacatcccagtagcaacataggcaagtacttagccatgtgacccctcctctgggggctctgccagttgtgagctctgcccagaaggtttccttccatctcggttggaggaatcccttttctgctcacccaccctgacttcatgctcacctggggctcggcaggtcacaagatgcagggtccatctacagaaccaaggaatgggctcatcccccagatacatacatcacctccatcccacgctgcctgcaggtacctactgggtggatccaaaccttggctgctcctctgacaccatcgaggtctcctgcaacttcactcatggtggacagacgtgtctcaagcccatcacggcctccaaggtacccatcagctcccacactgcccaccaggctgtctgcctctatccccagcctgccctgggccacaaccaacccaggttctgttctgagctgtgcctgtcttactgcatgcccttgggaaagttatcgcctccttccgagactcagtttccttatctataaattgggagtgagtaggactaatttgtaaccacaaaccctttcgagtcatatgatgctgatgattctttcttcaaatagaatcttctgcctaatatctaaagcagagcagttggccaagctggcctggcttgtggaactatgaatcatcagcatgaaataaaagagaaaactagcatgatgctcatctgaagcatgttgtgtgaattatgtatgcgaatacttaactcatgttcaatgcctgcgtaccacgtgcctgtttctgggttgagcattttaggtggtacagggccactcaacaacaaaccaaggcaggtggcagcatgagacctgacagctccctcgcccagggatcctcagtggattgtgggtctgtagttccactaagccttccgaatttgggggcaatttatgccacagtgagaagctgctccgactgcgggggaaaggaaccctcccatttcatcagccacatcccctaggagatgccttgtgctgactgggtcagactggcagtttgagaatctctaggagaggcagccagccagtagccaggtctttgttgggtccctatcatgtgccaggccctgagccaggacggggaggtcagactcgaaactcccctgcggccagagctcacagtccagcagggacttggtgacctccacaggctctcttccctggtgactcgaaggttttgggatcacgcagcaaacctgcctagcagaggggtgaggctggagttggcgcctgggttggtggcatgaatgcccaactgggtcaccttctccatcagaaacaatggcagggagaggccctggctctgtgtgggaaagtgctgaagccacaaatcctgccgtgttgtttgctctcaggtctgccatttccggcagcaccccatcgcacctcacagggatcttgggacttaggaagggtctcgaaaacacctctcatttcctctgcattccatgagcctcttagtcttgggcaaaaccctctccctcgctgagctcctggatcctagctcagcccaaagaccccccatacagtaagggagtggatcagatggcaccaagatctttgaagctctggctctggagtcaggcaggcccttcccacttacgcagccaagaacctgtaagaccagctcacgcagacctcagtttccccgtctatcaagtgggcacatgtctgggagcatatcaggaaatgcttgccaggaaggggcctatccctgttccctccatagagaggcagggaaccctcggtgtggggggtgtggggggcagcctgagccgctcactgccgttgcttctctataggtcgagtttgccatcagccgggtccagatgaatttcctgcacctgctaagctccgaggtgacccagcacatcaccatccactgccttaacatgaccgtgtggcaggagggcactgggcagaccccagccaagcaggccgtacgcttccgggcctggaatggacagatttttgaagctgggggtcagttccggcccgaggtgtccatggatggctgcaaggtaactctcagagcccctcctaggcccttcatgtggggacaactggaaaaacacttgtttggaaaaatgtgtttctattataagattatatctaacattttaatagtatactatattaatgtgatagatatgatttcatctttgtgtaatataacagttttctaaaatcgtttttactcactttcctctctgggaagctatgaggggaggtctgggctggtaaaaattctttgggctagtagatgttgtacttacttgcaaggctctttcaaagaagatacatttcttcttcctgctcccaccctagtcaggctaatttcttctcattatattttttggtcattttcaaatgtcctgaacagggtgggttgtcaggggaggggaagacagaaagttgagaaaaggcaaaaatcagttttataagactaaacaaaactaataatactacacagtgttcatgaggatgtggggaaaccaacaatctcgcatgaagctgttggaagaaaataaattggtagaggctttctggatagcagctctaatatatatccaaaaccttagaaatgtacttattttcaggggagctaagctatgaagacacaaaggcataagaatggtacaacggaatttgaggacttagggaaaagggtgggagaggggtgagaggtaaaagactacacattgggtaccgtgtacactaaagaacttattcatgtacccaaaccccacctgttccccaaaaacttattgaaaaaataaattaaaaaatatatatatatgtatatgagatgtacttgttttttggtctagcaatctagaacaatccttctagaatttgttctagggaaataagaatgcacacaaaggtttagttacagtgatgttcatgacagcattccttacaagaataaaaagagtggaagcaatctaaatgtgccatataggtcattgctacaatgaaatacagtatagccattaaaaattgtgaggaaagatggaagggaaaatgctcatgatgtatgataagaatcacgatggatgtacgtgtgcacttttccttctgccttcaggtccaagatggccgctggcatcagacactcttcaccttccggacccaagacccccaacagctgcccatcatcagtgtggacaacctccctcctgcctcatcagggaagcagtaccgcctggaagttggacctgcgtgcttcctctgacctctgacctcgtggccactctaggcctcacggaggagggaagaggaagaggcaaggggagggtactgaggggcagatggctccaggagaggcagctcccctgcccaagggtccttgggcagaccccagctgttgtctgcccagtagaagtgggtgggggtaggaggggatagggtgtccttgggaacaatggatcccagcttagccccaaagaccaaccaaagagccagccagagtaagctggacctgcaacctgcctgagccccgtggcctctcagctctgcggccaccccgttccctccccagcttcctgcccaaagagccccacattcaagccaacttgagggaagggggcgtctcgtcagctggtccctgctagggagctattgatgtgcaatattagaaaggagacatgaaaaaaggagaaaaggaaagacagaagtgtatatatatattatttaaacaaacaaaaagaaggtgcgttactatttttttttcacccgggaaagaggtgagaggatgggaaggagcagccaggcgtgggaagcggcgagatcctcgggctgggggtgcccacgtttgctacctcccactgtgaaatcgctggtgctcacaattgtctctcacagtgtatgtgtttttttaaggaaaaaaaaaaatccctatttagattctgaaggtgctaccattattttgccacagactttgaagaaacttttggatgtggggcatcatccgcatctttctctctcctccaaatgacaaagtttggggaatttttgaattttcctagcatcgcccttgtgctcatcaggtaatctgctaaggaggaaaaaagaaaagaaaaaaggaaaaaaaaaaaaaaaaagcaaaacaaaaacaaaaacaaaaaccctaccagaaaccagaagtagagagatttaccatataacttatggactttgaaatgtctgtccttttaaggcagcagggaggcctgggtgcgaagcatgttggcttggcccttcacggtcctggagggaggtgaggctggccttggaaggcgtgccctggagaggtcttgggtgaaaacttgaccttgaagaaaccaatcacaaaagcggcgttgggtcagggctaggcttagaggtgaagcatcaacatggaaccatctcaggaagccgcatcgcctcttccgaggtcctcacttccaggagcctgtccttgcaagatgcaatcatcgttcctgctttttcattgtcattaaattctgtagaaacccattgtcattagctccaagtgtaaatttgggtcaaggagacagaataataatgggaatctcggagttggacaccatacgtgacgttcagcgtcctctccattgtgttacatcagcgaacaagtcggcgcttgaattgatttgaggtctatttgtacc

SEQ ID NO: 1741 - DNA, 459 bp, Homo sapiens
aagcctgggaagcacaaagattgttatcttcaaaaacagcaaaagaataataattaacatatgaaaggtctgtaaccaagaaacctatgtttctctggcaagaccctgtctctacaaaaaaaaaaaaagaaaaaattagctgggcatgggggcacacgcctgtagtcccagctacttgggagcctgaggcaggaggatcacttgagcccaggaattcaaggctgcagcgagctatgacagcgccactgcactccagcctgagcaacaagcaaggccctgcttctttagaaaaataaaaaaggagaaacctatgtttctgaaacatattgaccactgaacacctttttggcataacgccaattaacaacacatggagatgactttccatgtggaaacacatggaaataacatatctccaacacatggagataacgccgattaacaacacatggagtgagc

SEQ ID NO: 1742 - DNA, 458 bp, Homo sapiens
aagcctgggaagcacaaagattgttatcttcaaaaacagcaaaagaataataattaacatatgaaaggtctgtaaccaagaaacctatgtttctctggcaagaccctgtctctacaaaaaaaaaaaagaaaaaattagctgggcatgggggcacacgcctgtagtcccagctacttgggagcctgaggcaggaggatcacttgagcccaggaattcaaggctgcagcgagctatgacagcgccactgcactccagcctgagcaacaagaaaggccctgcttctttagaaaaataaaaaaggagaaacctatgtttctgaaacatattgaccactgaacacctttttggcataacgccaattaacaacacatggagatgactttccatgtggaaacacatggaaataacatatctccaacacatggagataacgccgattaacaacacatggagtgagc

SEQ ID NO: 1743 - DNA, 353 bp, Homo sapiens
taatgctgttatgaagatgggtttgcaaatatcgttttgatttcctgcattcatatcttttggttatataccccaaagtggaactgctggatcatggtaattctatgtgtcatattttgaggaactgccatactgttttccacagtgaatgcatcattttacattcccgccagcaatggacaagggttccaatttctccacatcctgtcaacacttgttgttttccaacttttttgataatagccatcctaatggatatgcatttttatgcttttatgtattttcagaatctccttcgggaagcatgtggtatgtttataataagaaaaacaaaaattaacgttatgttttaa

SEQ ID NO: 1744 - DNA, 7809 bp, Homo sapiens
gtcctgtcatacgtggtccaatgggtaaagctccttagaactccaatggtaaccaaactgcctacatccatttgcatcttctgcaatccagggatttaaaagtaatggcttctggcaagtcatctcactacactgctggtcatctctgtaaactcgctctgtaaacggcagctgataactagctctgttccttgagggaaccaacaggtccctaaggggctctgcctcactccagtgaggttcaggagcccaaatggagtaagttccagttaagctcttcatgttctgtgctgatatgccaggcaccaggagttgtctttaacattgtacctgcaccagccaggctggccagtgtaatatttttcaattagcaaatcttccaataatagcgttttaacaatgaagatctaaagaaaaaacttgttcttaatttttgtccaaggaggggaaaaaaaaaaagaagacttctaataatcatatcatcataaattctaatgtggggaacatttggctgtgttacaaaatttgcagctaatagttaaaataaagatttaagtaaatgcctttatcaataaagtaaatgatagggcatattcttctcagccagagtcagaaatggcagcacatagccatgtgctgaattgtcacacagtgcaagtctttaaaattccttctggatttgaaggtattaacaagtccctatcaacagtctctaaaggcttttgatgtcattttagctattgaacgaaaatatgtgaactattactttgttgattttgttcttaaactaaactgcattatcatctgagagtgtgttcttaaagtattgttaaaagtactttgaaaacttgtaaatccctgtaatttatgttactcctgcctctgctgtttcattctttccttctggttttaatttgaatgtagtcctgtctgggtgtgtacctgtaaaattgtgtttttccaagtacaatttacagttctgaccttaggtttacagtgttcccaaccatctaggagcttcctcctataccacgaagtgggctttgggtcacccagctctttcatattagaactgtctaatcaaggttacttgaaacagatctaattttgacatttcttagtttatcatggaggcctagggagtaaattaagagggcttccctgcaagcccattcgttgcattgccctatttctttaaatgtacacagttgtaaacttaagactgcttcaagacaacagtctcatttatctaaacagttctccttttagactcagtggcactgatggaaacaaagataagaagtatagattggaggaaaggtcttttggagcctataactttttttgaaactgttcccattttccttagaattaccttttctttcttggacctgcctgcatacagaatagatctgtctgcattgagtgtattcagtgagctaagctaagggaagactgcagtgggcagggccttactttcttgtgagtgaactctttgcaggttttaaggaatatgactactctgctttaagggggtgtggggagcactttgttaaagcaatgtgcattctgaatccatttcataggcgtccttactccgtggcagctacacctttaatcgtggattataataacttttaaatgagtgcaaaactttcaggatcttttccttaagttgggaaatgagattttttttttctgctcttttcaagtatcacttaaattaagctctggtacggagtcaggagtctttttctttacactccttcagcatgttttccatggtactagccgacactgtgcaggtgggtgagggacaggctggggcgtttcggcagctgacctgggctgctcttccatttcaggtgatcgtgcagtccggccgccaccccacagtgctgcagaagctctgccagttgcccttccagtatttcagtgacccacggctgatcaaagtactgttcccttcacttatcgctgcttgttacaacaaccatcagaacaagatcattctggagcaagagatgagctgtgttttactggccactttcattcaggtaccttctacattatacgtaattgtctagctttgtgtgtaaactaatgcgacagaaatgtaaaagtaagccagctgtttatttttgccttccatactaccttttaaaatcttcacatatttatgtgctccaaaattgatttctaaaatatcagcatagtttctgaaatattactggaactgcgattgggtgttgtataatttctacttggaggatttcaaagaaaggatacttttctagttaatgaaatggtaacccgtactcaggaaatgtttttaaaagactgccagacttctttaaggctttaactattgtatttatcttgcttttattctaactataggaaatagataattactgaagaaagatgaattaaaattagtttatttgtacatttttaaataaatatgattttcttatatgtataaaataaaaacctgttatattgatttttttaatgtaaaacaacttttaagtacagccttatattttaaattctgtagggctagaatcagaattagtgccatagcaaagtactatttccacatctaaattaacttagtcagctgaaaaaccaagttgactatgctttaacatttgctactaactaactcatcctgtgaatttctttttgtcattatagagcattatttgctgaaaatctcccatttctttcacatgttccaccataagatgtgtttttgctccatgacacacatgtgatgagtagacagtactttctggtcttcagaataatgaaacagaaagcagagttctgtattagtattcttccatattctggtgaatatacatctatctctgtcaaaaggatatgatagtacccagctggctgggaactagaggatagctaaggagttccccgagccctcttcatcttagacaacatttcaaagtttatgttttccaaactatcctgtattagataattaataaacgcaactagatcaattatgttagaaaagttttgttttcggcttaattgttctgtttgaatctacgttttattttctggaaaaaaagttaaattagatatttagatctacaaatatggatttcaaaaactgtcttatagttaatatcttaagaaaattttacagtatataacatcatatcaacacttaggattcttcatatatttttagagccttaggattaaattaaatagaaaatacattatggaccaggtgtggtggctcacatctgtaatcccagcactttgggaggccggggtgagcagatcacttgaggtcaggagtttgcgaccagcctggccaacatagtaaaacgccgtctctgtgggcacctgtaatcccagctactcgggaggctgaggcaggagagtagcttgaacctgggaggcagaggttgcagtgagccaagatcatgccactgaacttcaagctgagtgacagagcgagactccatcaaaaaaaaaaaaaaagaaaatacaaatacattatggataattttaagagtgtgctctttctaaattcagattattcattcttttattgaacaggtaatttttgagtgtgtaaggtgtgctgggcactgcaaatacagcaacaaataaaacagataaaaattcctgccttcacagatctttcattaaagtggagaagagtcaagcaaaagacaaaaaaaaaattagtaaaacaaatagtatgtcagatactatgctaagtgctatggcaataagtgctgtggagaaaagtaaggcaggaaaaggagctagggacttcagggagatgatgtgcaggtttttatgatgtgggcagagaggcttcaacaaagagacagtgatgtttgagcgaaaccaatttcacatctgtatcagcttagttccttatgttttcaactgcatagacaatgacttataatgatacaaatgatatcaggatctaaagattatatatatttcttgtgtttatctgatattgatcacaaagtactaagtctacctttgtcttacaaaaaaaatctgtaacataaattttgtaaatgctaaaaaaaatttcttatattgtttatttcagatagcatattagacttgtagagttaaatcaagtgtttttctataaataattgtgctcaagagaatgaatatagataggattttagtttataatgtggttcctcaaggtctcttatgtgttacattataactgagttactagaaaatgatattaaaatagcagctggttgtcttaggtttctgaagatttacatattttatattacatttttcattttccatctacatgcaaaattaccagactttaagatttagctgcagaatacatagagctttcatatttgtactttttaaaaaaatgatcaacacctgttgatattttaagatagtaaatttggcttaaattttagttttattagataaaaagttgtaatttccaaagtaggcagcaagttgtcccctggtgataatttagcaagatgtaagtcattactatttatgagaacctgcactacgtaacatcagtttcttcagcgtttatatttgggccccaaaatattcatacaaaagtggttgcatgaatcagaagtatatttaaagccacccttagtgaaattctctgttcatagcattgatagaaaaacacttttctctcctcatacaggatttggcacagactccaggtcaagcggaaaaccagccttaccaacccaaaggtatgtctctattgaaattaaatttcatgtgtttgttagccaaatggacatctttcttatcctttcctctggaactgctacattatatgtaaaattttatacataacctaaaaatatttgagattcagataccaagtatatttcagtaagtaaagaaatcgattttgtcatgaagcatgaatgcatccaaatatgtatagaaatctgtgggagtaaaagaaaagcacaaatatctttgtataatttataatcatctcatgcaagatatattaaatggtaaataattactaaagagccgctttgtaatacaggagccagatcattaatactggcccacatttctcacataaatgctgaaatcacataggtttggttccttatccatgttcagaataaagttatcagtaatagtagcccacagtttccccccaagttcaagtagttgaacttttgttttgaaaataattgttttacatggagaaaaagtcatctaattggcaaagtccagggcaaaagatttacaagttgtttttttttcctatagcattcctgctggggtgtttgctgtgatcagagttagagatgtagaatttttaccacatttttacttttttaaatattctgctacccagactgtaattgagaagtacaagttgctctttgggtgttatgacagcatctctgatgaatgagaacctaatccagatcttcttcaattcttccattagtttgatagtctttaaagtggccatttagaggtacactcccagcaggaccctttagggcacccaccaagaaacccttacttggtgggggtgggggtgttaccttggactctttcacacacacacacacacacacacacacacaaagtcctctacagtggacaggtgttgaaaagtgcacagaagaaaatataactaaagctattacaatatcatgaaaagaaaaaaaaaagacgttttattgactcaggcacccagaaaagttaaacagaaagctatgcaacttttcagaaattcaagtccacatccttgtcggtaccatttgtctgagcaagaattagtctgcaagttcagttctgccctgacccagtcacagccctttttttgtttgttttgttttaactactggaggatacttggggagaaatcagcaaaatgtgttactgttcttacaaaacaatttcattttgaataaattaaaatgcttagaaaaatctaatgtatttattttcaattgtacagcagttttgttatgttttgtttgccactaagaagtataagcatttttttcttactctttctcctgatcataaagatgagtcacaatttgttacattgtctggaagacacagtcccagaagctgcctctctctgcttggtggactgaggcctgtggaagtctcaaccttctttcttttccaagggaccatcttccctgattttcatgctttcccccagttacagtaggcttaacccacagaacagcaaagggggaattggtctctcctttgctcagaaagggtcatcactatgttaatgacagctcataatatgttgcttgattttttttttaatgatgatgcctaagttgccagtttgcaccttgggtatttgttccccttttgcctagattaagtcctcataaaatgtctcaagatattttgagttcattgtccaggtaaacctttaaatataaaagcagctcttggtaataccacattcctattgcccaggaagaattttggttttcaaatacctactgcctgtctagctgcaattgtttactttacctatgtcactggccagtaaagctcctatcattcattcctactgctttgttagataggctgtgctatatttgaataattttaaagatatacttaaaactacattcatgttttaaattaaatagactttcagaaaacgtcatcatttacatacagttttcccctttcatggctaacttaaggatagaatataggactgtcattttagtttgttcttttttttgttttttgttttttgttttttttgagacagggtctctctatgttgcctatcctggagtgcaatggctactcacaggtgcgatcatagcaaactatagcctctaactcctgggctcaagcattcccccgacttcagccttccaaatagctgggactacaggcgcgcaccactgtgcttgcctggttgctaatttttttctcattgtggagtccaaaaacatctttttgtaatttatataggggttaatgtctgaatatgttaaaggacaaactggattgtggttaaaatatatgtcatatattttatactacagatagattgatacatatagatcaatcaccttatttacctaaattgtgtcatggtttatttgaagtggatatctccattttatactcagatatcaaaataagtttaatttatgaatcttcaaagaatttaaccctcttttatttaacttttttctcttttatccccctctcagggaaatgccttggttcccaagactatcttgagctggctaacagatttcctcagcaggcctgggaagaagctcgacagtttttcttgaaaaaagagaaaaaataaatgttttggttgattctgtatttgagtacccttgttaatattttaaattgtccaaacaaacattctaattgttccttaagaactcattttcccatgtttatactcttcccacactgtagatatggcatgtactttacactatttataatgactgtagatacttgaatgttctacttgctaattttgcaagttgagtttatttcatttatgcagagtatcttggagtttggtaatttccatcttatgataatatatactttgcatttgtgatatgggtgaaaggagacataaaattagcaagtctgttttgttcttgtaataaagtaacttattctgttttcattgttgacttttcatgttaaggaaatacgaatctgaaagaaaaatgttaactccagctcttgaagtatcttaaataaagacttaattaaagttta

SEQ ID NO: 1745 - DNA, 7809 bp, Homo sapiens
gtcctgtcatacgtggtccaatgggtaaagctccttagaactccaatggtaaccaaactgcctacatccatttgcatcttctgcaatccagggatttaaaagtaatggcttctggcaagtcatctcactacactgctggtcatctctgtaaactcgctctgtaaacggcagctgataactagctctgttccttgagggaaccaacaggtccctaaggggctctgcctcactccagtgaggttcaggagcccaaatggagtaagttccagttaagctcttcatgttctgtgctgatatgccaggcaccaggagttgtctttaacattgtacctgcaccagccaggctggccagtgtaatatttttcaattagcaaatcttccaataatagcgttttaacaatgaagatctaaagaaaaaacttgttcttaatttttgtccaaggaggggaaaaaaaaaaagaagacttctaataatcatatcatcataaattctaatgtggggaacatttggctgtgttacaaaatttgcagctaatagttaaaataaagatttaagtaaatgcctttatcaataaagtaaatgatagggcatattcttctcagccagagtcagaaatggcagcacatagccatgtgctgaattgtcacacagtgcaagtctttaaaattccttctggatttgaaggtattaacaagtccctatcaacagtctctaaaggcttttgatgtcattttagctattgaacgaaaatatgtgaactattactttgttgattttgttcttaaactaaactgcattatcatctgagagtgtgttcttaaagtattgttaaaagtactttgaaaacttgtaaatccctgtaatttatgttactcctgcctctgctgtttcattctttccttctggttttaatttgaatgtagtcctgtctgggtgtgtacctgtaaaattgtgtttttccaagtacaatttacagttctgaccttaggtttacagtgttcccaaccatctaggagcttcctcctataccacgaagtgggctttgggtcacccagctctttcatattagaactgtctaatcaaggttacttgaaacagatctaattttgacatttcttagtttatcatggaggcctagggagtaaattaagagggcttccctgcaagcccattcgttgcattgccctatttctttaaatgtacacagttgtaaacttaagactgcttcaagacaacagtctcatttatctaaacagttctccttttagactcagtggcactgatggaaacaaagataagaagtatagattggaggaaaggtcttttggagcctataactttttttgaaactgttcccattttccttagaattaccttttctttcttggacctgcctgcatacagaatagatctgtctgcattgagtgtattcagtgagctaagctaagggaagactgcagtgggcagggccttactttcttgtgagtgaactctttgcaggttttaaggaatatgactactctgctttaagggggtgtggggagcactttgttaaagcaatgtgcattctgaatccatttcataggcgtccttactccgtggcagctacacctttaatcgtggattataataacttttaaatgagtgcaaaactttcaggatcttttccttaagttgggaaatgagattttttttttctgctcttttcaagtatcacttaaattaagctctggtacggagtcaggagtctttttctttacactccttcagcatgttttccatggtactagccgacactgtgcaggtgggtgagggacaggctggggcgtttcggcagctgacctgggctgctcttccatttcaggtgatcgtgcagtccggccgccaccccacagtgctgcagaagctctgccagttgcccttccagtatttcagtgacccacggctgatcaaagtactgttcccttcacttatcgctgcttgttccaacaaccatcagaccaagatcattctggacaagagatgagctgtgttttactggccactttcattcaggtaccttctacattatacgtaattgtctagctttgtgtgtaaactaatgcgacagaaatgtaaaagtaagccagctgtttatttttgccttccatactaccttttaaaatcttcacatatttatgtgctccaaaattgatttctaaaatatcagcatagtttctgaaatattactggaactgcgattgggtgttgtataatttctacttggaggatttcaaagaaaggatacttttctagttaatgaaatggtaacccgtactcaggaaatgtttttaaaagactgccagacttctttaaggctttaactattgtatttatcttgcttttattctaactataggaaatagataattactgaagaaagatgaattaaaattagtttatttgtacatttttaaataaatatgattttcttatatgtataaaataaaaacctgttatattgatttttttaatgtaaaacaacttttaagtacagccttatattttaaattctgtagggctagaatcagaattagtgccatagcaaagtactatttccacatctaaattaacttagtcagctgaaaaaccaagttgactatgctttaacatttgctactaactaactcatcctgtgaatttctttttgtcattatagagcattatttgctgaaaatctcccatttctttcacatgttccaccataagatgtgtttttgctccatgacacacatgtgatgagtagacagtactttctggtcttcagaataatgaaacagaaagcagagttctgtattagtattcttccatattctggtgaatatacatctatctctgtcaaaaggatatgatagtacccagctggctgggaactagaggatagctaaggagttccccgagccctcttcatcttagacaacatttcaaagtttatgttttccaaactatcctgtattagataattaataaacgcaactagatcaattatgttagaaaagttttgttttcggcttaattgttctgtttgaatctacgttttattttctggaaaaaaagttaaattagatatttagatctacaaatatggatttcaaaaactgtcttatagttaatatcttaagaaaattttacagtatataacatcatatcaacacttaggattcttcatatatttttagagccttaggattaaattaaatagaaaatacattatggaccaggtgtggtggctcacatctgtaatcccagcactttgggaggccggggtgagcagatcacttgaggtcaggagtttgcgaccagcctggccaacatagtaaaacgccgtctctgtgggcacctgtaatcccagctactcgggaggctgaggcaggagagtagcttgaacctgggaggcagaggttgcagtgagccaagatcatgccactgaacttcaagctgagtgacagagcgagactccatcaaaaaaaaaaaaaaagaaaatacaaatacattatggataattttaagagtgtgctctttctaaattcagattattcattcttttattgaacaggtaatttttgagtgtgtaaggtgtgctgggcactgcaaatacagcaacaaataaaacagataaaaattcctgccttcacagatctttcattaaagtggagaagagtcaagcaaaagacaaaaaaaaaattagtaaaacaaatagtatgtcagatactatgctaagtgctatggcaataagtgctgtggagaaaagtaaggcaggaaaaggagctagggacttcagggagatgatgtgcaggtttttatgatgtgggcagagaggcttcaacaaagagacagtgatgtttgagcgaaaccaatttcacatctgtatcagcttagttccttatgttttcaactgcatagacaatgacttataatgatacaaatgatatcaggatctaaagattatatatatttcttgtgtttatctgatattgatcacaaagtactaagtctacctttgtcttacaaaaaaaatctgtaacataaattttgtaaatgctaaaaaaaatttcttatattgtttatttcagatagcatattagacttgtagagttaaatcaagtgtttttctataaataattgtgctcaagagaatgaatatagataggattttagtttataatgtggttcctcaaggtctcttatgtgttacattataactgagttactagaaaatgatattaaaatagcagctggttgtcttaggtttctgaagatttacatattttatattacatttttcattttccatctacatgcaaaattaccagactttaagatttagctgcagaatacatagagctttcatatttgtactttttaaaaaaatgatcaacacctgttgatattttaagatagtaaatttggcttaaattttagttttattagataaaaagttgtaatttccaaagtaggcagcaagttgtcccctggtgataatttagcaagatgtaagtcattactatttatgagaacctgcactacgtaacatcagtttcttcagcgtttatatttgggccccaaaatattcatacaaaagtggttgcatgaatcagaagtatatttaaagccacccttagtgaaattctctgttcatagcattgatagaaaaacacttttctctcctcatacaggatttggcacagactccaggtcaagcggaaaaccagccttaccaacccaaaggtatgtctctattgaaattaaatttcatgtgtttgttagccaaatggacatctttcttatcctttcctctggaactgctacattatatgtaaaattttatacataacctaaaaatatttgagattcagataccaagtatatttcagtaagtaaagaaatcgattttgtcatgaagcatgaatgcatccaaatatgtatagaaatctgtgggagtaaaagaaaagcacaaatatctttgtataatttataatcatctcatgcaagatatattaaatggtaaataattactaaagagccgctttgtaatacaggagccagatcattaatactggcccacatttctcacataaatgctgaaatcacataggtttggttccttatccatgttcagaataaagttatcagtaatagtagcccacagtttccccccaagttcaagtagttgaacttttgttttgaaaataattgttttacatggagaaaaagtcatctaattggcaaagtccagggcaaaagatttacaagttgtttttttttcctatagcattcctgctggggtgtttgctgtgatcagagttagagatgtagaatttttaccacatttttacttttttaaatattctgctacccagactgtaattgagaagtacaagttgctctttgggtgttatgacagcatctctgatgaatgagaacctaatccagatcttcttcaattcttccattagtttgatagtctttaaagtggccatttagaggtacactcccagcaggaccctttagggcacccaccaagaaacccttacttggtgggggtgggggtgttaccttggactctttcacacacacacacacacacacacacacacaaagtcctctacagtggacaggtgttgaaaagtgcacagaagaaaatataactaaagctattacaatatcatgaaaagaaaaaaaaaagacgttttattgactcaggcacccagaaaagttaaacagaaagctatgcaacttttcagaaattcaagtccacatccttgtcggtaccatttgtctgagcaagaattagtctgcaagttcagttctgccctgacccagtcacagccctttttttgttttgttttgttttaactactggaggatacttggggagaaatcagcaaaatgtgttactgttcttacaaaacaatttcattttgaataaattaaaatgcttagaaaaatctaatgtatttattttcaattgtacagcagttttgttttgttttgtttgccactaagaagtataagcatttttttcttactctttctcctgatcataaagatgagtcacaatttgttacattgtctggaagacacagtcccagaagctgcctctctctgcttggtggactgaggcctgtggaagtctcaaccttctttcttttccaagggaccatcttccctgattttcatgctttcccccagttacagtaggcttaacccacagaacagcaaagggggaattggtctctcctttgctcagaaagggtcatcactatgttaatgacagctcataatatgttgcttgattttttttttaatgatgatgcctaagttgccagtttgcaccttgggtatttgttccccttttgcctagattaagtcctcataaaatgtctcaagatattttgagttcattgtccaggtaaacctttaaatataaaagcagctcttggtaataccacattcctattgcccaggaagaattttggttttcaaatacctactgcctgtctagctgcaattgtttactttacctatgtcactggccagtaaagctcctatcattcattcctactgctttgttagataggctgtgctatatttgaataattttaaagatatacttaaaactacattcatgttttaaattaaatagactttcagaaaacgtcatcatttacatacagttttcccctttcatggctaacttaaggatagaatataggactgtcattttagtttgttcttttttttgttttttgttttttgttttttttgagacagggtctctctatgttgcctatcctggagtgcaatggctactcacaggtgcgatcatagcaaactatagcctctaactcctgggctcaagcattcccccgacttcagccttccaaatagctgggactacaggcgcgcaccactgtgcttgcctggttgctaatttttttctcattgtggagtccaaaaacatctttttgtaatttatataggggttaatgtctgaatatgttaaaggacaaactggattgtggttaaaatatatgtcatatattttatactacagatagattgatacatatagatcaatcaccttatttacctaaattgtgtcatggtttatttgaagtggatatctccattttatactcagatatcaaaataagtttaatttatgaatcttcaaagaatttaaccctcttttatttaacttttttctcttttatccccctctcagggaaatgccttggttcccaagactatcttgagctggctaacagatttcctcagcaggcctgggaagaagctcgacagtttttcttgaaaaaagagaaaaaataaatgttttggttgattctgtatttgagtacccttgttaatattttaaattgtccaaacaaacattctaattgttccttaagaactcattttcccatgtttatactcttcccacactgtagatatggcatgtactttacactatttataatgactgtagatacttgaatgttctacttgctaattttgcaagttgagtttatttcatttatgcagagtatcttggagtttggtaatttccatcttatgataatatatactttgcatttgtgatatgggtgaaaggagacataaaattagcaagtctgttttgttcttgtaataaagtaacttattctgttttcattgttgacttttcatgttaaggaaatacgaatctgaaagaaaaatgttaactccagctcttgaagtatcttaaataaagacttaattaaagttta

SEQ ID NO: 1746 - DNA, 6055 bp, Homo sapiens
agctaagggaagactgcagtgggcagggccttactttcttgtgagtgaactctttgcaggttttaaggaatatgactactctgctttaagggggtgtggggagcactttgttaaagcaatgtgcattctgaatccatttcataggcgtccttactccgtggcagctacacctttaatcgtggattataataacttttaaatgagtgcaaaactttcaggatcttttccttaagttgggaaatgagattttttttttctgctcttttcaagtatcacttaaattaagctctggtacggagtcaggagtctttttctttacactccttcagcatgttttccatggtactagccgacactgtgcaggtgggtgagggacaggctggggcgtttcggcagctgacctgggctgctcttccatttcaggtgatcgtgcagtccggccgccaccccacagtgctgcagaagctctgccagttgcccttccagtatttcagtgacccacggctgatcaaagtactgttcccttcacttatcgctgcttgttacaacaaccatcagaacaagatcattctggagcaagagatgagctgtgttttactggccactttcattcaggtaccttctacattatacgtaattgtctagctttgtgtgtaaactaatgcgacagaaatgtaaaagtaagccagctgtttatttttgccttccatactaccttttaaaatcttcacatatttatgtgctccaaaattgatttctaaaatatcagcatagtttctgaaatattactggaactgcgattgggtgttgtataatttctacttggaggatttcaaagaaaggatacttttctagttaatgaaatggtaacccgtactcaggaaatgtttttaaaagactgccagacttctttaaggctttaactattgtatttatcttgcttttattctaactataggaaatagataattactgaagaaagatgaattaaaattagtttatttgtacatttttaaataaatatgattttcttatatgtataaaataaaaacctgttatattgatttttttaatgtaaaacaacttttaagtacagccttatattttaaattctgtagggctagaatcagaattagtgccatagcaaagtactatttccacatctaaattaacttagtcagctgaaaaaccaagttgactatgctttaacatttgctactaactaactcatcctgtgaatttctttttgtcattatagagcattatttgctgaaaatctcccatttctttcacatgttccaccataagatgtgtttttgctccatgacacacatgtgatgagtagacagtactttctggtcttcagaataatgaaacagaaagcagagttctgtattagtattcttccatattctggtgaatatacatctatctctgtcaaaaggatatgatagtacccagctggctgggaactagaggatagctaaggagttccccgagccctcttcatcttagacaacatttcaaagtttatgttttccaaactatcctgtattagataattaataaacgcaactagatcaattatgttagaaaagttttgttttcggcttaattgttctgtttgaatctacgttttattttctggaaaaaaagttaaattagatatttagatctacaaatatggatttcaaaaactgtcttatagttaatatcttaagaaaattttacagtatataacatcatatcaacacttaggattcttcatatatttttagagccttaggattaaattaaatagaaaatacattatggaccaggtgtggtggctcacatctgtaatcccagcactttgggaggccggggtgagcagatcacttgaggtcaggagtttgcgaccagcctggccaacatagtaaaacgccgtctctgtgggcacctgtaatcccagctactcgggaggctgaggcaggagagtagcttgaacctgggaggcagaggttgcagtgagccaagatcatgccactgaacttcaagctgagtgacagagcgagactccatcaaaaaaaaaaaaaaagaaaatacaaatacattatggataattttaagagtgtgctctttctaaattcagattattcattcttttattgaacaggtaatttttgagtgtgtaaggtgtgctgggcactgcaaatacagcaacaaataaaacagataaaaattcctgccttcacagatctttcattaaagtggagaagagtcaagcaaaagacaaaaaaaaaattagtaaaacaaatagtatgtcagatactatgctaagtgctatggcaataagtgctgtggagaaaagtaaggcaggaaaaggagctagggacttcagggagatgatgtgcaggtttttatgatgtgggcagagaggcttcaacaaagagacagtgatgtttgagcgaaaccaatttcacatctgtatcagcttagttccttatgttttcaactgcatagacaatgacttataatgatacaaatgatatcaggatctaaagattatatatatttcttgtgtttatctgatattgatcacaaagtactaagtctacctttgtcttacaaaaaaaatctgtaacataaattttgtaaatgctaaaaaaaatttcttatattgtttatttcagatagcatattagacttgtagagttaaatcaagtgtttttctataaataattgtgctcaagagaatgaatatagataggattttagtttataatgtggttcctcaaggtctcttatgtgttacattataactgagttactagaaaatgatattaaaatagcagctggttgtcttaggtttctgaagatttacatattttatattacatttttcattttccatctacatgcaaaattaccagactttaagatttagctgcagaatacatagagctttcatatttgtactttttaaaaaaatgatcaacacctgttgatattttaagatagtaaatttggcttaaattttagttttattagataaaaagttgtaatttccaaagtaggcagcaagttgtcccctggtgataatttagcaagatgtaagtcattactatttatgagaacctgcactacgtaacatcagtttcttcagcgtttatatttgggccccaaaatattcatacaaaagtggttgcatgaatcagaagtatatttaaagccacccttagtgaaattctctgttcatagcattgatagaaaaacacttttctctcctcatacaggatttggcacagactccaggtcaagcggaaaaccagccttaccaacccaaaggtatgtctctattgaaattaaatttcatgtgtttgttagccaaatggacatctttcttatcctttcctctggaactgctacattatatgtaaaattttatacataacctaaaaatatttgagattcagataccaagtatatttcagtaagtaaagaaatcgattttgtcatgaagcatgaatgcatccaaatatgtatagaaatctgtgggagtaaaagaaaagcacaaatatctttgtataatttataatcatctcatgcaagatatattaaatggtaaataattactaaagagccgctttgtaatacaggagccagatcattaatactggcccacatttctcacataaatgctgaaatcacataggtttggttccttatccatgttcagaataaagttatcagtaatagtagcccacagtttccccccaagttcaagtagttgaacttttgttttgaaaataattgttttacatggagaaaaagtcatctaattggcaaagtccagggcaaaagatttacaagttgtttttttttcctatagcattcctgctggggtgtttgctgtgatcagagttagagatgtagaatttttaccacatttttacttttttaaatattctgctacccagactgtaattgagaagtacaagttgctctttgggtgttatgacagcatctctgatgaatgagaacctaatccagatcttcttcaattcttccattagtttgatagtctttaaagtggccatttagaggtacactcccagcaggaccctttagggcacccaccaagaaacccttacttggtgggggtgggggtgttaccttggactctttcacacacacacacacacacacacacacacaaagtcctctacagtggacaggtgttgaaaagtgcacagaagaaaatataactaacgctattacaatatcatgaaaagaaaaaaaaaagacgttttattgactcatgcacccagaaaagttaaacagaaagctatgcaacttttcagaaattcaagtccacatccttgtcggtaccatttgtctgagcaagaattagtctgcaagttcagttctgccctgacccagtcacagccctttttttgttttgttttgttttaactactggaggatacttggggagaaatcagcaaaatgtgttactgttcttacaaaacaatttcattttgaataaattaaaatgcttagaaaaatctaatgtatttattttcaattgtacagcagttttgttttgttttgtttgccactaagaagtataagcatttttttcttactctttctcctgatcataaagatgagtcacaatttgttacattgtctggaagacacagtcccagaagctgcctctctctgcttggtggactgaggcctgtggaagtctcaaccttctttcttttccaagggaccatcttccctgattttcatgctttcccccagttacagtaggcttaacccacagaacagcaaagggggaattggtctctcctttgctcagaaagggtcatcactatgttaatgacagctcataatatgttgcttgattttttttttaatgatgatgcctaagttgccagtttgcaccttgggtatttgttccccttttgcctagattaagtcctcataaaatgtctcaagatattttgagttcattgtccaggtaaacctttaaatataaaagcagctcttggtaataccacattcctattgccccagaagaattttggttttcaaatacctactgctgtctagctgcaattgtttactttacctatgtcactgcccagtaaagctcctatcattcattcctactgctgtgttagataggctgtgctatatttgaataattttaaagatatacttaaaactacattcatgttttaaattaaatagactttcagaaaacgtcatcatttacatacagttttcccctttcatggctaacttaaggatagaatataggactgtcattttagtttgttcttttttttgtttttggttttttgttttttttgagacagggtctctctatgttgcctatcctggagtgcaatggctactcacaggtgcgatcatagcaaactatagcctctaactcctgggctcaagcattcccccgacttcagccttccaaatagctgggactacaggcgcgcaccactgtgcttgcctggttgctaatttttttctcattgtggagtccaaaaacatctttttgtaatttatataggggttaatgtctgaatatgttaaaggacaaactggattgtggttaaaatatatgtcatatattttatactacagatagattgatacatatagatcaatcaccttatttacctaaattgtgtcatggtttatttgaagtggatatctccattttatactcagatatcaaaataagtttaatttatgaatcttcaaagaatttaaccctcttttatttaacttttttctcttttatccccctctcagggaaatgccttggttcccaagactatcttgagctggctaacagatttcctcagcaggcctgggaagaagctcgacagtttttcttgaaaaaagagaaaaaataaatgttttggttgattctgtatttgagtacccttgttaatattttaaattgtccaaacaaacattctaattgttccttaagaactcattttcccatgtttatactcttcccacactgtagatatgg

SEQ ID NO: 1747 - DNA, 8993 bp, Homo sapiens
aggtggcacaagatctctgtaaagtagcaggcatagcaaaagttctggtggctcagcatgatgtgtacaaaggcctacttccaggtgaggttttccagtagaaaaaaatgtagtgtctaaattacgcttgaatatatgaatatgaaagtatttcaaaatatttttttatcaaatgtgtttaattctcagaggaactgacaccattgattttggcaactcagaagcagttcaattacacacacatctgtgctggagcatctgccttcggaaaggtgagaaggttgagaatgtggaatctgatatcactgcttgaaagggttagatttcattgtgctgaaagtatgcaacagactgtttatgtagccaatctggatttatctgaattgatgtggtagttttgctaaaatttattctttcaagattttgtcataattttccgttaaaactaccatttccaggttttcaaattatgttgtggagaaaactctaattaggctattattttaaaattttctgcatgtaaaagtaatgctgaattctgcttgcatgtgagagagagagtgaacgagcaagagtcatttctattagtagcccattttaagagatggtttatttggatggctgatggatatctagaaaagccaaattttatctacgtagggaatttggaaagggcttgtggtggttgaagacatccttaaggtaaagaaagctgtaatctgatcatgtgcattgtgatgtgtctgaagaatgagtgtgttataagatggatagcagtctacataaagttaaaaatggagggaggagtgtaatgggagcttaagacaaggaattcgtcagtggatttttcttgctctctctctgtggccgtgggtgttatcttagctctcttttcttttgttccattcttaataaggtgtcatttttagtctttatttttactttcttttttttgagatggagtctcactgtcgcccaggttggagtgcagtggcgccatctcggctcactgcaggctccgccccccggggttcacgccattctcctgcctcagcctcccgagtagctgggactacaggcgcccgccagctcgcccggctaattttttgtatttttagtagagacggggtttcactgtgttagccaggatggtcttgatctcctgacctcgtgatccgcccgcctcggccccccaaagtactgggattacaggcgtgagccaccgcgcctggcctactttttttttttttttttttcgagatggagtcttactttcctcgcccaggctggagtgcagcagcacaatctcagctcactgcaacctctacctcctgggttcaagccattctcctgcctcagcctcccgtgtgtagctgggattataggtgcgtgccaccacacctggctaatttttgtatgtttagtagagacagggtttcgccgtgttgaccaggctggtctcgaactcctgacctcaggtgatctgcctgcttcagcctagctctgttgcccagactggagtgcagtggcacgattgtagctcaacataccctccaacttgtgggctcaaacgatcctcctatcctagccttctgagtagctaggactacaggtacatgccaccatgcccagctaattttcaaattttttgtatcgatgtagtctccctatgttgtgcgggcttgtcttaaactcctggcctcaagtcatcctctcatttcagcctcccaaagtgctaggattacagacataagtcactgtgcttagcctattttcacttttaaaaattgtaaaataagttgtacacaaatacatccttattaggaagactgcgtgtagtacagcagtgtgcagagcaaggtgtcaaagtcctgctttcttattcccaactcaccctcccctctttagaagtatagctgttaacaattgtacattcttttaggcctccttctatggatttttaaattacagtacatgtacagctatatattttttacttctaaaatgggataatatggcatgaattgttttgtgaatagtagcttttacttaagagtatgacttgggcagggtgcggtggctgacgcctgtaatcccagcactttgggaggattgtctgagcccaggagttgtagcccagcctgggcaatacagtgagatctcatctctacaaaaaaatgaaaaaaaaaaattagctgagtgtggtggtgcatgcctgtggtcccagctacttgggaggctgaagtgggagaattgcttgagcctggaaggttgaggctgcaatgagctgagattacactgctgcactccagcctgtgctccagggtgacagagcaacaccctgtctcaaaaaaaaaaaaaaaaaaaaagagtagcgactttggctcataatgtttctctttttttatggctgcataagattccatgtttagctaaggacagttaacttggttccagttttttgcatttatatactttactgcaagaaaacatggtcatgcatgtatctgtgtaaacatgggctggaatttatttacaatagagttctagaggtgaaatcactgagtcaaatgctatgtagtttaaaaattttgatacctattacttaattgtcaacacttggtagtatacattttaacattttttcctccagtctgatgggtgaaataatctttgtggaccgttctgtctctgagagttttgattatatattggatgatttaaataatttcatgagccttgagtttccttctatgatgacagttcacctaacagagtgttagaccatgaaagggtgtttgtcattagctagattttagtactctggccatgattgctatgttgtaacagatgggagttttgagaataagggtcacataatagtagctggtcgtgcggcctgtaaatgggtttggaatgagaaacgtctatcagaagaagccaaacaatttgctgtatgatagtccttcaccagctgtggttttgagataacacacttttatacttgtctgctagaattttaaaatatgtcattttttatgcacaaaaagaactcaattattgcttcttcttcccagaaaccatgcaggcagcttgttggatgggatatatttttaataggatagatatctgtgtaccatccaccctcatgatgtttagatagaagaccagatccaggaaaacatacttttaagtaccatggtaaaatttcttgaagatatgttaaacaagggataatgaaaatacaaaagacattaaattttgagcaatttagaaagttctaaaacttttaaaagaggcaaagtctgtataacataaaatttgtaagataatctgttcagccaagtaactattccagtaataattcctgaacagttaaagaaggtggttcaggaggaggattacttactgaagctagctttaaatactgacaaatctggtttttaaaccagattaagtaggtgcttcagaatgggcatggtggctcatgtctgtaatcccagcactttggggtgccaaggcaggaggatcagctgaggccaggaattcgagaccagcctggacaacaacgcaagaccccgcttctacagaaaaaaacaaaacataaaccaaaaaatgagctggacgcagtagcgtgcgcctgtagtcccagctactcaggaggccaaggcagaataatctcttgagcccaggagttcaaggttacagtgagctatgatcacaccactgcaagttcagcctgggtaacagaatgagaccctgtttccaaaaaaaaaaaaaaagaagaagaagaagaagaattaactgagacttggggaactgtgactttcccaaggattcctgctgctgaggacaaagttagcacatgcatctatttcagtacaagcacaagaacacacctgtattttatttttgctgctttttaaatatgtactacacaggctgttcttcaggttagggttattcttttccttttttttttttttcttttgaggcagagtctcgctctgtcaccaaggctggagtgtggtggtactatctcagctcactgcaacctccgcctcccaggttcaagcaattctcattctcatgcctcagcctcctgagtagctgggactacaggcatacaccaccatccccggctaattttttgtatttttagtagagatggtgtttcaccatgttggccacattggtctcaaactcctggcctcaggtgatcctcagcctcccaaagtgctgggattacaggtgtcagccactgtacctggccttactcttttttttatacaatatcaatttaaacaaaaggtgaaatgtctgctgtgaatttttttcttttatatacattaagtaaatgtatacaagcataatctttttcagtatttgagaattttaccacccttctaaatttgttctatcttttcttatctaaattcaataatccacaactgtcacacttggtaattgatgtttattaaatttcatatctcatagttcaatatattgcattaaggtggcttaatactgtaaaactcatgaaactcttaatgtagttagagtaatggtaagtactcaatctcaaaggctatttaaaaagctgtgcttgaagttgtgtatccaaaggtgcacacgaaatataaaatatttgaattaaaatttctacagaatatgcatttagaatatgtcattactgatcatttatagtcttccatcactatgtatgtgtgttaactcactgcttattttgcttttagaaccttttgcccagagtagcagccaaacttgaggttgccccgatttctgacatcattgcaatcaagtcacctgacacatttgtgagaactatttatgcaggtgagtactcaaggaagataattaatcaacatgttaaattttagtgaaaagcataaattaatcttgaagatagaattttaaatcaaaccatacaattgctttaagtggaccatcttaaaggtttctgaggaaaattttagtctagaattgctggtggcccttgacatggcattctctctgatggatcgcaaacacagagatttcctgcctgtttattcagtttgcagggtgatattttcctagtgatcaataaaaattagattcacaatttaatatattttgtaagtggtacctggaaaagcaaaacttaaaaaaaaatagtattctcaatctttgctgcttctacttcatttccataggcattaagaaattcattttagccagctgcagtggctcgtgcctataatcccagcactttggcaggctgaggtgggaggattacttgaactcaggagtttgaggctatcctgggcaacataataagaccctatctcaaaaataaataaataaaataaattagctaggcatgttggcatatgcctgtagtcacagatacttgggaggctgaggtgggaggattgcttgagccagaaggtcgaggctatggtgagttgtgatcatgccacagcactccagcctgggcaacagagcaagaccctgtctcaagaaaaagaaaagaaattcatttcagtgtctcttcagttgattttttgcttagcacactggtctctagtggggtcggagaaggcagtgaactcttcgttttttgcctgattaaagttgtgtattccagtatgaatggctaattctgaaattagacttttcatcttccataatgtttgagggaaaatattttgtcatggtttaggttactgttaatgtgatagctaatccagagtgtctcaaatcctcttaaaatcttagcacattcatacctgttctttatgacctattgtgttttcaagatattcctcctttagcatgcacagtagctacattcttcctaagttgttgcagctcatagttttgagttactgattgtattgtttttggagaaggaagctttgttcatattccttttagaggtgtagtgtaccttcttagtgtggatgcctgttcgagtttcttccttctaggtgtggtagtacctgtcctgcttttaaagacatccagggttatacagatatctgctgatatgtttcttcaccgttatggttcattttttcctatacttaatagagttagaagacaactggtcaatagttatttcttgccttgtctgtgaagtaaattccaagcatcaaaggagtgctagttttgttgccttttgctgttgcttttaagaaatagattgtatgtttcaggaaatgctctatgtacagtgaagtgtgatgagaaagtgaaagtgttttctgtccgtggaacatcctttgatgctgcagcaacaagtggcggtagtgccagttcagaaaagggtgagtgttcatttggagtttttttgttttgtttcttacttttttaattcatagactgtattataataagagatgacctctgcctacatttctaatgaatagtatttgaaagttcaatttaaatgatattcccaagcttatacaaaaataataaatatgtataacttacatctttttcacattatctttggtactaggatagttgctttggtagatcaagggagtgggagacagaggatctattaagattaagcttttttactcttgtcactgtttcctattatatttgggtgattcagtataacagaagaatgtaataggaaacgtgtggagggtgtcacactttaacatatatagtgtcttatttgaacctcatagaaagaaagttattctatattcagactcagagaattgaatgatttctggagtcatacagctaatgtggcaaaggctggaatctagtctccttaagtctttccattatcagagagaattaattaggagcactgaaaattcacagtaattaacttaaatttcgtggaattatatacttgtgtgtttctcttgaaaataattcttgttatagaacttgaaatcatagtcattgttttattatgtattaatgtatgcagcatcaagtacttcaccagtggaaatatcagagtggcttgaccagaaattaacaaaaagtgatcgaccagagctaacaggtgccaaagtggtggtatctggtggtaagtgaaatattaatcttaaaagatgtaaattgaaaatactttgatttttttttttatttttagtatttattttagaagtacacagatctttttcaaatgtaagaagttgggaagtttgggatattattcccatttaaccaattaggaaaatgaaattatgagcataatacacagtttggggtttctgttgcacacctagtcactggcaccagggggagcatggtataaatcttatctgcataactttgccacttggtgccatcttattgatggacttccatgaattctgcagagtatggttggcttctcaattatagatagaactggcttgaatttcagggccatcttgtgtataattcctacccttctttccacttggaaagatttccagagttgtccatgtctttgtgtataactctttaaaaagtttcttaacatttaatatcaaaactgttaatattgcataagacatgcttatttttatacatcatgctccttgtctttaaaaacaatgatttttttatggcccactgactaactttttgaaaaaataaggactgttatgctttttaaatccttgcaattaaacatccaacaaaataagctttcagacagccttctattgcaagtatcattgagaaaaaaaaattaatattttgaagtgatatatctgacttgtttttcgttttctttttttctttttgagatggagtttcgctcttgttgcctaggctggagtgcaatggcacaatctctgctcaccgccacctccacctcccaggttcaagcgattctcctgcctcagcctcccgagtagctgggattacaggcatgtgccactacgcccagcgcggtgactcacacctgtaattccagcactttgggaagccgaggcgggtggatcacccgaggtcaagtgttcgagaccagcctggccaacatagtgaaaccccgtctctattaaaaatacaaaaaattagctgggcatggtggtggatgccagtagtcccagctactcaggagggtgaggcaggagaattgcttgaacctgggaggcagaggttgcagtgagccgagatcgcaccattgcatttcagcctgggcaacaagagtgaaactcctcctaaaaaataaataaataaataaataaaaataataattttgtatttttagtagagacggaggttctgcatgttggtcaggctggtctcgaaatcctgacctcaggtgatccgcccacttcagcctcccaaagtgttgggattacaggtgtgagccaccgagctgggccctgacttgtttattcacttatttattcaagaaatgtatattggttatctgttctatgacaggcttattgccaagtgctggagaaacagatgaaaaggcagaatgttcttcctctcgaggagtttaaagtccttgagatgactcccattcaaataataactttattcagtcattcagagaaatttattgagcatctattatatgtagagttttgctaaatattgcagatatggcagtgaccaagatagatatagatcctgaaattaaagagtttttattctagtgggaaaaaaactcatattaattacacaattagttaactaggtaatcatagtagtgttgaatgctttatagaagtataggagtgtcagaggccagaaaaggtttatagaggaggtgacatgcttaatatggcagttacataatatgaaaatttactccagtatataaaatagcaaaattgttccagaatgtatttgatgtttgcctaatttttttttttcatctttttaaatgaggtcgaggcttgaagagtggagagaactttaagttgttatatgacttggcagatcaactacatgctgcaggtaaagttattttccttagtagaaagatattccctttttgttggaaa

SEQ ID NO: 1748 - DNA, 395 bp, Homo sapiens
gtcctgtcatacgtggtccaatgggtaaagctccttagaactccaatggtaaccaaactgcctacatccatttgcatcttctgcaatccagggatttaaaagtaatggcttctggcaagtcatctcactacactgctggtcatctctgtaaactcgctctgtaaacggcagctgataactagctctgttccttgagggaaccaacaggtccctaaggggctctgcctcactccagtgaggttcaggagcccaaatggagtaagttccagttaagctcttcatgttctgtgctgatatgccaggcaccaggagttgtctttaacattgtacctgcaccagccaggctggccagtgtaatatttttcaattagcaaatcttccaataatagcgtttt

SEQ ID NO: 1749 - DNA, 344 bp, Homo sapiens
tccgaggatggagggtgttgtccaagagagaagaatctctgatgaggtgccaaggagagagacaggtcaccctccactgccaggggaggtggcaggaggggaaaaggcagatgttccctgagccaacggagccacggccttcttcttccacatcctactgagtctctgtgagaaacagtccttggatctggtagagatgagggcccaacaaactccctctgggcagaacacaatcttcaatctggtctgaacaacgatattcttccaggctgctgagagccctgtgggaccatctttgtcttggaagcctttaggtcagatactcagacagcatcaggctgagg

SEQ ID NO: 1750 - DNA, 344 bp, Homo sapiens
tccgaggatggagggtgttgtccaagagagaagaatctctgatgaggtgccaaggagagagacaggtcaccctccactgccaggggaggtggcaggaggggaaaaggcagatgttccctgagccaacggagccacggccttcttctttcacatcctactgagtctctgtgagaaacagtccttggatctggtagagatgagggcccaacaaactccctctgggcagaacacaatcttcaatctggtctgaacaacgatattcttccaggctgctgagagccctgtgggaccatctttgtcttggaagcctttaggtcagatactcagacagcatcaggctgagg

SEQ ID NO: 1751 - DNA, 344 bp, Homo sapiens; identical to SEQ ID NO: 1749

SEQ ID NO: 1752 - DNA, 913 bp, Homo sapiens
cgaggagacaggtcgccctccattgccaggggaggtggcaggaggggaaaaagcaccaaggaagggaagctggaacagaataattaaatgccaggctacagagcctggaccatgcaaagcaggcagagcaaagaacgaaagccaggcacatatgaggcacgctctcctgggagggaagccccatggaagatagaaacggaagcggcagagagaagcagatgcctgtggcatcattcgagcaatgccgtgagctgtgcacggaagcaaaggctgcagctgtcctgctcaccactgaatcccagtgcctggtacctaacagctactgaacacatgcttgatagataaacaaaagatgaataaactcagggagtagcaattaacatggaaaggataaacaaagaagttactttaaaggtaaaaaccaacatttttataatcttcaatgattctatacagcccatcttccttgtaatttacgaaagtgactgagaatttgactgtgggctttggtgtctctctcacacacagaaagaatcacacatctgcagagccacgggcagcatgagccacgtcaggcctctgaagctgctggactgttcccttaccctccgctggtgacagtggaaagctagggctatcagctggcagggaggctgccactcatgctgtacccaggcctggcactgctcttcaagggtagaacagaacacgtgcccaggagaacttagccacgatcctctccctgggacaagcaggaaggaaggagtgaaccagctacagaggttcaaagaggggttctgacagaatggccaacaggaggggtaaatgctgtttgatggcggaggaaggcagtaataagagaatgagaagtaggtacaatatggaaggtttcccgagataaggaaagaaaagg

SEQ ID NO: 1753 - DNA, 1731 bp, Homo sapiens
tagcacagaaattttttttttttaatttcagaaaaaggtacatcatgaatacataagatatatacaggttactagtctgtttatgttattggtaaggcttccagtcaacagtgggctattattattagctatgttttggagggtcaaagttatgcatggattgtcaattgcacagggggttggtgcccctaaccctaccttccatatataacttcctctgtcacctgtaagaaaaacacaatttctggaatgtgtggaagtgactaagggaagtgactgagccaagccagcccaggccatctgtaggctacagactcagctgctacctaggtctctttcccttgacttgcccatgaactaatgagaaaagaaccatgtcatggagaagcaataaatacaactccctctttccctgcaaaaagctgctgctacacttcaacaactgtcactgtgctatgtttgcagagcctaagacaagccaggccctgagttagggcctgagatgtggagggctctcaggcatgtttctcgtactctgtgagttcctgtctctgggagcaaccggtcaggtccagcagcaactatccagcaacacacaatggggcacgtatcacaagcaggactacactgtgacttccataggccctaaacacttttcccttcctccataaaaaatattacaagttatatttctcaactatgttttctgattttaagtgaaattagacattttatgggcccctaacaagtgtgtgctctaggcactgtgcttaaaggataagttgtccttggacatatgacagtctctggcgaggtgccgaggagacaggtcgccctccattgccaggggaggtggcaggaggggaaaaagcaccaaggaagggaagctggaacagaataattaaatgccaggctacagagcctggaccatgcaaagcaggcagagcaaagaacgaaagccaggcacatatgaggcacgctctcctgggagggaagccccatggaagatagaaacggaagcggcagagagaagcagatgcctgtggcatcattcgagcaatgccgtgagctgtgcacggaagcaaaggctgcagctgtcctgctcaccactgaatcccagtgcctggtacctaacagctactgaacacatgcttgatagataaacaaaagatgaataaactcagggagtagcaattaacatggaaaggataaacaaagaagttactttaaaggtaaaaaccaacatttttataatcttcaatgattctatacagcccatcttccttgtaatttacgaaagtgactgagaatttgactgtgggctttggtgtctctctcacacacagaaagaatcacacatctgcagagccacgggcagcatgagccacgtcaggcctctgaagctgctggactgttcccttaccctccgctggtgacagtggaaagctagggctatcagctggcagggaggctgccactcatgctgtacccaggcctggcactgctcttcaagggtagaacagaacacgtgcccaggagaacttagccacgatcctctccctgggacaagcaggaaggaaggagtgaaccagctacagaggttcaaagaggggttctgacagaatggccaacaggaggggtaaatgctgtttgatggcggaggaaggcagtaataagagaatgagaagtaggtacaatatggaaggtttcccgagataaggaaagaaaagg

SEQ ID NO: 1754 - DNA, 1731 bp, Homo sapiens
tagcacagaaattttttttttttaatttcagaaaaaggtacatcatgaatacataagatatatacaggttactagtctgtttatgttattggtaaggcttccagtcaacagtgggctattattattagctatgttttggagggtcaaagttatgcatggattgtcaattgcacagggggttggtgcccctaaccctaccttccatatataacttcctctgtcacctgtaagaaaaacacaatttctggaatgtgtggaagtgactaagggaagtgactgagccaagccagcccaggccatctgtaggctacagactcagctgctacctaggtctctttcccttgacttgcccatgaactaatgagaaaagaaccatgtcatggagaagcaataaatacaactccctctttccctgcaaaaagctgctgctacacttcaacaactgtcactgtgctatgtttgcagagcctaagacaagccaggccctgagttagggcctgagatgtggagggctctcaggcatgtttctcgtactctgtgagttcctgtctctgggagcaaccggtcaggtccagcagcaactatccagcaacacacaatggggcacgtatcacaagcaggactacactgtgacttccataggccctaaacacttttcccttcctccataaaaaatattacaagttatatttctcaactatgttttctgattttaagtgaaattagacattttatgggcccctaacaagtgtgtgctctaggcactgtgcttaaagggtaagttgtccttggacatatgacagtctctggcgaggtgccgaggagacaggtcgccctccattgccaggggaggtggcaggaggggaaaaagcaccaaggaagggaagctggaacagaataattaaatgccaggctacagagcctggaccatgcaaagcaggcagagcaaagaacgaaagccaagcacatatgaggcacgctctcctgggagggaagccccatggaagatagaaacggaagcggcagagagaagcagatgcctgtggcatcattcgagcaatgccgtgagctgtgcacggaagcaaaggctgcagctgtcctgctcaccactgaatcccagtgcctggtacctaacagctactgaacacatgcttgatagataaacaaaagatgaataaactcagggagtagcaattaacatggaaaggataaacaaagaagttactttaaaggtaaaaaccaacatttttataatcttcaatgattctatacagcccatcttccttgtaatttacgaaagtgactgagaatttgactgtgggctttggtgtctctctcacacacagaaagaatcacacatctgcagagccacgggcagcatgagccacgtcaggcctctgaagctgctggactgttcccttaccctccgctggtgacagtggaaagctagggctatcagctggcagggaggctgccactcatgctgtacccaggcctggcactgctcttcaagggtagaacagaacacgtgcccaggagaacttagccacgatcctctccctgggacaagcaggaaggaaggagtgaaccagctacagaggttcaaagaggggttctgacagaatggccaacaggaggggtaaatgctgtttgatggcggaggaaggcagtaataagagaatgagaagtaggtacaatatggaaggtttcccgagataaggaaagaaaagg

SEQ ID NO: 1755 - DNA, 473 bp, Homo sapiens
cagccatgccgttgacctctccatggggatggactgaagagcccaccccagctcaggggagagcctctcatccggaaccacgagtgacagggactttccagtcctagggaatgttcttttaaatttagatcctgcccacccccaacaagtgtgctgtcaggccctattctaaatgctgttgcgtatattaagttatttaatcttcacagcaacctattcaataaggactgttatttctagtatagagaggagggctcctaggcctggctaagcagtttaagataaaatgcaaaatgacccaattcaggatgattatagttggtttaaatttggttgctgaggcacaaacaaaagtgttggattctgtagtttttgttgtgattacagaacacatgcagtatcttccagaaccctttgataaagctgaagtaaggatgggctcacatggcccacgtgagtaagaagctgtgttg

SEQ ID NO: 1756 - DNA, 465 bp, Homo sapiens
gcctatgttgatcttgaactcctgggctcaagccatcctcctgtctcggcctcccaaattgctggaattataagcacattacacagtgcccagtctacctacattttgacagacatataatattccatggcatggttacattattcagttaagaatgttcccggttttctctaagataatgctgcccatctgtgtctcactctggacatgtagagtacctgcaaagacttggactgcttgagcagagggcctgcttttgttttttgttcttcctgcctgttgtaacttgatgctgccaaatgatcctcttaaatgattgtaccaccttccctgccaccaccagattttaaggattctctgtacctcccaacacatgatgacatcatacatgaaaagttttgcctgcctgatggaataattgagtcaagaaataggatgctaatggcatcttcgcttacccggtct

SEQ ID NO: 1757 - DNA, 320 bp, Homo sapiens
atggtggctcacgcctgtaatcccagcactttgggaggccgaggcgggcggatcacgaggtcaggagattgagaccatcctggctaacacggtgaaaccccgtctctactaaaaatacaaaaaaattagccgggcgtggtggcgggcacctgtagtcccagctactcaggaggctgagacaggagaatggcgtgaacccgggaggcagagcttgcagtgagccgagattgcaccactgcactccagcctgggcaacagagcaagactccgtctcaaaaaaaaaaaagaaaaaagaaaagaaaagaaaagaaaacgaagtc

SEQ ID NO: 1758 - DNA, 300 bp, Homo sapiens
ggcgcggtggctcacgcctgtaatcccagcactttgggaggccgaggcgggcggatcacaaggtcaggagattgagaccatcctggctaacacggtgaaatcccgtcttactaaaaatacaaaaaaaaattagccaggcatggtggcgggcgcctgtagtcccagctactccggaggctgaggcaggagaatggcgtgaacccgggaggcggagcttgcagtgagcagagatcgcgccactgcactacagcctgggcgacagagcaagactccgtctcaaaaataaataaataaataaaa

SEQ ID NO: 1759 - DNA, 292 bp, Homo sapiens
ctccacatatattcagcaaacgtttgcacctgctctcttctgagtaaaagccactaggctagccacttgccctcattactcctgtgttattaaaaatggcacataggccgggcgcggtggctcacgcctgtaatcccagcactttgggaggccgaggcgggtggatcatgaggtcaggagattgagaccatcctggctaacatggtgatacccagtctgtactaaaaatacaaaaaaaaaaattagccgggcatggtggcgggcgcctgtagtcccagctactcaagaggct

SEQ ID NO: 1760 - DNA, 5088 bp, Homo sapiens
  SITE (5): n equals a,t,g, or c
  SITE (6): n equals a,t,g, or c
  SITE (7): n equals a,t,g, or c
  SITE (8): n equals a,t,g, or c
  SITE (9): n equals a,t,g, or c
  SITE (10): n equals a,t,g, or c
  SITE (11): n equals a,t,g, or c
  SITE (12): n equals a,t,g, or c
  SITE (13): n equals a,t,g, or c
  SITE (14): n equals a,t,g, or c
  SITE (15): n equals a,t,g, or c
  SITE (16): n equals a,t,g, or c
  SITE (17): n equals a,t,g, or c
  SITE (18): n equals a,t,g, or c
  SITE (19): n equals a,t,g, or c
  SITE (20): n equals a,t,g, or c
  SITE (21): n equals a,t,g, or c
  SITE (22): n equals a,t,g, or c
  SITE (23): n equals a,t,g, or c
  SITE (24): n equals a,t,g, or c
  SITE (25): n equals a,t,g, or c
  SITE (26): n equals a,t,g, or c
  SITE (27): n equals a,t,g, or c
  SITE (28): n equals a,t,g, or c
  SITE (29): n equals a,t,g, or c
  SITE (30): n equals a,t,g, or c
  SITE (31): n equals a,t,g, or c
  SITE (32): n equals a,t,g, or c
  SITE (33): n equals a,t,g, or c
  SITE (34): n equals a,t,g, or c
  SITE (35): n equals a,t,g, or c
  SITE (36): n equals a,t,g, or c
  SITE (37): n equals a,t,g, or c
  SITE (38): n equals a,t,g, or c
  SITE (39): n equals a,t,g, or c
  SITE (40): n equals a,t,g, or c
  SITE (41): n equals a,t,g, or c
  SITE (42): n equals a,t,g, or c
  SITE (43): n equals a,t,g, or c
  SITE (44): n equals a,t,g, or c
  SITE (45): n equals a,t,g, or c
  SITE (46): n equals a,t,g, or c
  SITE (47): n equals a,t,g, or c
  SITE (48): n equals a,t,g, or c
  SITE (49): n equals a,t,g, or c
  SITE (50): n equals a,t,g, or c
  SITE (51): n equals a,t,g, or c
  SITE (52): n equals a,t,g, or c
  SITE (53): n equals a,t,g, or c
  SITE (54): n equals a,t,g, or c
  SITE (55): n equals a,t,g, or c
  SITE (56): n equals a,t,g, or c
  SITE (57): n equals a,t,g, or c
  SITE (58): n equals a,t,g, or c
  SITE (59): n equals a,t,g, or c
  SITE (60): n equals a,t,g, or c
  SITE (61): n equals a,t,g, or c
  SITE (62): n equals a,t,g, or c
  SITE (63): n equals a,t,g, or c
  SITE (64): n equals a,t,g, or c
  SITE (65): n equals a,t,g, or c
  SITE (66): n equals a,t,g, or c
  SITE (67): n equals a,t,g, or c
  SITE (68): n equals a,t,g, or c
  SITE (69): n equals a,t,g, or c
  SITE (70): n equals a,t,g, or c
  SITE (71): n equals a,t,g, or c
  SITE (72): n equals a,t,g, or c
  SITE (73): n equals a,t,g, or c
  SITE (74): n equals a,t,g, or c
  SITE (75): n equals a,t,g, or c
  SITE (76): n equals a,t,g, or c
  SITE (77): n equals a,t,g, or c
  SITE (78): n equals a,t,g, or c
  SITE (79): n equals a,t,g, or c
  SITE (80): n equals a,t,g, or c
  SITE (81): n equals a,t,g, or c
  SITE (82): n equals a,t,g, or c
  SITE (83): n equals a,t,g, or c
  SITE (84): n equals a,t,g, or c
  SITE (85): n equals a,t,g, or c
  SITE (86): n equals a,t,g, or c
  SITE (87): n equals a,t,g, or c
  SITE (88): n equals a,t,g, or c
  SITE (89): n equals a,t,g, or c
  SITE (90): n equals a,t,g, or c
  SITE (91): n equals a,t,g, or c
  SITE (92): n equals a,t,g, or c
  SITE (93): n equals a,t,g, or c
  SITE (94): n equals a,t,g, or c
  SITE (95): n equals a,t,g, or c
  SITE (96): n equals a,t,g, or c
  SITE (97): n equals a,t,g, or c
  SITE (98): n equals a,t,g, or c
  SITE (99): n equals a,t,g, or c
  SITE (100): n equals a,t,g, or c
  SITE (101): n equals a,t,g, or c
  SITE (102): n equals a,t,g, or c
  SITE (103): n equals a,t,g, or c
  SITE (104): n equals a,t,g, or c
  SITE (105): n equals a,t,g, or c
  SITE (106): n equals a,t,g, or c
  SITE (107): n equals a,t,g, or c
  SITE (108): n equals a,t,g, or c
  SITE (109): n equals a,t,g, or c
  SITE (110): n equals a,t,g, or c
  SITE (111): n equals a,t,g, or c
  SITE (112): n equals a,t,g, or c
  SITE (113): n equals a,t,g, or c
  SITE (114): n equals a,t,g, or c
  SITE (115): n equals a,t,g, or c
  SITE (116): n equals a,t,g, or c
  SITE (117): n equals a,t,g, or c
  SITE (118): n equals a,t,g, or c
  SITE (119): n equals a,t,g, or c
  SITE (120): n equals a,t,g, or c
  SITE (121): n equals a,t,g, or c
  SITE (122): n equals a,t,g, or c
  SITE (123): n equals a,t,g, or c
  SITE (124): n equals a,t,g, or c
  SITE (125): n equals a,t,g, or c
  SITE (126): n equals a,t,g, or c
  SITE (127): n equals a,t,g, or c
  SITE (128): n equals a,t,g, or c
  SITE (129): n equals a,t,g, or c
  SITE (130): n equals a,t,g, or c
  SITE (131): n equals a,t,g, or c
  SITE (132): n equals a,t,g, or c
  SITE (133): n equals a,t,g, or c
  SITE (134): n equals a,t,g, or c
  SITE (135): n equals a,t,g, or c
  SITE (136): n equals a,t,g, or c
  SITE (137): n equals a,t,g, or c
  SITE (138): n equals a,t,g, or c
  SITE (139): n equals a,t,g, or c
  SITE (140): n equals a,t,g, or c
  SITE (141): n equals a,t,g, or c
  SITE (142): n equals a,t,g, or c
  SITE (143): n equals a,t,g, or c
  SITE (144): n equals a,t,g, or c
  SITE (145): n equals a,t,g, or c
  SITE (146): n equals a,t,g, or c
  SITE (147): n equals a,t,g, or c
  SITE (148): n equals a,t,g, or c
  SITE (149): n equals a,t,g, or c
  SITE (150): n equals a,t,g, or c
  SITE (151): n equals a,t,g, or c
  SITE (152): n equals a,t,g, or c
  SITE (153): n equals a,t,g, or c
  SITE (154): n equals a,t,g, or c
  SITE (155): n equals a,t,g, or c
  SITE (156): n equals a,t,g, or c
  SITE (157): n equals a,t,g, or c
  SITE (158): n equals a,t,g, or c
  SITE (159): n equals a,t,g, or c
  SITE (160): n equals a,t,g, or c
  SITE (161): n equals a,t,g, or c
  SITE (162): n equals a,t,g, or c
  SITE (163): n equals a,t,g, or c
  SITE (164): n equals a,t,g, or c
  SITE (165): n equals a,t,g, or c
  SITE (166): n equals a,t,g, or c
  SITE (167): n equals a,t,g, or c
  SITE (168): n equals a,t,g, or c
  SITE (169): n equals a,t,g, or c
  SITE (170): n equals a,t,g, or c
  SITE (171): n equals a,t,g, or c
  SITE (172): n equals a,t,g, or c
  SITE (173): n equals a,t,g, or c
  SITE (174): n equals a,t,g, or c
  SITE (175): n equals a,t,g, or c
  SITE (176): n equals a,t,g, or c
  SITE (177): n equals a,t,g, or c
  SITE (178): n equals a,t,g, or c
  SITE (179): n equals a,t,g, or c
  SITE (180): n equals a,t,g, or c
  SITE (181): n equals a,t,g, or c
  SITE (182): n equals a,t,g, or c
  SITE (183): n equals a,t,g, or c
  SITE (184): n equals a,t,g, or c
  SITE (185): n equals a,t,g, or c
  SITE (186): n equals a,t,g, or c
  SITE (187): n equals a,t,g, or c
  SITE (188): n equals a,t,g, or c
  SITE (189): n equals a,t,g, or c
  SITE (190): n equals a,t,g, or c
  SITE (191): n equals a,t,g, or c
  SITE (192): n equals a,t,g, or c
  SITE (193): n equals a,t,g, or c
  SITE (194): n equals a,t,g, or c
  SITE (195): n equals a,t,g, or c
  SITE (196): n equals a,t,g, or c
  SITE (197): n equals a,t,g, or c
  SITE (198): n equals a,t,g, or c
  SITE (199): n equals a,t,g, or c
  SITE (200): n equals a,t,g, or c
  SITE (201): n equals a,t,g, or c
  SITE (202): n equals a,t,g, or c
  SITE (203): n equals a,t,g, or c
  SITE (204): n equals a,t,g, or c
  SITE (205): n equals a,t,g, or c
  SITE (206): n equals a,t,g, or c
  SITE (207): n equals a,t,g, or c
  SITE (208): n equals a,t,g, or c
  SITE (209): n equals a,t,g, or c
  SITE (210): n equals a,t,g, or c
  SITE (211): n equals a,t,g, or c
  SITE (212): n equals a,t,g, or c
  SITE (213): n equals a,t,g, or c
  SITE (214): n equals a,t,g, or c
  SITE (215): n equals a,t,g, or c
  SITE (216): n equals a,t,g, or c
  SITE (217): n equals a,t,g, or c
  SITE (218): n equals a,t,g, or c
  SITE (219): n equals a,t,g, or c
  SITE (220): n equals a,t,g, or c
  SITE (221): n equals a,t,g, or c
  SITE (222): n equals a,t,g, or c
  SITE (223): n equals a,t,g, or c
  SITE (224): n equals a,t,g, or c
  SITE (225): n equals a,t,g, or c
  SITE (226): n equals a,t,g, or c
  SITE (227): n equals a,t,g, or c
  SITE (228): n equals a,t,g, or c
  SITE (229): n equals a,t,g, or c
  SITE (230): n equals a,t,g, or c
  SITE (231): n equals a,t,g, or c
  SITE (232): n equals a,t,g, or c
  SITE (233): n equals a,t,g, or c
  SITE (234): n equals a,t,g, or c
  SITE (235): n equals a,t,g, or c
  SITE (236): n equals a,t,g, or c
  SITE (237): n equals a,t,g, or c
  SITE (238): n equals a,t,g, or c
  SITE (239): n equals a,t,g, or c
  SITE (240): n equals a,t,g, or c
  SITE (241): n equals a,t,g, or c
  SITE (242): n equals a,t,g, or c
  SITE (243): n equals a,t,g, or c
  SITE (244): n equals a,t,g, or c
  SITE (245): n equals a,t,g, or c
  SITE (246): n equals a,t,g, or c
  SITE (247): n equals a,t,g, or c
  SITE (248): n equals a,t,g, or c
  SITE (249): n equals a,t,g, or c
  SITE (250): n equals a,t,g, or c
  SITE (251): n equals a,t,g, or c
  SITE (252): n equals a,t,g, or c
  SITE (253): n equals a,t,g, or c
  SITE (254): n equals a,t,g, or c
  SITE (255): n equals a,t,g, or c
  SITE (256): n equals a,t,g, or c
  SITE (257): n equals a,t,g, or c
  SITE (258): n equals a,t,g, or c
  SITE (259): n equals a,t,g, or c
  SITE (260): n equals a,t,g, or c
  SITE (261): n equals a,t,g, or c
  SITE (262): n equals a,t,g, or c
  SITE (263): n equals a,t,g, or c
  SITE (264): n equals a,t,g, or c
  SITE (265): n equals a,t,g, or c
  SITE (266): n equals a,t,g, or c
  SITE (267): n equals a,t,g, or c
  SITE (268): n equals a,t,g, or c
  SITE (269): n equals a,t,g, or c
  SITE (270): n equals a,t,g, or c
  SITE (271): n equals a,t,g, or c
  SITE (272): n equals a,t,g, or c
  SITE (273): n equals a,t,g, or c
  SITE (274): n equals a,t,g, or c
  SITE (275): n equals a,t,g, or c
  SITE (276): n equals a,t,g, or c
  SITE (277): n equals a,t,g, or c
  SITE (278): n equals a,t,g, or c
  SITE (279): n equals a,t,g, or c
  SITE (280): n equals a,t,g, or c
  SITE (281): n equals a,t,g, or c
  SITE (282): n equals a,t,g, or c
  SITE (283): n equals a,t,g, or c
  SITE (284): n equals a,t,g, or c
  SITE (285): n equals a,t,g, or c
  SITE (286): n equals a,t,g, or c
  SITE (287): n equals a,t,g, or c
  SITE (288): n equals a,t,g, or c
  SITE (289): n equals a,t,g, or c
  SITE (290): n equals a,t,g, or c
  SITE (291): n equals a,t,g, or c
  SITE (292): n equals a,t,g, or c
  SITE (293): n equals a,t,g, or c
  SITE (294): n equals a,t,g, or c
  SITE (295): n equals a,t,g, or c
  SITE (296): n equals a,t,g, or c
  SITE (297): n equals a,t,g, or c
  SITE (298): n equals a,t,g, or c
  SITE (299): n equals a,t,g, or c
  SITE (300): n equals a,t,g, or c
  SITE (301): n equals a,t,g, or c
  SITE (302): n equals a,t,g, or c
  SITE (303): n equals a,t,g, or c
  SITE (304): n equals a,t,g, or c
  SITE (3943): n equals a,t,g, or c
  SITE (3944): n equals a,t,g, or c
  SITE (3945): n equals a,t,g, or c
  SITE (3946): n equals a,t,g, or c
  SITE (3947): n equals a,t,g, or c
  SITE (3948): n equals a,t,g, or c
  SITE (3949): n equals a,t,g, or c
  SITE (3950): n equals a,t,g, or c
  SITE (3951): n equals a,t,g, or c
  SITE (3952): n equals a,t,g, or c
  SITE (3953): n equals a,t,g, or c
  SITE (3954): n equals a,t,g, or c
  SITE (3955): n equals a,t,g, or c
  SITE (3956): n equals a,t,g, or c
  SITE (3957): n equals a,t,g, or c
  SITE (3958): n equals a,t,g, or c
  SITE (3959): n equals a,t,g, or c
  SITE (3960): n equals a,t,g, or c
  SITE (3961): n equals a,t,g, or c
  SITE (3962): n equals a,t,g, or c
  SITE (3963): n equals a,t,g, or c
  SITE (3964): n equals a,t,g, or c
  SITE (3965): n equals a,t,g, or c
  SITE (3966): n equals a,t,g, or c
  SITE (3967): n equals a,t,g, or c
  SITE (3968): n equals a,t,g, or c
  SITE (3969): n equals a,t,g, or c
  SITE (3970): n equals a,t,g, or c
  SITE (3971): n equals a,t,g, or c
  SITE (3972): n equals a,t,g, or c
  SITE (3973): n equals a,t,g, or c
  SITE (3974): n equals a,t,g, or c
  SITE (3975): n equals a,t,g, or c
  SITE (3976): n equals a,t,g, or c
  SITE (3977): n equals a,t,g, or c
  SITE (3978): n equals a,t,g, or c
  SITE (3979): n equals a,t,g, or c
  SITE (3980): n equals a,t,g, or c
  SITE (3981): n equals a,t,g, or c
  SITE (3982): n equals a,t,g, or c
  SITE (3983): n equals a,t,g, or c
  SITE (3984): n equals a,t,g, or c
  SITE (3985): n equals a,t,g, or c
  SITE (3986): n equals a,t,g, or c
  SITE (3987): n equals a,t,g, or c
  SITE (3988): n equals a,t,g, or c
  SITE (3989): n equals a,t,g, or c
  SITE (3990): n equals a,t,g, or c
  SITE (3991): n equals a,t,g, or c
  SITE (3992): n equals a,t,g, or c
  SITE (3993): n equals a,t,g, or c
  SITE (3994): n equals a,t,g, or c
  SITE (3995): n equals a,t,g, or c
  SITE (3996): n equals a,t,g, or c
  SITE (3997): n equals a,t,g, or c
  SITE (3998): n equals a,t,g, or c
  SITE (3999): n equals a,t,g, or c
  SITE (4000): n equals a,t,g, or c
  SITE (4001): n equals a,t,g, or c
  SITE (4002): n equals a,t,g, or c
  SITE (4003): n equals a,t,g, or c
  SITE (4004): n equals a,t,g, or c
  SITE (4005): n equals a,t,g, or c
  SITE (4006): n equals a,t,g, or c
  SITE (4007): n equals a,t,g, or c
  SITE (4008): n equals a,t,g, or c
  SITE (4009): n equals a,t,g, or c
  SITE (4010): n equals a,t,g, or c
  SITE (4011): n equals a,t,g, or c
  SITE (4012): n equals a,t,g, or c
  SITE (4013): n equals a,t,g, or c
  SITE (4014): n equals a,t,g, or c
  SITE (4015): n equals a,t,g, or c
  SITE (4016): n equals a,t,g, or c
  SITE (4017): n equals a,t,g, or c
  SITE (4018): n equals a,t,g, or c
  SITE (4019): n equals a,t,g, or c
  SITE (4020): n equals a,t,g, or c
  SITE (4021): n equals a,t,g, or c
  SITE (4022): n equals a,t,g, or c
  SITE (4023): n equals a,t,g, or c
  SITE (4024): n equals a,t,g, or c
  SITE (4025): n equals a,t,g, or c
  SITE (4026): n equals a,t,g, or c
  SITE (4027): n equals a,t,g, or c
  SITE (4028): n equals a,t,g, or c
  SITE (4029): n equals a,t,g, or c
  SITE (4030): n equals a,t,g, or c
  SITE (4031): n equals a,t,g, or c
  SITE (4032): n equals a,t,g, or c
  SITE (4033): n equals a,t,g, or c
  SITE (4034): n equals a,t,g, or c
  SITE (4035): n equals a,t,g, or c
  SITE (4036): n equals a,t,g, or c
  SITE (4037): n equals a,t,g, or c
  SITE (4038): n equals a,t,g, or c
  SITE (4039): n equals a,t,g, or c
  SITE (4040): n equals a,t,g, or c
  SITE (4041): n equals a,t,g, or c
  SITE (4042): n equals a,t,g, or c
  SITE (4043): n equals a,t,g, or c
  SITE (4044): n equals a,t,g, or c
  SITE (4045): n equals a,t,g, or c
  SITE (4046): n equals a,t,g, or c
  SITE (4047): n equals a,t,g, or c
  SITE (4048): n equals a,t,g, or c
  SITE (4049): n equals a,t,g, or c
  SITE (4050): n equals a,t,g, or c
  SITE (4051): n equals a,t,g, or c
  SITE (4052): n equals a,t,g, or c
  SITE (4053): n equals a,t,g, or c
  SITE (4054): n equals a,t,g, or c
  SITE (4055): n equals a,t,g, or c
  SITE (4056): n equals a,t,g, or c
  SITE (4057): n equals a,t,g, or c
  SITE (4058): n equals a,t,g, or c
  SITE (4059): n equals a,t,g, or c
  SITE (4060): n equals a,t,g, or c
  SITE (4061): n equals a,t,g, or c
  SITE (4062): n equals a,t,g, or c
  SITE (4063): n equals a,t,g, or c
  SITE (4064): n equals a,t,g, or c
  SITE (4065): n equals a,t,g, or c
  SITE (4066): n equals a,t,g, or c
  SITE (4067): n equals a,t,g, or c
  SITE (4068): n equals a,t,g, or c
  SITE (4069): n equals a,t,g, or c
  SITE (4070): n equals a,t,g, or c
  SITE (4071): n equals a,t,g, or c
  SITE (4072): n equals a,t,g, or c
  SITE (4073): n equals a,t,g, or c
  SITE (4074): n equals a,t,g, or c
  SITE (4075): n equals a,t,g, or c
  SITE (4076): n equals a,t,g, or c
  SITE (4077): n equals a,t,g, or c
  SITE (4078): n equals a,t,g, or c
  SITE (4079): n equals a,t,g, or c
  SITE (4080): n equals a,t,g, or c
  SITE (4081): n equals a,t,g, or c
  SITE (4082): n equals a,t,g, or c
  SITE (4083): n equals a,t,g, or c
  SITE (4084): n equals a,t,g, or c
  SITE (4085): n equals a,t,g, or c
  SITE (4086): n equals a,t,g, or c
  SITE (4087): n equals a,t,g, or c
  SITE (4088): n equals a,t,g, or c
  SITE (4089): n equals a,t,g, or c
  SITE (4090): n equals a,t,g, or c
  SITE (4091): n equals a,t,g, or c
  SITE (4092): n equals a,t,g, or c
  SITE (4093): n equals a,t,g, or c
  SITE (4094): n equals a,t,g, or c
  SITE (4095): n equals a,t,g, or c
  SITE (4096): n equals a,t,g, or c
  SITE (4097): n equals a,t,g, or c
  SITE (4098): n equals a,t,g, or c
  SITE (4099): n equals a,t,g, or c
  SITE (4100): n equals a,t,g, or c
  SITE (4101): n equals a,t,g, or c
  SITE (4102): n equals a,t,g, or c
  SITE (4103): n equals a,t,g, or c
  SITE (4104): n equals a,t,g, or c
  SITE (4105): n equals a,t,g, or c
  SITE (4106): n equals a,t,g, or c
  SITE (4107): n equals a,t,g, or c
  SITE (4108): n equals a,t,g, or c
  SITE (4109): n equals a,t,g, or c
  SITE (4110): n equals a,t,g, or c
  SITE (4111): n equals a,t,g, or c
  SITE (4112): n equals a,t,g, or c
  SITE (4113): n equals a,t,g, or c
  SITE (4114): n equals a,t,g, or c
  SITE (4115): n equals a,t,g, or c
  SITE (4116): n equals a,t,g, or c
  SITE (4117): n equals a,t,g, or c
  SITE (4118): n equals a,t,g, or c
  SITE (4119): n equals a,t,g, or c
  SITE (4120): n equals a,t,g, or c
  SITE (4121): n equals a,t,g, or c
  SITE (4122): n equals a,t,g, or c
  SITE (4123): n equals a,t,g, or c
  SITE (4124): n equals a,t,g, or c
  SITE (4125): n equals a,t,g, or c
  SITE (4126): n equals a,t,g, or c
  SITE (4127): n equals a,t,g, or c
  SITE (4128): n equals a,t,g, or c
  SITE (4129): n equals a,t,g, or c
  SITE (4130): n equals a,t,g, or c
  SITE (4131): n equals a,t,g, or c
  SITE (4132): n equals a,t,g, or c
  SITE (4133): n equals a,t,g, or c
  SITE (4134): n equals a,t,g, or c
  SITE (4135): n equals a,t,g, or c
  SITE (4136): n equals a,t,g, or c
  SITE (4137): n equals a,t,g, or c
  SITE (4138): n equals a,t,g, or c
  SITE (4139): n equals a,t,g, or c
  SITE (4140): n equals a,t,g, or c
  SITE (4141): n equals a,t,g, or c
  SITE (4142): n equals a,t,g, or c
  SITE (4143): n equals a,t,g, or c
  SITE (4144): n equals a,t,g, or c
  SITE (4145): n equals a,t,g, or c
  SITE (4146): n equals a,t,g, or c
  SITE (4147): n equals a,t,g, or c
  SITE (4148): n equals a,t,g, or c
  SITE (4149): n equals a,t,g, or c
  SITE (4150): n equals a,t,g, or c
  SITE (4151): n equals a,t,g, or c
  SITE (4152): n equals a,t,g, or c
  SITE (4153): n equals a,t,g, or c
  SITE (4154): n equals a,t,g, or c
  SITE (4155): n equals a,t,g, or c
  SITE (4156): n equals a,t,g, or c
  SITE (4157): n equals a,t,g, or c
  SITE (4158): n equals a,t,g, or c
  SITE (4159): n equals a,t,g, or c
  SITE (4160): n equals a,t,g, or c
  SITE (4161): n equals a,t,g, or c
  SITE (4162): n equals a,t,g, or c
  SITE (4163): n equals a,t,g, or c
  SITE (4164): n equals a,t,g, or c
  SITE (4165): n equals a,t,g, or c
  SITE (4166): n equals a,t,g, or c
  SITE (4167): n equals a,t,g, or c
  SITE (4168): n equals a,t,g, or c
  SITE (4169): n equals a,t,g, or c
  SITE (4170): n equals a,t,g, or c
  SITE (4171): n equals a,t,g, or c
  SITE (4172): n equals a,t,g, or c
  SITE (4173): n equals a,t,g, or c
  SITE (4174): n equals a,t,g, or c
  SITE (4175): n equals a,t,g, or c
  SITE (4176): n equals a,t,g, or c
  SITE (4177): n equals a,t,g, or c
  SITE (4178): n equals a,t,g, or c
  SITE (4179): n equals a,t,g, or c
  SITE (4180): n equals a,t,g, or c
  SITE (4181): n equals a,t,g, or c
  SITE (4182): n equals a,t,g, or c
  SITE (4183): n equals a,t,g, or c
  SITE (4184): n equals a,t,g, or c
  SITE (4185): n equals a,t,g, or c
  SITE (4186): n equals a,t,g, or c
  SITE (4187): n equals a,t,g, or c
  SITE (4188): n equals a,t,g, or c
  SITE (4189): n equals a,t,g, or c
  SITE (4190): n equals a,t,g, or c
  SITE (4191): n equals a,t,g, or c
  SITE (4192): n equals a,t,g, or c
  SITE (4193): n equals a,t,g, or c
  SITE (4194): n equals a,t,g, or c
  SITE (4195): n equals a,t,g, or c
  SITE (4196): n equals a,t,g, or c
  SITE (4197): n equals a,t,g, or c
  SITE (4198): n equals a,t,g, or c
  SITE (4199): n equals a,t,g, or c
  SITE (4200): n equals a,t,g, or c
  SITE (4201): n equals a,t,g, or c
  SITE (4202): n equals a,t,g, or c
  SITE (4203): n equals a,t,g, or c
  SITE (4204): n equals a,t,g, or c
  SITE (4205): n equals a,t,g, or c
  SITE (4206): n equals a,t,g, or c
  SITE (4207): n equals a,t,g, or c
  SITE (4208): n equals a,t,g, or c
  SITE (4209): n equals a,t,g, or c
  SITE (4210): n equals a,t,g, or c
  SITE (4211): n equals a,t,g, or c
  SITE (4212): n equals a,t,g, or c
  SITE (4213): n equals a,t,g, or c
  SITE (4214): n equals a,t,g, or c
  SITE (4215): n equals a,t,g, or c
  SITE (4216): n equals a,t,g, or c
  SITE (4217): n equals a,t,g, or c
  SITE (4218): n equals a,t,g, or c
  SITE (4219): n equals a,t,g, or c
  SITE (4220): n equals a,t,g, or c
  SITE (4221): n equals a,t,g, or c
  SITE (4222): n equals a,t,g, or c
  SITE (4223): n equals a,t,g, or c
  SITE (4224): n equals a,t,g, or c
  SITE (4225): n equals a,t,g, or c
  SITE (4226): n equals a,t,g, or c
  SITE (4227): n equals a,t,g, or c
  SITE (4228): n equals a,t,g, or c
  SITE (4229): n equals a,t,g, or c
  SITE (4230): n equals a,t,g, or c
  SITE (4231): n equals a,t,g, or c
  SITE (4232): n equals a,t,g, or c
  SITE (4233): n equals a,t,g, or c
  SITE (4234): n equals a,t,g, or c
  SITE (4235): n equals a,t,g, or c
  SITE (4236): n equals a,t,g, or c
  SITE (4237): n equals a,t,g, or c
  SITE (4238): n equals a,t,g, or c
  SITE (4239): n equals a,t,g, or c
  SITE (4240): n equals a,t,g, or c
  SITE (4241): n equals a,t,g, or c
  SITE (4242): n equals a,t,g, or c
  SITE (4243): n equals a,t,g, or c
  SITE (4244): n equals a,t,g, or c
  SITE (4245): n equals a,t,g, or c
  SITE (4246): n equals a,t,g, or c
  SITE (4247): n equals a,t,g, or c
  SITE (4248): n equals a,t,g, or c
  SITE (4249): n equals a,t,g, or c
  SITE (4250): n equals a,t,g, or c
  SITE (4251): n equals a,t,g, or c
  SITE (4252): n equals a,t,g, or c
  SITE (4253): n equals a,t,g, or c
  SITE (4254): n equals a,t,g, or c
  SITE (4255): n equals a,t,g, or c
  SITE (4256): n equals a,t,g, or c
  SITE (4257): n equals a,t,g, or c
  SITE (4258): n equals a,t,g, or c
  SITE (4259): n equals a,t,g, or c
  SITE (4260): n equals a,t,g, or c
  SITE (4261): n equals a,t,g, or c
  SITE (4262): n equals a,t,g, or c
  SITE (4263): n equals a,t,g, or c
  SITE (4264): n equals a,t,g, or c
  SITE (4265): n equals a,t,g, or c
  SITE (4266): n equals a,t,g, or c
  SITE (4267): n equals a,t,g, or c
  SITE (4268): n equals a,t,g, or c
  SITE (4269): n equals a,t,g, or c
  SITE (4270): n equals a,t,g, or c
  SITE (4271): n equals a,t,g, or c
  SITE (4272): n equals a,t,g, or c
  SITE (4273): n equals a,t,g, or c
  SITE (4274): n equals a,t,g, or c
  SITE (4275): n equals a,t,g, or c
  SITE (4276): n equals a,t,g, or c
  SITE (4277): n equals a,t,g, or c
  SITE (4278): n equals a,t,g, or c
  SITE (4279): n equals a,t,g, or c
  SITE (4280): n equals a,t,g, or c
  SITE (4281): n equals a,t,g, or c
  SITE (4282): n equals a,t,g, or c
  SITE (4283): n equals a,t,g, or c
  SITE (4284): n equals a,t,g, or c
  SITE (4285): n equals a,t,g, or c
  SITE (4286): n equals a,t,g, or c
  SITE (4287): n equals a,t,g, or c
  SITE (4288): n equals a,t,g, or c
  SITE (4289): n equals a,t,g, or c
  SITE (4290): n equals a,t,g, or c
  SITE (4291): n equals a,t,g, or c
  SITE (4292): n equals a,t,g, or c
  SITE (4293): n equals a,t,g, or c
  SITE (4294): n equals a,t,g, or c
  SITE (4295): n equals a,t,g, or c
  SITE (4296): n equals a,t,g, or c
  SITE (4297): n equals a,t,g, or c
  SITE (4298): n equals a,t,g, or c
  SITE (4299): n equals a,t,g, or c
  SITE (4300): n equals a,t,g, or c
  SITE (4301): n equals a,t,g, or c
  SITE (4302): n equals a,t,g, or c
  SITE (4303): n equals a,t,g, or c
  SITE (4304): n equals a,t,g, or c
  SITE (4305): n equals a,t,g, or c
  SITE (4306): n equals a,t,g, or c
  SITE (4307): n equals a,t,g, or c
  SITE (4308): n equals a,t,g, or c
  SITE (4309): n equals a,t,g, or c
  SITE (4310): n equals a,t,g, or c
  SITE (4311): n equals a,t,g, or c
  SITE (4312): n equals a,t,g, or c
  SITE (4313): n equals a,t,g, or c
  SITE (4314): n equals a,t,g, or c
  SITE (4315): n equals a,t,g, or c
  SITE (4316): n equals a,t,g, or c
  SITE (4317): n equals a,t,g, or c
  SITE (4318): n equals a,t,g, or c
  SITE (4319): n equals a,t,g, or c
  SITE (4320): n equals a,t,g, or c
  SITE (4321): n equals a,t,g, or c
  SITE (4322): n equals a,t,g, or c
  SITE (4323): n equals a,t,g, or c
  SITE (4324): n equals a,t,g, or c
  SITE (4325): n equals a,t,g, or c
  SITE (4326): n equals a,t,g, or c
  SITE (4327): n equals a,t,g, or c
  SITE (4328): n equals a,t,g, or c
  SITE (4329): n equals a,t,g, or c
  SITE (4330): n equals a,t,g, or c
  SITE (4331): n equals a,t,g, or c
  SITE (4332): n equals a,t,g, or c
  SITE (4333): n equals a,t,g, or c
  SITE (4334): n equals a,t,g, or c
  SITE (4335): n equals a,t,g, or c
  SITE (4336): n equals a,t,g, or c
  SITE (4337): n equals a,t,g, or c
  SITE (4338): n equals a,t,g, or c
  SITE (4339): n equals a,t,g, or c
  SITE (4340): n equals a,t,g, or c
  SITE (4341): n equals a,t,g, or c
  SITE (4342): n equals a,t,g, or c
  SITE (4343): n equals a,t,g, or c
  SITE (4344): n equals a,t,g, or c
  SITE (4345): n equals a,t,g, or c
  SITE (4346): n equals a,t,g, or c
  SITE (4347): n equals a,t,g, or c
  SITE (4348): n equals a,t,g, or c
  SITE (4349): n equals a,t,g, or c
  SITE (4350): n equals a,t,g, or c
  SITE (4351): n equals a,t,g, or c
  SITE (4352): n equals a,t,g, or c
  SITE (4353): n equals a,t,g, or c
  SITE (4354): n equals a,t,g, or c
  SITE (4355): n equals a,t,g, or c
  SITE (4356): n equals a,t,g, or c
  SITE (4357): n equals a,t,g, or c
  SITE (4358): n equals a,t,g, or c
  SITE (4359): n equals a,t,g, or c
  SITE (4360): n equals a,t,g, or c
  SITE (4361): n equals a,t,g, or c
  SITE (4362): n equals a,t,g, or c
  SITE (4363): n equals a,t,g, or c
  SITE (4364): n equals a,t,g, or c
  SITE (4365): n equals a,t,g, or c
  SITE (4366): n equals a,t,g, or c
  SITE (4367): n equals a,t,g, or c
  SITE (4368): n equals a,t,g, or c
  SITE (4369): n equals a,t,g, or c
  SITE (4370): n equals a,t,g, or c
  SITE (4371): n equals a,t,g, or c
  SITE (4372): n equals a,t,g, or c
  SITE (4373): n equals a,t,g, or c
  SITE (4374): n equals a,t,g, or c
  SITE (4375): n equals a,t,g, or c
  SITE (4376): n equals a,t,g, or c
  SITE (4377): n equals a,t,g, or c
  SITE (4378): n equals a,t,g, or c
  SITE (4379): n equals a,t,g, or c
  SITE (4380): n equals a,t,g, or c
  SITE (4381): n equals a,t,g, or c
  SITE (4382): n equals a,t,g, or c
  SITE (4383): n equals a,t,g, or c
  SITE (4384): n equals a,t,g, or c
  SITE (4385): n equals a,t,g, or c
  SITE (4386): n equals a,t,g, or c
  SITE (4387): n equals a,t,g, or c
  SITE (4388): n equals a,t,g, or c
  SITE (4389): n equals a,t,g, or c
  SITE (4390): n equals a,t,g, or c
  SITE (4391): n equals a,t,g, or c
  SITE (4392): n equals a,t,g, or c
  SITE (4393): n equals a,t,g, or c
  SITE (4394): n equals a,t,g, or c
  SITE (4395): n equals a,t,g, or c
  SITE (4396): n equals a,t,g, or c
  SITE (4397): n equals a,t,g, or c
  SITE (4398): n equals a,t,g, or c
  SITE (4399): n equals a,t,g, or c
  SITE (4400): n equals a,t,g, or c
  SITE (4401): n equals a,t,g, or c
  SITE (4402): n equals a,t,g, or c
  SITE (4403): n equals a,t,g, or c
  SITE (4404): n equals a,t,g, or c
  SITE (4405): n equals a,t,g, or c
  SITE (4406): n equals a,t,g, or c
  SITE (4407): n equals a,t,g, or c
  SITE (4408): n equals a,t,g, or c
  SITE (4409): n equals a,t,g, or c
  SITE (4410): n equals a,t,g, or c
  SITE (4411): n equals a,t,g, or c
  SITE (4412): n equals a,t,g, or c
  SITE (4413): n equals a,t,g, or c
  SITE (4414): n equals a,t,g, or c
  SITE (4415): n equals a,t,g, or c
  SITE (4416): n equals a,t,g, or c
  SITE (4417): n equals a,t,g, or c
  SITE (4418): n equals a,t,g, or c
  SITE (4419): n equals a,t,g, or c
  SITE (4420): n equals a,t,g, or c
  SITE (4421): n equals a,t,g, or c
  SITE (4422): n equals a,t,g, or c
  SITE (4423): n equals a,t,g, or c
  SITE (4424): n equals a,t,g, or c
  SITE (4425): n equals a,t,g, or c
  SITE (4426): n equals a,t,g, or c
  SITE (4427): n equals a,t,g, or c
  SITE (4428): n equals a,t,g, or c
  SITE (4429): n equals a,t,g, or c
  SITE (4430): n equals a,t,g, or c
  SITE (4431): n equals a,t,g, or c
  SITE (4432): n equals a,t,g, or c
  SITE (4433): n equals a,t,g, or c
  SITE (4434): n equals a,t,g, or c
  SITE (4435): n equals a,t,g, or c
  SITE (4436): n equals a,t,g, or c
  SITE (4437): n equals a,t,g, or c
  SITE (4438): n equals a,t,g, or c
  SITE (4439): n equals a,t,g, or c
  SITE (4440): n equals a,t,g, or c
  SITE (4441): n equals a,t,g, or c
  SITE (4442): n equals a,t,g, or c
  SITE (4443): n equals a,t,g, or c
  SITE (4444): n equals a,t,g, or c
  SITE (4445): n equals a,t,g, or c
  SITE (4446): n equals a,t,g, or c
  SITE (4447): n equals a,t,g, or c
  SITE (4448): n equals a,t,g, or c
  SITE (4449): n equals a,t,g, or c
  SITE (4450): n equals a,t,g, or c
  SITE (4451): n equals a,t,g, or c
  SITE (4452): n equals a,t,g, or c
  SITE (4453): n equals a,t,g, or c
  SITE (4454): n equals a,t,g, or c
  SITE (4455): n equals a,t,g, or c
  SITE (4456): n equals a,t,g, or c
  SITE (4457): n equals a,t,g, or c
  SITE (4458): n equals a,t,g, or c
  SITE (4459): n equals a,t,g, or c
  SITE (4460): n equals a,t,g, or c
  SITE (4461): n equals a,t,g, or c
  SITE (4462): n equals a,t,g, or c
  SITE (4463): n equals a,t,g, or c
  SITE (4464): n equals a,t,g, or c
  SITE (4465): n equals a,t,g, or c
  SITE (4466): n equals a,t,g, or c
  SITE (4467): n equals a,t,g, or c
  SITE (4468): n equals a,t,g, or c
  SITE (4469): n equals a,t,g, or c
  SITE (4470): n equals a,t,g, or c
  SITE (4471): n equals a,t,g, or c
  SITE (4472): n equals a,t,g, or c
  SITE (4473): n equals a,t,g, or c
  SITE (4474): n equals a,t,g, or c
  SITE (4475): n equals a,t,g, or c
  SITE (4476): n equals a,t,g, or c
  SITE (4477): n equals a,t,g, or c
  SITE (4478): n equals a,t,g, or c
  SITE (4479): n equals a,t,g, or c
  SITE (4480): n equals a,t,g, or c
  SITE (4481): n equals a,t,g, or c
  SITE (4482): n equals a,t,g, or c
  SITE (4483): n equals a,t,g, or c
  SITE (4484): n equals a,t,g, or c
  SITE (4485): n equals a,t,g, or c
  SITE (4486): n equals a,t,g, or c
  SITE (4487): n equals a,t,g, or c
  SITE (4488): n equals a,t,g, or c
  SITE (4489): n equals a,t,g, or c
  SITE (4490): n equals a,t,g, or c
  SITE (4491): n equals a,t,g, or c
  SITE (4492): n equals a,t,g, or c
  SITE (4493): n equals a,t,g, or c
  SITE (4494): n equals a,t,g, or c
  SITE (4495): n equals a,t,g, or c
  SITE (4496): n equals a,t,g, or c
  SITE (4497): n equals a,t,g, or c
  SITE (4498): n equals a,t,g, or c
  SITE (4499): n equals a,t,g, or c
  SITE (4500): n equals a,t,g, or c
  SITE (4501): n equals a,t,g, or c
  SITE (4502): n equals a,t,g, or c
  SITE (4503): n equals a,t,g, or c
  SITE (4504): n equals a,t,g, or c
  SITE (4505): n equals a,t,g, or c
  SITE (4506): n equals a,t,g, or c
  SITE (4507): n equals a,t,g, or c
  SITE (4508): n equals a,t,g, or c
  SITE (4509): n equals a,t,g, or c
  SITE (4510): n equals a,t,g, or c
  SITE (4511): n equals a,t,g, or c
  SITE (4512): n equals a,t,g, or c
  SITE (4513): n equals a,t,g, or c
  SITE (4514): n equals a,t,g, or c
  SITE (4515): n equals a,t,g, or c
  SITE (4516): n equals a,t,g, or c
  SITE (4517): n equals a,t,g, or c
  SITE (4518): n equals a,t,g, or c
  SITE (4519): n equals a,t,g, or c
  SITE (4520): n equals a,t,g, or c
  SITE (4521): n equals a,t,g, or c
  SITE (4522): n equals a,t,g, or c
  SITE (4523): n equals a,t,g, or c
  SITE (4524): n equals a,t,g, or c
  SITE (4525): n equals a,t,g, or c
  SITE (4526): n equals a,t,g, or c
  SITE (4527): n equals a,t,g, or c
  SITE (4528): n equals a,t,g, or c
  SITE (4529): n equals a,t,g, or c
  SITE (4530): n equals a,t,g, or c
  SITE (4531): n equals a,t,g, or c
  SITE (4532): n equals a,t,g, or c
  SITE (4533): n equals a,t,g, or c
  SITE (4534): n equals a,t,g, or c
  SITE (4535): n equals a,t,g, or c
  SITE (4536): n equals a,t,g, or c
  SITE (4537): n equals a,t,g, or c
  SITE (4538): n equals a,t,g, or c
  SITE (4539): n equals a,t,g, or c
  SITE (4540): n equals a,t,g, or c
  SITE (4541): n equals a,t,g, or c
  SITE (4542): n equals a,t,g, or c
  SITE (4543): n equals a,t,g, or c
  SITE (4544): n equals a,t,g, or c
  SITE (4545): n equals a,t,g, or c
  SITE (4546): n equals a,t,g, or c
  SITE (4547): n equals a,t,g, or c
  SITE (4548): n equals a,t,g, or c
  SITE (4549): n equals a,t,g, or c
  SITE (4550): n equals a,t,g, or c
  SITE (4551): n equals a,t,g, or c
  SITE (4552): n equals a,t,g, or c
  SITE (4553): n equals a,t,g, or c
  SITE (4554): n equals a,t,g, or c
  SITE (4555): n equals a,t,g, or c
  SITE (4556): n equals a,t,g, or c
  SITE (4557): n equals a,t,g, or c
  SITE (4558): n equals a,t,g, or c
  SITE (4559): n equals a,t,g, or c
  SITE (4560): n equals a,t,g, or c
  SITE (4561): n equals a,t,g, or c
  SITE (4562): n equals a,t,g, or c
  SITE (4563): n equals a,t,g, or c
  SITE (4564): n equals a,t,g, or c
  SITE (4565): n equals a,t,g, or c
  SITE (4566): n equals a,t,g, or c
  SITE (4567): n equals a,t,g, or c
  SITE (4568): n equals a,t,g, or c
  SITE (4569): n equals a,t,g, or c
  SITE (4570): n equals a,t,g, or c
  SITE (4571): n equals a,t,g, or c
  SITE (4572): n equals a,t,g, or c
  SITE (4573): n equals a,t,g, or c
  SITE (4574): n equals a,t,g, or c
  SITE (4575): n equals a,t,g, or c
  SITE (4576): n equals a,t,g, or c
  SITE (4577): n equals a,t,g, or c
  SITE (4578): n equals a,t,g, or c
  SITE (4579): n equals a,t,g, or c
  SITE (4580): n equals a,t,g, or c
  SITE (4581): n equals a,t,g, or c
  SITE (4582): n equals a,t,g, or c
  SITE (4583): n equals a,t,g, or c
  SITE (4584): n equals a,t,g, or c
  SITE (4585): n equals a,t,g, or c
  SITE (4586): n equals a,t,g, or c
  SITE (4587): n equals a,t,g, or c
  SITE (4588): n equals a,t,g, or c
  SITE (4589): n equals a,t,g, or c
  SITE (4590): n equals a,t,g, or c
  SITE (4591): n equals a,t,g, or c
  SITE (4592): n equals a,t,g, or c
  SITE (4593): n equals a,t,g, or c
  SITE (4594): n equals a,t,g, or c
  SITE (4595): n equals a,t,g, or c
  SITE (4596): n equals a,t,g, or c
  SITE (4597): n equals a,t,g, or c
  SITE (4598): n equals a,t,g, or c
  SITE (4599): n equals a,t,g, or c
  SITE (4600): n equals a,t,g, or c
  SITE (4601): n equals a,t,g, or c
  SITE (4602): n equals a,t,g, or c
  SITE (4603): n equals a,t,g, or c
  SITE (4604): n equals a,t,g, or c
  SITE (4605): n equals a,t,g, or c
  SITE (4606): n equals a,t,g, or c
  SITE (4607): n equals a,t,g, or c
  SITE (4608): n equals a,t,g, or c
  SITE (4609): n equals a,t,g, or c
  SITE (4610): n equals a,t,g, or c
  SITE (4611): n equals a,t,g, or c
  SITE (4612): n equals a,t,g, or c
  SITE (4613): n equals a,t,g, or c
  SITE (4614): n equals a,t,g, or c
  SITE (4615): n equals a,t,g, or c
  SITE (4616): n equals a,t,g, or c
  SITE (4617): n equals a,t,g, or c
  SITE (4618): n equals a,t,g, or c
  SITE (4619): n equals a,t,g, or c
  SITE (4620): n equals a,t,g, or c
  SITE (4621): n equals a,t,g, or c
  SITE (4622): n equals a,t,g, or c
  SITE (4623): n equals a,t,g, or c
  SITE (4624): n equals a,t,g, or c
  SITE (4625): n equals a,t,g, or c
  SITE (4626): n equals a,t,g, or c
  SITE (4627): n equals a,t,g, or c
  SITE (4628): n equals a,t,g, or c
  SITE (4629): n equals a,t,g, or c
  SITE (4630): n equals a,t,g, or c
  SITE (4631): n equals a,t,g, or c
  SITE (4632): n equals a,t,g, or c
  SITE (4633): n equals a,t,g, or c
  SITE (4634): n equals a,t,g, or c
  SITE (4635): n equals a,t,g, or c
  SITE (4636): n equals a,t,g, or c
  SITE (4637): n equals a,t,g, or c
  SITE (4638): n equals a,t,g, or c
  SITE (4639): n equals a,t,g, or c
  SITE (4640): n equals a,t,g, or c
  SITE (4641): n equals a,t,g, or c
  SITE (4642): n equals a,t,g, or c
  SITE (4643): n equals a,t,g, or c
  SITE (4644): n equals a,t,g, or c
  SITE (4645): n equals a,t,g, or c
  SITE (4646): n equals a,t,g, or c
  SITE (4647): n equals a,t,g, or c
  SITE (4648): n equals a,t,g, or c
  SITE (4649): n equals a,t,g, or c
  SITE (4650): n equals a,t,g, or c
  SITE (4651): n equals a,t,g, or c
  SITE (4652): n equals a,t,g, or c
  SITE (4653): n equals a,t,g, or c
  SITE (4654): n equals a,t,g, or c
  SITE (4655): n equals a,t,g, or c
  SITE (4656): n equals a,t,g, or c
  SITE (4657): n equals a,t,g, or c
  SITE (4658): n equals a,t,g, or c
  SITE (4659): n equals a,t,g, or c
  SITE (4660): n equals a,t,g, or c
  SITE (4661): n equals a,t,g, or c
  SITE (4662): n equals a,t,g, or c
  SITE (4663): n equals a,t,g, or c
  SITE (4664): n equals a,t,g, or c
  SITE (4665): n equals a,t,g, or c
  SITE (4666): n equals a,t,g, or c
  SITE (4667): n equals a,t,g, or c
  SITE (4668): n equals a,t,g, or c
  SITE (4669): n equals a,t,g, or c
  SITE (4670): n equals a,t,g, or c
  SITE (4671): n equals a,t,g, or c
  SITE (4672): n equals a,t,g, or c
  SITE (4673): n equals a,t,g, or c
  SITE (4674): n equals a,t,g, or c
  SITE (4675): n equals a,t,g, or c
  SITE (4676): n equals a,t,g, or c
  SITE (4677): n equals a,t,g, or c
  SITE (4678): n equals a,t,g, or c
  SITE (4679): n equals a,t,g, or c
  SITE (4680): n equals a,t,g, or c
  SITE (4681): n equals a,t,g, or c
  SITE (4682): n equals a,t,g, or c
  SITE (4683): n equals a,t,g, or c
  SITE (4684): n equals a,t,g, or c
  SITE (4685): n equals a,t,g, or c
  SITE (4686): n equals a,t,g, or c
  SITE (4687): n equals a,t,g, or c
  SITE (4688): n equals a,t,g, or c
  SITE (4689): n equals a,t,g, or c
  SITE (4690): n equals a,t,g, or c
  SITE (4691): n equals a,t,g, or c
  SITE (4692): n equals a,t,g, or c
  SITE (4693): n equals a,t,g, or c
  SITE (4694): n equals a,t,g, or c
  SITE (4695): n equals a,t,g, or c
  SITE (4696): n equals a,t,g, or c
  SITE (4697): n equals a,t,g, or c
  SITE (4698): n equals a,t,g, or c
  SITE (4699): n equals a,t,g, or c
  SITE (4700): n equals a,t,g, or c
  SITE (4701): n equals a,t,g, or c
  SITE (4702): n equals a,t,g, or c
  SITE (4703): n equals a,t,g, or c
  SITE (4704): n equals a,t,g, or c
  SITE (4705): n equals a,t,g, or c
  SITE (4706): n equals a,t,g, or c
  SITE (4707): n equals a,t,g, or c
  SITE (4708): n equals a,t,g, or c
  SITE (4709): n equals a,t,g, or c
  SITE (4710): n equals a,t,g, or c
  SITE (4711): n equals a,t,g, or c
  SITE (4712): n equals a,t,g, or c
  SITE (4713): n equals a,t,g, or c
  SITE (4714): n equals a,t,g, or c
  SITE (4715): n equals a,t,g, or c
  SITE (4716): n equals a,t,g, or c
  SITE (4717): n equals a,t,g, or c
  SITE (4718): n equals a,t,g, or c
  SITE (4719): n equals a,t,g, or c
  SITE (4720): n equals a,t,g, or c
  SITE (4721): n equals a,t,g, or c
  SITE (4722): n equals a,t,g, or c
  SITE (4723): n equals a,t,g, or c
  SITE (4724): n equals a,t,g, or c
  SITE (4725): n equals a,t,g, or c
  SITE (4726): n equals a,t,g, or c
  SITE (4727): n equals a,t,g, or c
  SITE (4728): n equals a,t,g, or c
  SITE (4729): n equals a,t,g, or c
  SITE (4730): n equals a,t,g, or c
  SITE (4731): n equals a,t,g, or c
  SITE (4732): n equals a,t,g, or c
  SITE (4733): n equals a,t,g, or c
  SITE (4734): n equals a,t,g, or c
  SITE (4735): n equals a,t,g, or c
  SITE (4736): n equals a,t,g, or c
  SITE (4737): n equals a,t,g, or c
  SITE (4738): n equals a,t,g, or c
  SITE (4739): n equals a,t,g, or c
  SITE (4740): n equals a,t,g, or c
  SITE (4741): n equals a,t,g, or c
  SITE (4742): n equals a,t,g, or c
  SITE (4743): n equals a,t,g, or c
  SITE (4744): n equals a,t,g, or c
  SITE (4745): n equals a,t,g, or c
  SITE (4746): n equals a,t,g, or c
  SITE (4747): n equals a,t,g, or c
  SITE (4748): n equals a,t,g, or c
  SITE (4749): n equals a,t,g, or c
  SITE (4750): n equals a,t,g, or c
  SITE (4751): n equals a,t,g, or c
  SITE (4752): n equals a,t,g, or c
  SITE (4753): n equals a,t,g, or c
  SITE (4754): n equals a,t,g, or c
  SITE (4755): n equals a,t,g, or c
  SITE (4756): n equals a,t,g, or c
  SITE (4757): n equals a,t,g, or c
  SITE (4758): n equals a,t,g, or c
  SITE (4759): n equals a,t,g, or c
  SITE (4760): n equals a,t,g, or c
  SITE (4761): n equals a,t,g, or c
  SITE (4762): n equals a,t,g, or c
  SITE (4763): n equals a,t,g, or c
  SITE (4764): n equals a,t,g, or c
  SITE (4765): n equals a,t,g, or c
  SITE (4766): n equals a,t,g, or c
  SITE (4767): n equals a,t,g, or c
  SITE (4768): n equals a,t,g, or c
  SITE (4769): n equals a,t,g, or c
  SITE (4770): n equals a,t,g, or c
  SITE (4771): n equals a,t,g, or c
  SITE (4772): n equals a,t,g, or c
  SITE (4773): n equals a,t,g, or c
  SITE (4774): n equals a,t,g, or c
  SITE (4775): n equals a,t,g, or c
  SITE (4776): n equals a,t,g, or c
  SITE (4777): n equals a,t,g, or c
  SITE (4778): n equals a,t,g, or c
  SITE (4779): n equals a,t,g, or c
  SITE (4780): n equals a,t,g, or c
  SITE (4781): n equals a,t,g, or c
  SITE (4782): n equals a,t,g, or c
  SITE (4783): n equals a,t,g, or c
  SITE (4784): n equals a,t,g, or c
  SITE (4785): n equals a,t,g, or c
  SITE (4786): n equals a,t,g, or c
  SITE (4787): n equals a,t,g, or c
  SITE (4788): n equals a,t,g, or c
  SITE (4789): n equals a,t,g, or c
  SITE (4790): n equals a,t,g, or c
  SITE (4791): n equals a,t,g, or c
  SITE (4792): n equals a,t,g, or c
  SITE (4793): n equals a,t,g, or c
  SITE (4794): n equals a,t,g, or c
  SITE (4795): n equals a,t,g, or c
  SITE (4796): n equals a,t,g, or c
  SITE (4797): n equals a,t,g, or c
  SITE (4798): n equals a,t,g, or c
  SITE (4799): n equals a,t,g, or c
  SITE (4800): n equals a,t,g, or c
  SITE (4801): n equals a,t,g, or c
  SITE (4802): n equals a,t,g, or c
  SITE (4803): n equals a,t,g, or c
  SITE (4804): n equals a,t,g, or c
  SITE (4805): n equals a,t,g, or c
  SITE (4806): n equals a,t,g, or c
  SITE (4807): n equals a,t,g, or c
  SITE (4808): n equals a,t,g, or c
  SITE (4809): n equals a,t,g, or c
  SITE (4810): n equals a,t,g, or c
  SITE (4811): n equals a,t,g, or c
  SITE (4812): n equals a,t,g, or c
  SITE (4813): n equals a,t,g, or c
  SITE (4814): n equals a,t,g, or c
  SITE (4815): n equals a,t,g, or c
  SITE (4816): n equals a,t,g, or c
  SITE (4817): n equals a,t,g, or c
  SITE (4818): n equals a,t,g, or c
  SITE (4819): n equals a,t,g, or c
  SITE (4820): n equals a,t,g, or c
  SITE (4821): n equals a,t,g, or c
  SITE (4822): n equals a,t,g, or c
  SITE (4823): n equals a,t,g, or c
  SITE (4824): n equals a,t,g, or c
  SITE (4825): n equals a,t,g, or c
  SITE (4826): n equals a,t,g, or c
  SITE (4827): n equals a,t,g, or c
  SITE (4828): n equals a,t,g, or c
  SITE (4829): n equals a,t,g, or c
  SITE (4830): n equals a,t,g, or c
  SITE (4831): n equals a,t,g, or c
  SITE (4832): n equals a,t,g, or c
  SITE (4833): n equals a,t,g, or c
  SITE (4834): n equals a,t,g, or c
  SITE (4835): n equals a,t,g, or c
  SITE (4836): n equals a,t,g, or c
  SITE (4837): n equals a,t,g, or c
  SITE (4838): n equals a,t,g, or c
  SITE (4839): n equals a,t,g, or c
  SITE (4840): n equals a,t,g, or c
  SITE (4841): n equals a,t,g, or c
  SITE (4842): n equals a,t,g, or c
  SITE (4843): n equals a,t,g, or c
  SITE (4844): n equals a,t,g, or c
  SITE (4845): n equals a,t,g, or c
  SITE (4846): n equals a,t,g, or c
  SITE (4847): n equals a,t,g, or c
  SITE (4848): n equals a,t,g, or c
  SITE (4849): n equals a,t,g, or c
  SITE (4850): n equals a,t,g, or c
  SITE (4851): n equals a,t,g, or c
  SITE (4852): n equals a,t,g, or c
  SITE (4853): n equals a,t,g, or c
  SITE (4854): n equals a,t,g, or c
  SITE (4855): n equals a,t,g, or c
  SITE (4856): n equals a,t,g, or c
  SITE (4857): n equals a,t,g, or c
  SITE (4858): n equals a,t,g, or c
  SITE (4859): n equals a,t,g, or c
  SITE (4860): n equals a,t,g, or c
  SITE (4861): n equals a,t,g, or c
  SITE (4862): n equals a,t,g, or c
  SITE (4863): n equals a,t,g, or c
  SITE (4864): n equals a,t,g, or c
  SITE (4865): n equals a,t,g, or c
  SITE (4866): n equals a,t,g, or c
  SITE (4867): n equals a,t,g, or c
  SITE (4868): n equals a,t,g, or c
  SITE (4869): n equals a,t,g, or c
  SITE (4870): n equals a,t,g, or c
  SITE (4871): n equals a,t,g, or c
  SITE (4872): n equals a,t,g, or c
  SITE (4873): n equals a,t,g, or c
  SITE (4874): n equals a,t,g, or c
  SITE (4875): n equals a,t,g, or c
  SITE (4876): n equals a,t,g, or c
  SITE (4877): n equals a,t,g, or c
  SITE (4878): n equals a,t,g, or c
  SITE (4879): n equals a,t,g, or c
  SITE (4880): n equals a,t,g, or c
  SITE (4881): n equals a,t,g, or c
  SITE (4882): n equals a,t,g, or c
  SITE (4883): n equals a,t,g, or c
  SITE (4884): n equals a,t,g, or c
  SITE (4885): n equals a,t,g, or c
  SITE (4886): n equals a,t,g, or c
  SITE (4887): n equals a,t,g, or c
  SITE (4888): n equals a,t,g, or c
  SITE (4889): n equals a,t,g, or c
  SITE (4890): n equals a,t,g, or c
  SITE (4891): n equals a,t,g, or c
  SITE (4892): n equals a,t,g, or c
tattnnnnnnnnnnnnnnnnnnnnnnnnnnnnnnnnnnnnnnnnnnnnnnnnnnnnnnnnnnnnnnnnnnnnnnnnnnnnnnnnnnnnnnnnnnnnnnnnnnnnnnnnnnnnnnnnnnnnnnnnnnnnnnnnnnnnnnnnnnnnnnnnnnnnnnnnnnnnnnnnnnnnnnnnnnnnnnnnnnnnnnnnnnnnnnnnnnnnnnnnnnnnnnnnnnnnnnnnnnnnnnnnnnnnnnnnnnnnnnnnnnnnnnnnnnnnnnnnnnnnnnnnnnnnnnnnnnnnnnnnnnnnnnnnnnnnnnnnnnnntgagatagaatctcactctgttgcccaggctggggtgcagtggtgcgatctcagctccccacaacctctgcctccagggttcaagcaattctcctgcctcagcctcctgagtatctgggattacaggcatgcaccactacgcttggctaatttttgtatttttagtagagacggggtttcaccatgttggccaggctggtcttgaactcctgacctcaggtgattcgcccgccttggcctcccaaagtgctgggattacaggcatgagccaccgtgcctggctgaaagttcattttcaatagcatagtccagaccattttttttctaaatgtgctaccagaatcaaagaaataataacattccattaaaacaaataaaatggcattaaattaaatgttctgcataatttaagagccctgaccaattttagtcttttttttttttttgagacagagtctcactgtgtcgcccaggctggagtgcagtggtacgatcttggctcactgcagcctccacctcctgggttcaagtgattctcctgcctcaacctcccgagcagctgggattacaggcatgtgccaccatacctggctaatttttatatctttagtagagatggggtttcaccatgttggccaggctggtctcaaactcttgacctcaggtgatctgcccgcctcggcctcccaaagtgctggcattacaggcatgagtcactgcgcctggcctagtctattattaacaaataaaaattttaatacataaaaatggatggatattttctagagccttaattaagtaattcactccaaatgtcttttttttttttttttttagctagtaagtggagacactttgaaacatggtgcttaaaaaaaaacacactacctacctggtgggctgtttcatggtgaaataacttattctgtataatttgaatgcaattcagatactatgtagatgttaaaaagctaagttaacataaaatgtacatcatgaaacgtcaccttacttgacggcattaatacattttttccactaaaatacttgtaaccatggccatcagtatgaagaaaaattttaaacacgatgaaaggtggaaacgtttcacctctaaatctgaaataaagataaaaatttagttatttggcatcaggttttgggctcagttgcttttcccccttatacttaagatagttcatatagtttcttgcatacagggtaaaggctatgtcagagcatgtaaagaactggtaatgaaatggatcacataggatgtaagacccacactttggtgtactcacaactattctcatacctgtgtaagactgaatacagaatgggagatgagagctactctcatggcaacttttagccacagagtcatgcctcggtttctttacataacaaatgtaaataagaataacacatttactttgtaattaagttctgagaagttacaagaatttaaaaaatccatatctaagatttcctcatattaactaagtacttcttgaaataaatcagcatagatacattacctgaatctaattttacactgcatagtaggatccttaataagcttagcctctaagggggccactttcttcagtatttcatgtgttacatagaattcctgaaataaaggacagtgctgtaaaaggaaagcagtatcccacccagacacaatttatggactataacagaggcaacgtggtaaagtgaacattatgctggacttggagttctgaaggggtgggtttttgttttggcacctccacttactatctgtgtagccttgagccagttacttaatcattttggcctccaactttggttatctgtcccttttagagatcaaaggcactattatttccctatgacagcacttttcacaatatattataattacttatcaacttgtctgtgcctcctactagactgtaagcttcatgaaggtagggatggtggcttttctctttaccactatattcctagcatctaatacagtgcctggaacacagcagatgcttaagaagtatttgttgaatgaatcactgtaagatgaggatgataatagtaataagttactagcttttaagcaccttttatgtaccatatactactatgttaggtgccttatatacattagctcatttaatccttacatcagcaacactatgagaattttttgtttgttttgagacagagtctcgctccgtcgcccaggctcgagtgcggtggcatgatctcggctcactgcaacctccgcctcccaggttcaagcgattctcctgcctcagcctcccgagtagctgggactacaggcacctgccaccacgcccggctaattttgtattttttcagtagagacggggtttcaccatattggccaggctggcctggaactcctgaccttgtgagccgcacgcctcagcctcccaaagtgctgggattacaggtgtgagccaccactcaggctgcagtgcaatggcatgatctcggctcaccgcaacctccacctcccaggttcaagtgattctcctgctcagcctcctgagtagctggaattacaggcatgcgccaccatgcctggctaattttgtatttttaatagagatggggtttcttcatgttggtcaggctggtctcgagctcccgacttcaggtgatccacccgcctcagcctcccaaagtgctgggattacaggcgtgagccactgcacctggcccattatgagaatattatcacgcctattttacagatgagaaggctgaggctcagggaatttttgtaatttataaaaaggcatacaggtagtgaatggggaagccaggattcatttagttctgtttgactctaaagtcccaactctttcccccaaacaaccccaaccaaccccgttatgcctatgataatcacataaaaatgtacactaaagagcttttaggctgggcactgcggctcacgcctataatcctggcactttgggaggccaaagcgggaggatcacctgaggtcaagagttcgagaccaacctggtcaacatggtgaaaccccatctctactaaaaatacaaaaattagccaggcgtgatggcaggcgcctgtagtccaagctatttgggaggctgaagcaggagaatcgcttgaacccgggaggcagaggttgcagggagccgagatcgtgccactgcactccagcctgggtgacagagcaagactctgctcaaaataaataaataaatagcttttaaaaggacaaagcattattaatttaaggtattaaagtattactataacagataaaaaagaatttccttctgttacaaaagtctaaaaatactatgaaaccagcattataaaattaaatacaagttccatattcaaagacaatggataatagacctgaaatgccaggagtttacctgggtgggttttctctgaagtattcagacggagtcttgctctgtcgcccaggctggagtgcagtggctcaaactcggctcactataacctccacctccccggttcaaggtagctgggattacaggcgcacaccaccatgcccggctaatttttttgtatttttaggagagacggggtattcaccatggtgaccggactggtctcgaactnnnnnnnnnnnnnnnnnnnnnnnnnnnnnnnnnnnnnnnnnnnnnnnnnnnnnnnnnnnnnnnnnnnnnnnnnnnnnnnnnnnnnnnnnnnnnnnnnnnnnnnnnnnnnnnnnnnnnnnnnnnnnnnnnnnnnnnnnnnnnnnnnnnnnnnnnnnnnnnnnnnnnnnnnnnnnnnnnnnnnnnnnnnnnnnnnnnnnnnnnnnnnnnnnnnnnnnnnnnnnnnnnnnnnnnnnnnnnnnnnnnnnnnnnnnnnnnnnnnnnnnnnnnnnnnnnnnnnnnnnnnnnnnnnnnnnnnnnnnnnnnnnnnnnnnnnnnnnnnnnnnnnnnnnnnnnnnnnnnnnnnnnnnnnnnnnnnnnnnnnnnnnnnnnnnnnnnnnnnnnnnnnnnnnnnnnnnnnnnnnnnnnnnnnnnnnnnnnnnnnnnnnnnnnnnnnnnnnnnnnnnnnnnnnnnnnnnnnnnnnnnnnnnnnnnnnnnnnnnnnnnnnnnnnnnnnnnnnnnnnnnnnnnnnnnnnnnnnnnnnnnnnnnnnnnnnnnnnnnnnnnnnnnnnnnnnnnnnnnnnnnnnnnnnnnnnnnnnnnnnnnnnnnnnnnnnnnnnnnnnnnnnnnnnnnnnnnnnnnnnnnnnnnnnnnnnnnnnnnnnnnnnnnnnnnnnnnnnnnnnnnnnnnnnnnnnnnnnnnnnnnnnnnnnnnnnnnnnnnnnnnnnnnnnnnnnnnnnnnnnnnnnnnnnnnnnnnnnnnnnnnnnnnnnnnnnnnnnnnnnnnnnnnnnnnnnnnnnnnnnnnnnnnnnnnnnnnnnnnnnnnnnnnnnnnnnnnnnnnnnnnnnnnnnnnnnnnnnnnnnnnnnnnnnnnnnnnnnnnnnnnnnnnnnnnnnnnnnnnnnnnnnnnnnnnnnnnnnnnnnnnnnnnnnnnnnnnnnnnnnnnnnnnnnnnnnnnnnnnnnnnnnnnnnnaaaaaaaaaattagctgggcatggcggcacgcacctgtagtcccagctactagggaggcggaggcaggataatcccttgaacctgggtggtggaggttgcagtgagccaagatcatgcccctgcactccagcctgggcaacagagtgagacttcatctcaaaaaagaaaagaaaaaaaagagtatcactaataata

SEQ ID NO: 1761 - DNA, 226 bp, Homo sapiens
aagaagccgggtgcggtggctcacgcctgtaatcccagcactttgggaggccgaggcgggcagatcacaaggtcaggaaattgagaccatcctggctaacatggtgaaaccccatctctactaaaaatacaaaaaaattagctggacgtggtggtgggcacctgtagtcccagctactcgggaagctgaggcaggagaatggtgcgaacccaggaggcagagcttg

SEQ ID NO: 1762 - DNA, 228 bp, Homo sapiens
tcgaggtcaggagattgagaccatcctggctaacatggtgaaaccccatctctactaaaaatacaaaaaaaattagccgggcgtggtggcgggagcctgtagtcccagctactcgggaggttgaggcaggagaatggcgtgaacctgggaggcggagcttgtagtgagccaagatcatgccactgcactccagcctgggcgacagagcgagactccgtctcaaaaaaa

SEQ ID NO: 1763 - DNA, 483 bp, Homo sapiens
tcttgccagaagatactttgagtgtgagtatactgtttctcatcatgttctcctccactaattctagcctccatctgtagtttttgcttgcagtaataatgatttcagcttttgtctagtgtggctttgtatttcaccatctcttctgcatttactaattggaattctttggtccctacttccctatctatttattgaattatttattgaagcttattttaaaagtatggtaatgcgccacgtaatgtttcggtcaacagcagaccacatatacaatggtggtctcatacgattatatcatattttaactgcacttttctgtgttagatgtttagatacacagatacacagtgttgcaatgcctacagtattcagtacagtcacatgctgtacagggttagtgcaggtgtgtagtaagctgtaccatccaggtctgtgtgagtattgtatactctgatgcacgcatggcaacagaatggcctg

SEQ ID NO: 1764 - DNA, 451 bp, Homo sapiens
ggaacaggtggtggggtagtgtgcagatgtggaaatgggcctgcaacggccagatcccttcctttgtcccaggtattgtttggaagcatcatttgtagtgaatgactaatagtgttctgaagcattttctattgttctaagttgtttccatcattctatattattaaaagtattacatagttggctgggcgcggtggctaacgcctgtaatcccagcactttgggaggctgaggagggcagatcatatgaggtcaggagttagagaccagcttggccaacaaggtgaaaccccgtctctactaaaaatacaaaaattagctgggcatggtggtacacgcctctaatctcagctacttaggaggctgaggcaggagaatctcttgaacctggaaggtggaggttgcagtgagctgaaatcaggccactgtactctagcctgggcaacagagt

SEQ ID NO: 1765 - DNA, 500 bp, Homo sapiens
gaaacctaagtgaatttaatggctagacttcagttgcattcccaagatctctcattatgtatatgcaaatattttgaaattcaacctggttccacacattttagataagggatactcaagctgtaattaacaaataaacttttcacagtccaagcagccaaaggcccactgtccctgttccctcagctcacgcccccttccgtgcacagccttatctaatccttctacccttcgttgtgtttggacttcagactctttttttttaagacaaagtcccgctctgttgcccaggctggagtgcagtggcgcgatctcagctcaacctctgcccccaggttcaagcaattctcatgtctcagcctcccgagtagctgggattacagacacccgtcaccacggctggctaatttttgtatttttaatggagacggggtttcaccatgttggccaggctggtctcaaactcctgacctcaggtgatccgcccccatcagcctccc

SEQ ID NO: 1766 - DNA, 281 bp, Homo sapiens
tttttttttttttgagacagagtcttgctctgtcacccaggttggagtgcagtggcatgatctcggctcactgcaagctcgcctcccaggttcacgccattctcctgcctcagcctcctgagtagctgggactacaggcgcccgcatgacgcccggctaattttttgtatttttagtagagacggggtttcactgtgttagccaggatggtctcgatctcctgacctcgtgatctgcccacctcagcctccgaaagtgctgggattacagacatgagccac

SEQ ID NO: 1767 - DNA, 98 bp, Homo sapiens
ttttttttttgagacagagtctcactctgttgcccaggctggagtgcagtgacgcgatctcggctcactgcaacctctgcctcccgggttcaagtgat

SEQ ID NO: 1768 - DNA, 30352 bp, Homo sapiens
acagggggagaagcactacacctaatcctcttacctgctacaggcaatgtggcagagaattctccacctgggacttcagtgcacaagttttctgtgaagttatcagcatcattgtcacctgtgatcccaggatttccccagatagtcaactcaaatcccctcactgaagcttttagggtgaattggctgtcaggcacctactttgaggtaagtaacaacttaccaacatgagtgttgcctgcaaagaggtgatcctgaaaatgagggtggatgggatgccagatcagtgattaattcctccatctggtttaatcttccctcttgtaaggtccaggagtcctgtctgaggcatcccagggccttctgtgctaagatgctcgtgtagcctttggaccttccccactccatacagtttacataagcattatgctcaatgtgttgcaaatagagagctgcttcttatggcctccatccctcacatgacatcaggtgtttggtgtgcctacagtatctaaattctttcggtggagtagtttggatattgatctccctaaaagccatgccctgatgtacttgtgtctagtgattctgctttcctatgagtctgattttttcagaagataatctaagaggagacttatttaattaaaaagccatacaccctttaacaaaaatataagtctaaatgtccagccctaccatgtgaatgtttcctcttggataattcagagccaaccattgacattcaagaggcatgcctctgctgctctgttttctagtttgtcatttgaatcttttccaaagctgtcacttccctaaagtggggacaagcctgcttcttgcatgctttccactggtaaccgcagaggccttctaaggtgtctttagggtcccatgtctggatctgcctatgtttcagtattccctgcccccacctccttcctcaactgtcctgggaacttcctgctgttatcatcagctctgccattggtccaacctgccattcctctgggtcctgagtcagggttgcttccctgaggttcccattacgtgttcttaaactcagcttatcattagtcactaggagagctttgaaaaagcatgcatattggggccctgtagcagacctgcggaacccatgactggaggccagagcccagatttccggtattctcatcaccctgggggagccctcggggaggtaaggagcacacattcagtcagtctacattgcagcatgcggtttacattcctgggtcccagatgctggttctgtgactgaactgccctgtctactgactccctagacattcagcttgtctttaacagctgctgctgctccttggttcctgtaagccttgtcaattgcttacccttatagagcacgttgtgtacactgggtactgttgacagtgctttgcgtgtgtttgcttttctagtctcaaaacataaggattgtatccatcttattacctccttttcacagatggggaaaatgacgcacagagagattaggtaatttgccctgggttgtacagctagtaggtaactaagctgagaatggaagccaggcagtctggctccagtgctctcattttaaaaaacagctttattgagtataattcacagagcatatactccagccatttaaattgtacaattcggtagtttttagtatattcacagtcatgcaagcatcaccacaatctaattttagattattttcatcaccccaaaacaaaaccctgtacccattagcagtcactcagctattcccttatccctccaatccctggcaaccactaatctactttgtctttatggattttcctattctggacatttcctatgaatggaatcattatagtatgtggtctttaatgactgacttctttcccttagcataaggttccaagggtcacccatgttgtagcctggatcagtacttcattgctttttatggctgaattatattatgttccatattttgttttttcattcatcaattgacagacatttgggttgtctccacgtgggagttctcatccttagcatttatggtctacagcatttagtgatgaagatgatcatgttcctttgaatttgcatagaggctccaaggcacattcacatacctgatctcttttttttttttttttttgagatggggtctcactatgctgcccaggctgcacttgcattcctgggctcaagtgatcctctcgcctcagcctccccagtagctgagactacaggcactgcaccaccacacgtggtttcatctcttgattgttacaacattaatatcactatttagaaatgttttattcctgttttagatataacagagacccagcaagtttaaatgatttatctgagatcacatagccgtaaaaggtgaaataagaacttcattcagtctcctgatttccagttccaggctttctgtcatattgccatgtatgtctatcgctgtttgtgtgagctctcaactctttcttcaagggacctgctcttcccacattctgtgggattcaagcagggctgttaatcaaggaagaattccatcctgttcctaacctctagaaatggcagattgcttagcacctcaactcatctaggctcaagtgtttggtgtattgtcctagtcctgtgccctccttgcatcacatcccgcagctgcgtacaaccctgtgttggtactaagatgggccacagtttcacaagtcatgaagctgttcttaagaactgattgcttctccccagaaactacccaacgtcctctaccatccctccaagaagatcctactctccaaccgaaattgctcacaagagttactcctgcagccttccagacatgaaaatctccatggcagaatctggcccctccttggatagccttgacattctggaggatggcgagtctgggtcaccatttcttgtgactcatttgtactttctgggggtaaactccaaatcatgcaagaggccaagcctccctgctttgggacacagctattgagacttctggtggtgcagggggtggtgaggaggagtaatgataataatgaggaggaggatgctaacatttcatttacggggcatttaccatatgccaggaatttccctaaatattttgtgaatgcatttatttaatcctcataagaatgctatgaagtggtgtactgttgcttgcacactgaaggtgggaaaactgaggcatagagaggttgagcaacttgcccaagttcacataactaggagatggcaggcttgagatttgcaatcaggtaggctgccccaagaattattgttcatagccctcatgctgcgctggtttgctactgcccagcaagagggatgtcctcattcagccacttgtagctaatcataggtcaagggtgttttcctggagcagcaccagaagcatagcttaagaggccagggaagagtgactgccagctggctgcggagagaggggctctctgaagtcctgtggaggccagcacctgcccctctttcatttgtccatctctgagcttgactcccctcttttcccatctactgtcgtgagcactgtggcctacaaatgtgctcggccttatccagaacaacctcaaatttaacatgcctaaagtgaaacttactgtctttcactaaaactctgtagcaaggttgcccacaaccaaatcgagggtccaccactcccagctatgaccttaggagagctccttcccctccctctcctagctaatctccttaaatgtgaaatggaggaagttttaccaacctatggtcattgtgacaatcaaatgaaatactccacagaatgacttggcaagtctggcacataaatgctcaataaatgctggtaacaacaacaacgagaacagtttttccatttgtgttgagagcaaccccattcttttggttccaagatacaacatttttggaccattttttgactgttctatttccttcctctggggtgtgagagctactccccaaggagaagaggctggcaataggtaatactgaggtcaaggatctatccaagcttggcatgcaggaggaggctccaggcttagcagggagccaggttgtaaatcaggaagccagggtgtaaatcatgagaggggatcatctcaacagaagtccacctgctctggtggacatatattccttgaacagtttttgactacttaatgattagaaaagtcaccatttgcagagtgtttgctcagtgccagacagtcttctaagtacttcccatagattagctcatcgaatcctcatgataacccaaaaagtaggtgttattatccccattttacagatgggaaaactaaggcacaggaaggttaagcaatgggaaggctgggctttcaagccagtcagtctggctccagcatctgtgtgtttgacccctgtgctgcccctcactaccatgtgcccagcatagagaccagttcatctacacttacgtggctcctaggttgcctctgttcaccagtagacacaagaatacctctttttcccccctcgacaatcttccataccctctcctttcaccacaagtactcattcacatctgtggccctgttctcttaaccaacctagaacttgcaatgtccaacataatacctaccaactcctctacgaagccttccccagctaaacacagctcacagtgaagttttctctccttcagtttccatagtagcttgacctagctttttaataccttgtatcattcttcagctgtttaactagggcaatgattatttccctagttacaatcacatggaaacaaaatcaaggaaagggaaggtgattttcccaaggccacccagaagttcagtggtggagatggagttggagccaagttctgtcttcacagcaagatgctgagtgtctcatcacctggccctagtcatattaataaccgaaaggttctactgacataattaaggacatacatggaatttagtcctcaatgtccccaggggctccgggccttctgggagttcaaggctctaagttggtgggagtctgtgcctatagatacgagcaatcacaggctggtctccagttggtttcagcaggaccctcccaacacagaccgccagagttcctgctggcaatagctctagattctggtgatgtctctctggccctgttcctcgcatccctcccacatctacaaaatactgatagtgcagacaacaaaagctcctgacaatggaagaatgtgtggaaaggcacaaagaaagtgaacagtctgttgattaagtaaatatcattacttacgcagatgtatctttcatctcttgtttatttttggatgtggctttgggaaaattagaatgaagtgatgagtcaagatataacttaacggcaatcccaggaaagcttagtattctttttttaaattttttatttatcatgtttaatgatgaggtttgttgcacaatggacctgcagcaaccttacgcgtaatataagatgtgcatggtcttagacccttgaacatcagcatatagatgtgcatgtatacaagttatggttctatttttattttttatttatttttgtaattatactttaagttttagggtacatgtgcacaacgtgcaggtttgttacatatgtatacaggtgccatgttcttaacaatgaggaaatctaactatattcagggtagttaaaggatttttctaggagcctacccccaagtagtggaaggttttttttttttttttttttaattttttttttttttaatttttttttttttttattatactctaagttttagtgtacatgtgcacattgtgcaggttagttacataaggctttccatctccagtcaattgcatcagaaggtctcctgactatttttctttcctaggaaacgcagcatcacatgcaggagtccctttagtgaagtatcatagggcttatgttggaaggactaaggcaaaacaactggttcctctgacagtgaatgaatgctggtttccgggatgccagatgcttccttcctaggaatatccctttgcaaagtgcatgcatgcaaaacagatcttctttcacatggttactaagaattttgcattttgttttaggttgtcaccactgggatggaacaactagattttgaaacaggaccaaacatatttgatttgcagatttatgtgaaggatgaggttggtgtcacagacctgcaagtcctgactgtccaggtaacagatgtgaacgagccacctcagtttcaaggcaacttggcagaaggtaggatacaccaggatgtgcactgcagcccagacagtggcatcagggagggccctgggggacagagagaaacagaaaaagtaaataaacaagcagctgtttccctggaaaaggcagctgcttaatgagcagggaataaatgaaatgtcctccagctcaacactcccaataataatgtccaacagtttgcaaagcccttcacaggcagggtttctcctggtcccctcccagtcccagggaggaaactgaagctcagagagagacctcgagtggatcattgtggaggaacctggctgagctgcccctaggctcatccctgtgtaccctggtcattgactggcttgttcattctccccatggactctgacttcttgagggcagcgtgtttctgctacaatagggacaatgtaagggaccagagcacacagtaactaatgtcttacaggatctcccccaagctcatggctttgagcatcatccctattctgacaactttcaagtctgtcatttcagttcaggttctgccctgagctgtggcggtcgtaacacaaacatccacctttctcacccagcatctccacttggatgtttgacaggtcaaacttaatgtgcttctgaaccaaactcctggcttcctctccaccctccacccccacccaaatctgcttctcctatatctttcccattttggttagcagtaactccatccttcctgttgcttggaccaagccttgagtcatccttgactcctctctctttcacacttgacatgaaatcctttaggaaatcttgccagcttctaaatatacccagaacctggccccaccctagtgtctgcatcactaccaccatggtccaagccactcatcccatctcacctggattgttgcaatggctggcagctggcctcccagcccccctgcagtctgttttccatactgcagtcagagggatcctattaaaacgtcagttaaatcaaggcactcctctgcttaaaaccctacaagaaattcccgtctcactcaaagggagtctccttaagaaccaattaaaggccgggcgcggtggctcacgcctgtaatctcagcactttgggaggccgaggcaggtggatcacgaggtcaggagattgagaccatcctggctaacatggtgaaaccccatctctactaaaaaatacaaaaaattagctggatgtagtggcgggtgcctgtagtcccagctactcaggaggctgaggcaggagaatggcatgaacccgggaggtggagcttgcagtgagctgagattgctccactgcactccagcctgggtgatagagcgagactctgtctcaaaaaaaaaaaagaaaaaaaaaaaaaagaaccaattaaatctggcaagctgcctacattccttaccctcctacccctcctcctttccccttctccccctcagtccctgtgacccagcctctggcccccttactgatctgcaaatgcctcaaacatgaccctacctcagcattttgcatttgctgattcctctgcctcccctcctatctcctggctcttcctcatttctttagggacaggtgcagtggctcatacctgtaatcacagcactttgggaggctgaggtgggagtatagcttaaggtcaggagttcaagaccagcctgggcaacagggcaaaaccctatctctacaaaaaataccaatattagccagatgtggtggcaggtacctgtagttccagctactcaggaggctgaggtgggaggatcacttgaacctgggaggtcgaggctgcagtgagctatgtttgtgccactgcactccaacctgggttacaaagcaagaccctatctcaaaaaaaaaaaaaaaaaaaaatcttgacaagtgtcatgtccttccccgctacagttaaccttccatagccactttattaaaattgtaacccaactcacacttccttccccaatttttctcataatgtttctcactaatatacacacattttcctcaattattttgctatccatatcttcccatggaaacggaagttgcatgagagtaaggttctgttttgtgagctgctgtattcccagtgtgtagatcactgtttggacagagcgctcagtagatatttttttgaacgaagcatgagagtgataaaaagtgaatgaaagctcaagctcagatgtaaggcatctggattttaatttcgattctatcatttactagctaggacaacttcataacttccctgagtctcagtgttctcatttgaaaagcactaattacgctaaaagaataaatacaatacctgctttatattaatagaactgttatgaagatgaaaatagaaaatgtatgttaagtcctcagcacggtgccccccaatagagtgagttacttttcatattgtccatcatcactgggaaggaaaaaatgcccgagtgagagctctgtggccccttggtcagtgctggtaccgcctgctcctccctcctcccccatcactgtgaaaaactctgaaacagatgaaatcagtttttggttcctcccttgagcctctgtagccctcccctacttattctatttatctctgttccactgtaagatccctcatttcaacggctcatttctgcggagttgccaagtgtccttcaaggggtaacagcacagttgaggagagatttgcacattaaaatggattcagcacatggggatcctcacaccggaggttcctacctgggtttacttcccaactctctgccctatcacctccttcttcccccacctcaaacagcatcaccctggggcacctctcaacagaggacatgaatgaagacttggtaccagcttggccaaccctagcactttatgaattaccctaaatggatccatgcaggaaagttggccagtggtcttgctcatggatttttttattgcattcttggtcccacgatgccaacacccttggttcccttggttgtgtacagctgccttgattttggaattccccatttttgctttaataagatgtttcttattccactttggacactggtctaggtctacacctctacatagtagaaagagcaaaccctggattcatttaccaggttgaggccttcgatccagaagacacaagccgaaacattcccctcagtgtaagtgtccttatatggaagaggtggtgtttgtccgtgttgggttagacacaggagcctgctgtcctgagtcttggcggggtgagtttgggcagtggcagtcaggggaatgtgcgtccacttccaaacacagtgtatgcaggatggttggaatgaataaaggggctctggggccagacactctggagtggatttgtggctctgtgtgatctaggcccatttgttacctctctaagtttcaatttcttcatctgtaaacaaagaagagtaccagcagctactgcagtagagaagctgtgagtattacatagacaatgcatgtaaaaccacttagtgcagtgccgggtgtatcaaaactgctcaatattttaaaaatctaagctcataaaaaccagctctattttaaaagcataaaatgtacaccccaaatccaagcatttacctacctttcccaagagatgaagccaagctgcttagagccaagtttaaaaaattaaaaaagaggccagatgcagcggctcatgcctgtaatcccaagataggaggatggcttgaacccaggagtttgagaccagcctaggcaacatagtgagacctcgtctctacaaaaaataaaaaaattagctgggcatgatggtgcgtgcttgtaattccagctactcgggaggctgaggtggaaggatcgcttgagcctaggagtttgagactacagtgagctatgatcacgtcactacactccagcctgggcaatagagcaagaccctgtctcaaaaaaaaaaaaaaaaaattaaggagtccccagaattctaggttgtagagcaggagattgggtcctgggaattgcctcatgattcagtctgagacagcggatgtctcttctctcccttcttaatcagttttcttaatgtagctgctagtggggcaagtataaccaccaatcctcaggtgaagcctcttagttgttccctgggagtggacgcctcagctcctggctctgcccactaatgtggcctgtgcacacactgcagctgagcagtccaggttggagagaaaaaagaaaaaacaaagcgaatcccaccccactaaccttggagcaggaaacactcctgcagaccctgccttacagagaagagaatacttgaaatatgacactcggggaattggtaacaccaggaggctgtttctactgtttgctgcatgatttgcagcttcaattggactactttttctaacaggaagaaatgagccttgggaataccaggacgaatatatatagtctacagactctgaaacaaagctgttataaaattattggatacaacttaaagtaagggaatagtctgtttttattagaagatgatccttctgtgtaaaaaaaaaaaatcacccattcattcattaactcattcattcatgttaatatttgcatgaataaatgaatatgcaaacatttaatgggtgtctatgtgttaagagcaatactaggtgcttgaaatgcatacttcttaataacatacttctcatactagttaggaatgtgtttgtctgcaaataacaaaacttaaccatgggcgtgtacatgggaactttttttcttctctaataagtctagaggcaggcaggcagttcagcactggtgcatctgctaccatcaggagcctgggctcttcctatgcttctatttttctaaccagagcttgtttgttggcactgtcctctttttctcacctcatgattgccagatggctgctgcacctcccggatttacctcagagttccatgcaagaaaaagaaagaagcaaccagggagggatacaggatagagcaggcaggcccaatctgtccctttttttatcaggaaaacaaaaactctcttggaagccctacccagaggacttctgctatatctcactggccagaactgtgccctatggccacttttgcttactgatgaccagggattcttaatggagataaggtcagaaacccaaagtatagcacctcacttacatatttagttcatttcaacatttacaaagaactctctatgtgccaggcatcctattagatactttggaaacagagatgagtaggacacattgacctcaggaagcgtaaactgaatggcagacattcatgcgtaggggagaaggaacagcttttcctcacttgtcaaaaggtttacagctgacactcctataacaaagaagagattaacaagaagagtaaattaacaaatttatttaaccaaagttttacatgacgtgggagggcttcagaaatgaagacccaaagacccccagggaaaactgtatttttatgctgaagttcaatgaagaatgggcagtcgtgtagaatcgtaactggacaaaaaggggtatgacataaaggtaataaactggggaaacttagcaaggccctgtttgttcagattcttcttggtctctggttgtagggtctggaatcctctagaatcaggttcttatgacctacttttaggggtggtaggtcagagaattcctttatgatcatgcttcaggggagaaagttgggagaaagagtgggcttcctgcttctgagaaggttttcttcaattgccaagatgtcatattttggggtatcgtgttctgatttctgatacatgcatacactaattataatccaatatgacaattactataacgtttgtataagaaccagtgggggaaaagtggaaagaatttcagttgtgaagacaaacatatatttgtttttaaatctccactttaaatgtatctctccaaattatgcagacagaataaggtcatggcccctttaaaaacacctcctagatcaggtagctaccctttcagaggaaggaaagctgcccaggtaggaaacaactgcagcaggtgttgctcccttcagaaaaaaaaatgtagtgccatcaaaagcattctgagagcagctgcgggggcttgtggcttctgcagtgagttgaggagttgtttggggagggggtactcagagttgcagcagaaattgttaatgaaatatttaacacctgtgctggaactaacagctgtacagaaagtcaacagccagcctgcaggagcggtggacataatctggaagaaaactttctcagattaggaaaaggtaataacagtttaggacataacatattatggcctttgtacttagacgttttattctgggtgcttgggggtactaagtagaagcaaatgacatcgttaggttcgtaaaagtagaagggaggtgggttaatttgctactgaccaacctgtgcttctcaaccttggctgtaaattgaaaccactgggggagctttaaagaacacggatgtctgtgtcccaccctgtgaaagtctgatgtgattggacttggatatggcctgggcattaggactataaagcccccagggaatctaatgtatggccaggggtgagaactgctggtttgccacatcatctcccaaaatttccaagtcccactcctggagttttcgagtctgagtctgcatttctgcattgtctgagaacaattttgcatatttggcaaatatcttaggcaattattctggacgaaaaggctgggaacactggtttgtttatttttgagacagggtcttacctctatcacccaggctagagtacactggtgcaatcacagctcactgcagcctcaactttcctggctcaggtgatccttccacctcagccttccaagtagctgggactacaggtgcccgccatcacacccagctaatttttgtattttttatagatagggtttcgctatgttgcccaggctggtctcaaactcttggggtcaagccatccacctgccttggcctcccaaagtgctaggattacagacatgagccaccacacccagtggaaacaccggtttataagtgttttgcaggctttagaagtgtgttcaggcattagaacatacttaggctgattttaaaaatgcagattcctggacattgcctgagaatgctgagtttgaatacaaacctccccggtgattctgatgtaccatgtacttcaagaaccactggactgaacaaacaaggacagagtttaacaaaacactaaagcacatgcctgaagcgacctaggcttggtttgtgtctgtcatcttaacctggtggggtccacgagtcaccctgctggtggcagcaactagagaatgaataatggatttttaaaaatagctataggatgcattttgaaacctcaacccctttaaaatgacaaatcttacaactcttctccagcttaataaagtgaaactgtatcacagttaatgaaaaacaggtactaatctggaagccacttgtatttgctcccttctttttagtgaaacttaaaaagcatgtgctggtacattgtttggaccaacactgatcaatattggaccggctctgtccaataaagctatactgtgagccagaaatgagtcctgcacatgtaattttaaatgttctagtagccacattgaaagtaaaacaaaataaatgaaattaattttaatagcttatttaactcagtatactcaaaatatttcagcatagtcaacataaaatgattaatgagatattttgccttctttttccatactcggtgtccaaactcagtgtgcattttacacttacagatcatctccgtgcagaccagccacatttcaatgctcatagtcacacgtacgtgagggtagtggctactgcattggccaggcacaggcttagatctagcattggttcccccttcctgggcaccttctgtgttgtggtgggcatgcaggtagagccggggcttggcttggaggtatgcattaataatgggctcagaacatagagaaggatgatctgcatgtgaataattatttttactggcatttcttctttgggtacccacccccccacctcttctccactttctgaaggaggctctttgagaccaccctcctcccattcaactcccacactctctgcttccccctctgcttggaaatggccaccgtgactgcagaagagcctccttggagactcccaggatgttaatcaatctctcagctggaggcaaaatgatctagtacagcaatttctccattaaggggctttcttttggcctttccattgaggaagggcttttgcataaaatgaaatgtgctttgtcttcaccaaggcagacaaaggattaaattaagagagcaataacctagctactacctggacttttgggagcgcagcaggggccatccttctctttctgtctttatcttgctcatagctctaggaagtggcagccagttgtgagttttggttttcctgtgtataaagtggtcatcatatgccagacctggccctatcaagggtcccagctggatgggatctttcaggtccattgggcagtccttgatttctggatgagggagggaactgaggggtcaggtaactccagtgagaacccaggtctcctgacccacctcccttctactctgttctggcaagttctgccactggcttcctaccccttgcttttctgagtgacagcatccctgtccccaccatacacccccacctgccccagtcattcagctcccctggtgtctgcctgccaactcaggagtcaggagtcaccacctgaagtcttagcaaaaggcattcttcattctactccaggttcttgttcaaaggctcataaaaggaaaaagcaaaggtactggacaattcccactccaaatatgtggtcactgctggctgtttgcatgtggggtgggacactctcaaatagatggggatcattgttattaagattagcaaagcctgaatcttgcagcacagaacccaggccaattatggaaaaagaatgacagaatgtgagggcataggatctgcagctttatcggtgaaggattacattaataatagcattttgcatttgtcatcgtgtctcttcttaaaaacattcaagtacttgcctgtaacccacttagctcatcctcagaacaatgaaccacgagcaggagccacgttaaggacttgcagtgggtagttttttaacgatagttttttttcttctaggcactcttcctccttcctcctccacgtcccacctctgagctgagacgagggtggaataggggaaaacaaagagaggaattgaggcttttacaaaatattcagcttccattgaaaaatataggaatgtggcaacatatttgtaacttgccacagtcctgagtgctctggccctctggggtgggtttggggccatgtactcagtggcttgtggagccattgacactccctggatgtgggccgaataagggtctttccttctggaaactcagcctgcggtggcctggtagttgactgctctattctataaaagacaagaagctgaattcttgttgtttgtttctactgaaagcaactgatagctgcaaagtggcacaggttgaatcattggtcggtgactcctactgcagtggggaagcaagcctggaggtggcgttcccctcgtaccccagggagctgacatttctggaaactgggccagctccctctcaccttcctttctccctacaccaaggcacaatcaagggtgaatggggcaggaaggatgggcttcttgtcttccaaactaaagcttttgtgtctgagagcaaacctagctgcaaaggggcggcaaatagagaaacctggggtggtggtaaagaaatattcccagcaggaaaaccagagagcttgtctgacaagcatttgttaactgaattgatctgattactcaggacttttcttagccaggactgggggcagagaggggctgcagttgcttttcattctatttaatttctgttttccaagaatgaatatcaagggagcagctttgattaaacaagcctttaaaaagggggagaaaatgccaggttttacagagagccttgctgagtcgctggcaaatggccacatgacacaatatttttagtctttggatattatctcctctctaagtacaaaactgctattcccattaacacagctcttaggttcagagaaaaaagaaattagcctggtgttaaaaagaaaaaaaaaatcaagattccaggaaatcatcctcttcatagaaattaaaaagaaaattctcatgtgcctagttctacagttctccacatcctttttatctgctgctgtttttcttttttcctttctttcctttctgcataagttgttgagactgtgggcccaactggagaagattttaaagccaagtctagcattattacattcaaatatttttaaaaaatgttttacaggatggttttttgttgttgcttttttgttttaagattctctaaggtgggaatgttggtcttactaagatgggaaatgaacaagaagaaaaccccaatatttaacatcgaacaaatatttattgagcatctattatgtgctagtcactaaggatatagcagtgaataaaatgaagccctttccctcatggatcccttctaatgggacagcagtagttaacatttattgagggcttgccatgtaccaggcattgttctagcactttatatgataacccgtggggcatgccctagtattattactctttgcaggcactcacatggctacaaagtgatgaaccagggttcacatccaggtattctggctccagagtcaccaaacttaatttattaccctaatttgtgactcttgtattccagatgagtctaagagtccttcttctcagttcccgtcatatcctgtatgtatcccctttggagcacctccccaaacctttgttccctcggttgaccataagattttggagtgtagggcctgtctgcattctctgtatcccaaggccttacagtgcttgggaccaaccagaattggagatccagctcctagagcatttcaaaacacatgtggaaggacgccctgattcaggtacatacagtaaatctcctccccaacccatgagtctctaaaaccctgtcattctatcatatgtagcttaaggtgctgatttatggatatgcgaggattctctgcagggaaggctctgctcaaagacagaggactgctctgtgtgtgggcaacttcaggcctaggcaattgctgtcaggccgtgagctggagtgttaatggggggcttgggatttaaaccccacacctgggagtactgccaaggtgcttgcacaatctgtggggctgggagaagggtgctctgtggcatcacccaaatatttccccttaaaaatgagcagaaaacacctaaatgatcagcaagaaagatttagtaaaataaacccctgtggtaggatgctgtgccatcgttaactaaccaggctataaaataagacttaagaataggggtaaatgctcaagatataaacacaatgaacagatattataattttgatgataacatcattgctatttttggagggtatacgtttgcatagaaaagaacagaaggctaatcaccaaaatgagatttaataggtggcatatttcatttcttttttatacttttctgtcttcctcagttttgtataaaatatggtcaatacaactagaaaaacattattaaataataaacaaaaggaaactttaaaaatggcttaaaaacgttatattggcctcaaaggagacctttaatctattttctgtgcacactgtcttcttgtgctgggagctcagcagcgatcataacacagcaaatcgctgggttggaaaccttggcaggtgtttcctttgattctagacttcaggggctgtggctgtggttgcaaaacctccactgatgatctgatccagagatctaaggccttgaggatagaacatccctcatcctagcaggaaataatgaaaccttctaaccttaaagccctttggaagaaatgaatataaacatgtgagtctctagcgttgctgcgatccttcatattttacggcacgcattctcatttaatcctcaataacatgaaggagcaattggtcacatcagccctaagttataggcaagaaaggcacttgtcccagatcttgtggtgaggaccagagcttaagctagacgcagtggctcatgcctgtaatcccagcactcagggaggcagaggcaggtggatcacttgagctcaggagttcaagcccagcctgggcaacatggtgaaaccctgtctctacaaaaaaaaatataaaaaaaattagccaggtgtggtggcacacacctgtagtcccagccactcgtgaggatgagatgcaagtatcacttgagcccgggaggcggaggctgcagtgagccatgatagcaccactgcactgcagcctgggtgacagagccagactctgtctcacaaaaaaaaaaaaaaaaaaaaaaaaaaaagaagaagaagaacttggaccttgaaccaagctcttctgatccaggctcttcccctgttttcttgactccattgtggaagaaacagagcaatcctgatgggctgccatgggtggcacgggcatggtcttcctatgggctcaccctcagcgggctgtacacataaacctgtctcttcctatcagatcaaggagatctgggcagggtgtcatcaagagagctgggctggaagcctatgatgacaaagactctcaactacccaaagatgtaggaaggactttccttatgccacgtgccagggattagatttcaaaacagctcttctgaatccctaaactggcttccaacctggactgtaagccctgttatgtttcattctcagctcacccttgtcccttgttccttcaggcatttcaataactgatgctcatgcattttgcgccctgctatattgtaagttgtttttaagggtagtgaccagatcctactcactttggtatagtcctattacctagtgggtagtagctgtattaaataggtaataggtatagtcctattacctagtgggtagtagctgtattaaataggtatagtagctgtattaaataggtaataggtatagtcctattacctagtgggtagtagctgtattaaatacactgtatttaaatacagtgttggttaaagccaaggcatagaatcaaagccagaagttgtccaggagtgagaacacagtgatagggataagaagattggactcagaagcagagcctgccttgacaggggccttttatatgctttctgtagttagaacaagatccactcaccagcttttcagggtgtggtcaaccagggctcagaccaacagagccagaagtttctgtattcaagagcgattaaattggataactgctctttgaaccgcatcctgatgcatcgagaacgttccatgggctaagaacataaaataggaaatgagcacacacatcttctggggaagggtgggcaggtgggctgatttcatcaatttttttcccttgttttttagtatttcctgatttctcccccaaagagcttcagaatgtctgctaatggcaccctcttctccacaacagaattggactttgaagcaggacacagaaggtagtcttgctattgaccttgcatgaagtactgtttatctgagggtcaaggaaaacatgagggataggtcacagtgcaacctgagggcagctggggggagccccttgagcagtctacagcgtcattgtaagttcagatggtagtgaaccccagagagggatggggaataaggcaattgtctgggaggcctcttttggtctccagagaacaagaatgacagtatgggagagggtgcccaagtacaagagtgtcatgagcagtgcaaggtcagacataaccaggtccatgcacatttgtgtctttccataaggtcaggttttcactgatgctacttcaatcctaaaagccatgagctacatggaattcccaaggaggcaactctccttagacctcttgctaactcagtagtcagagcacataggctcaagccactccacaggtcagtcagtattgtaaaccatacatagtatacttcatcagcacataaatgttataaattaaacattccacatcaaacaaagtaacatttaacatcatgagaaaagaggttaataaaccagaccaaggacggtgatgtggacacggagagtgtcttggccacatccagatggtcatcaatgtcttgcaaggaagagtctttgatttgggcagatgctgggtgctgattacaagtgacagcaagacagggtctgtcaagatggccttgtcgagccggtgaagtcctgctcgttttatggcccttgagtccactggcgaagactggtagtaaaggattatgcccttatctggttgagtgttgtctttattgattaggtgaccatctggaccctgttggcttgatgccttttgaaatggaagatggcattttttttctaagatgtagtcattaatgtcaagggtgatctatacaagatttctcagaccccatcttgtttgggaaaggcagccatccaagcaaaggggctgatgaggggaagtggatgacaacacattggccttggggtgaagcaggtgaggctcctggctctgcgtcgggtgtgggaacaagagctagccatgtgagccatgggggcctcactccctccagtgggagtgatatgcactttccagagatcttgtgaaaaacaccgggatagatgtgcagcatggcgcttgagcagatgctggcctggtgggacaatggtggtgaatagcccctgcagaatgagaagcagccagcgggtttggagacggggggagaaaggtcaccctgcaggccctgagactgtgggggcattacggagaggctcaccaccaaaggggcagggtctgctctcactcctcccaccccatgattttccccatcctattttgaagtagtgccagcaaagcttgattctctcacgtggaatgtttccctggcagtttccatctcatcgtggaggtgagggacagtggaggcctcaaagcctccacagagctccaggtgaacatcgtgaacctcaacgacgaagtccctcgctttaccaggtaggcctgagggcatgcaggactccctgggccgcaggtgcgtccttcttaggcggcctcgtctcctccggcacatttaatacaaggcagagggatgccctttgctgtggcctgcaggaaagattagaggcacgtgctcttcagagtctttatctgggcctctggactgctgttttccacctttgctgcctctgcctcctgtacccacacattcacatgcaccatgggattttggatatggtggggagaaggggtggacacatgccccggggtgtggcctgcactgtgcacatgcagagggtgcttttaaaataaagtgccgcgctttagtaacagcagagtcccagagcatgcatcatcactcacgactccctaacgcccgctcctagtatgttatcctcacaccgaggagagggctattttcacggtgcctgcctgttactggctgctctaaagtttcttcctgccatggtggatccagaaaagtgatccggctgtgtctggcagctcctctgtccagcagaggtgggaagggtaaatgcatcgggtggagggtagtttgtggaaatgtgcctggcactatcccaggcacaaaatgaagatctgagcctattgtagatggggatttaggaggaaaagatgggattctgagctagtagatggcactgcaaacagcctggcatactgcttacagagcctctgcctgccccagtccctgagatgggcatagaagccagccacaaggaaaggcaaaatcacctttaacagcatgaacggttatgaatagattcagcacaggatactccaccaataaaagaccattaggcctcagagctgggtagaggacttgcaaaactactccaagattgcgaggtatttaaggcaacctcactcccagactaacctggtgccacttggcaaacaccacaattgcacaacttctggatgttaacatagtctacagtccagttgcaggtgtcaaagaatgcgtctgctccagccctgcagcctgggctgcagttcctttttcaatccttgaccctcaatttatctgctgctattaaatggctatgtaatgctttccatcagcacctgatgctgggttaggttcagaaggagagctcagtgcctttgggctgacaggtggctcctggagcaaagtctaggcagcttattaacagttatgacatcccagcccggactcaggctcaggtatgggcccacacagctctgcagattcttcaagaacccccagaggaaggtgatggctgcagggctggagcagatgcattctttgacaccttccccacaagtcccatctgggaggaggggaggaaggttaatggggtttcaaaggggaaaataataagtcctccccaggggcagagcttgtaaaccatctggtttggatcacatcttccaaaatacagaaactgacttttagcagagagagagagagaacatgaccctcgctggcgtgggatgcacccagaggtcagcctggaactctctggttctcattttaggtttgaaagaggaacatattgggctccatccccaagcagatagcatgatctgtgtgacggtctttttttttttaagtcagtcgactttatttcaaacagcattccttggatgaaggtgagggtgtgtctgccagagcctcactccaaaagaaggagtgggggcagggtggctgcccaggcttggctcaggcagtcaatgagggtcaacctcatccctcagccatcaaaatttgaaaggatttgcttggtttcaaactacgtgctgacttggagggctttcatggttcccttgagcttctcagcctccttttcctgtaaatcagtgctagcactaacgataacttctttaattcaggattaacaaaattaaatcttcaaacagactcaagtgtactgagtttgagcctgaaatacaaatgtaaaatgtacagacagcctttctatctttactatttgttaaacgcatgcaattaacacaaccaaagcaagtcctatgtctgttcttgaaaatgtctccccattttacccctggtggtgacaaatgtcagaaagctttatagattcaggatgcatgctccaggagtctgccattattgaagttgaacattttattataaaagcacctgacacaccgggtgcagtggctcacgcctgtaatcccagcactttgggaggctgaggcgggtggatcacctgaggtcaggagttcgagaccagcctgaccaacatggtgaaaccctgtttctactaaaagtaccaaagtagccaggcatggtggctgtaatcccagctactcaggaagctgagacaggagaatcgcttgaacccaggaggcagaggttgcagtgagctgagatcatgccattgcactccaacctgggcaacaagaccagaactccatctcaaacaaaaaagaaaaagaaaaagaaaaaaaaaaagcacctgacatatttactgtttccctgtgcacagagcttgctgtgtgtgcacagcactttattttagagttgggtaggtaggtctttctcccctcctgcccatttcttttgtatttactcagtccttttccacctggtgcttggcagtgtcatgcacaccttgggcacttactgaatactcattcatagtggtgaagccatccatggcttcccagcattcacacccttccctgtgagtgtggccactggcccaagctctgggggtcaggtgttacggggaagaaggatgtgggaatacaagtggtagcagagctttactgtgtcagggtagctgcatggcacctagcttcactgtgctttgaatagctcttaactgtggtctccgttgaatgatattttatacatacctgtatcttggattcaaaaatcaaatagactaaagattttatctcctgccaggcttaatgtcaggttagccaaggagagaatatttcgcctgaggagctgcatcgtggccagtagcctgaccagttcccttcgtggggatctgggttcctggagcacccagcatggactagatgagccttcagagcagagtttcttaaacagcggaactgctggcattgagccaggtaccccattgtagaggggttgtcctgtgcattggaggatgtgtagcagcatctccagcttctatcccctaaacatcaatagtagctgtctcccctagttgtgaaaatcaaacatgttcagacaccacccccggccccccagctgagaaccactgcctgagaaggaaggagggatgatgggaagaaggggcttttcctccccaggtgtcctctctctgtcccgtggggaggctgggagcctgtggttgccacctctggcatcaccttataatcatccttccgaaacattaaagtctatgcagattagctgggcatcttgtgaaaaagccagtcctggttcagagggctggggtgggtgggcctgaggtctgcatgtctaaccagctccctggtgatgcttttactaggagcatgcttggagcagtagctcatggctgtgtgattagcacaggcatcttagtggcctcttttttggaagttaacagaacccgctcatgatgaccaaagcaaaaacatactacattagcaacaggggcattcacagaagggaccgaggggcttggcccagcctgggggcgctggggccatatccttccctcctggctctggttttggctcctgccatcccacctctttggccccattccactttgtctattcctagatccatcaggggcagcattacagattgcctgagaaggggatatgtcaagtaagggaaaggatgaatgggcctgtttcagtgggacactggggtgaccttaggctgaacatgattactctcctccagcaatggagtatacccacagaagtccaccttgtgaatagatgtggggggaccctggatccagggaggagctctggtagggagggttggggtgaagccctggttcctgcctttctctgactgcccctgacttagctattgattccctgccatttctccttcctctggccctacctaccttatagggatggtgagatagcacagcagaaatattctgagctcacgaaaggaatgccgtcacttagatctgagaggtactatacccctttcaaagaagatcccacatgggaagacctccacttgggtaactgggaaattagaggtgactacttgccccactgaaatgattttccctcagcaaaaggacttcctgcagagttgttttaaacaataagcctcccttagagcattcaaaattactcaatgtatagttagttaaaactcccaacctatcagtctcattactggcctgttccaaaggcattggtgaaggtctgaggaagatgggtaagttggtgatttggggttatcttgcaagaaggacagtgatggggcctggtcttcttcaggggacctatttctcagttcagagagctgacctcatgattaatgcaacttggaaaggtgcacgagttctgtgcataaattctatatcctcaggcaaaaaaaaaaaaaaaaaagacaaggaagaaaaaaaagtgagcaaacacatgagaatagagaagctttacaatttttctggcttctggtggcagccatgggatgggagtcaggaacaagggagggaacccgcagctctggacatgaccctggcatgtaactctggacacagtgatatctaaaagaatccagggacatctgcacaaaacgtgggaaaatgagaaaagatagctggataggccacctgtccttatttcaaaagacgttaatgccaaggctgatctgaaatgacatcaggcagaggtgcatagagtcagagactgtggcccatgtaaattgttgcaatgacagcgtggtactttcttcacatccacagggatgtggtctttggggatacaaaagccagccacccctcctttccactgctgtgctctccctctgagcatgttgatgcaacttgaacagctctgcactatatttagcactaaccaaaataccaatcgcctagatgctaccttcccgtgcccctggaaattagctgtgtctgctgtatctctgttccagcccgacacgagtgtacacagtcctggaggaactgagtccaggaaccatcgtggccaatatcacagcggaggatcctgatgatgaaggttttcccagccacctcctctacagcattaccactgttagcaaatatttcatgataaatcagtgtaagccactcacttccatccttaagtgcatcctctaattcagccatgtggattgtcttacaatgtagttgtccctcgttacccatgagaattggttctaggatgcaccgtggataccaaaatccacgtatgctcaagtttcttctataaaatggcttagtatttgcatataacctatgcatgtccccctgtatattttatattatctctagattccttataataccaaatgctatgtagatagttgttgtattgtttagggaataatgacaagaaaaaaatgtctgtatatgtttagtgcaaatgcagccagccatttatttttcctgaatattttaaatcctcagttggttgaatctgaggatgcagaacccatggatacaaagggccaattgtatttttcttatcttctggtattgggcatgtctttctgtctggggtcatcattggttaccaaggtaatagatgtattataagcagctggcatgggggttgggcaaactaaacagggttgacagctatgtcacccttcacctttgtgggggatgggtggggggcagtgaagagatttattttcttacccattgttaggcttgtgactgagacctctataaaaaaagacagattaacaagagaaaagcatacgaattcatttaatgttaagtttatgtcacaccagagccttcagaaatgaagactcaaagaaacagggaaacccatgtgtttttatgctcagtttgatgaagtgagtaattatggagaagtatgattggaggacaaaagggtgtgataaacctgggagaatttagcaaggtccgtttgttcagattcttcctggcatctctgtcttccagaataggatgttcctttcctccagttataggtaggttacctctggaatgaagctcttatgactgcttcaaaactgctgttttctcaaatgccaaggtgccatattttggggtaatatgtcctgaatcccatcacctttttctcaaaggcaggtgtgtaaggatggatgggttacttatcctgagggttccctgaagtcttctgaagagaggggctatattagcactgtccaataggaatagaatgaagccacttacgtaatttcaaagtctctagtagtcacatttttaacaagtaaaaagaaataggagaaattaattttaattaggtatttttaacatgtataaaatattgtttcaacatgttatcaatacttaaaggtcattcatggccaggcatggtggctcatgtctgtaatcccaacactttgggaggctgaggccaaaggattgcttgagcccaggagtttgagaccagcctgggcaacgtagtgaaaccctgtctctactaaaagtttaaaaattagctgagtgtcatgatacacacctatagtcccagctactcaggaagttgaggcaggaggatcccttgagcccaggagtttaaggctgcagtgagctatgatcattccactctactccagcctgggtgacagagcaaaaacctgtctcaaaaaaaaaaaaaaaaaaagtgattcatgagatatttcatatcattttctttggtaccgagtcttggaagactgttgtatgttttgtacttacagtacatctcaatttggattagcaccatttaattgctcaataactctcatgtgactagtggtaactgtatgggacagtgtcatcttggtcaatctgccagactgatgggagttatttttccatctgaatatctctgaaggggacttctctgctcttctataaccatctttttctggggccttagtacacaccaggcattatgctgagtgattattcacatacatctcatctcaagtactcaagatagcaactcaatgaactatcatcattcacattttacagatgaggaaactgaggcctagggagagcctcaggcaggtcaaacaatttgttcaaggtcttacagcttgtaggtcatgaagcagaagtaccaacctaagctgcctgattcctcgggcctgtcctcttaaccactaccggactgtcccacctttataagtcctgattgcatcaccaaaaaggacgtccagccttagacaatgccagaaaaacaatgtcctgttggctccttaggctttcgggcaaaagacacctattcccaggagagccaggcaaaggcaataattgtgcactgcctctgaaaacatcctgatgccctgtcagctgatagtgtagggacaaccatggttgagaattctgttcactctagtgttgcgaaattcaacttttaacaagtagagtgaggtttttggtttttttctgagcatatttattaagattttttggttgcaggtaacagaaactaaggtaaaccaacctaaccaaaaaaaaaaaaaaaaaaaaaagaaagaaaaaaaaggcaggcacatctatcaacaggattctgtgcatctcttaagaaaatgtaaaaagatggggacatagaaaggatgtgacccagtgctgctccagggaccttggttctgtagctccactattagcctgactgatcctccaatgtgtgcctttcagttataaattctccaataagagagccctctgggtcaagctggagtcagttattcaccagtccagtccactctgggcaagggccgccaccagggacccaactctgaagtacagtgtgaaaaatcctagaagggtcaggccagataccccaatgaatgtctaacacaggaacttaatgggttttcaaaaatgtatttgtatagagattatgctctgcataagctcttcctcatgttcgaatggtcttttccagttttctccaagtttctgtattccttttcatttctcttcaaagggtcacgttctaacctttgctttctcagtgactggtacaatccaagtggcccaaaggatagaccgagatgcaggtgaattgagacaaaatcccaccatttccctggaagttctagtgaaggacagaccatatgggggtcaggagaatcgcatccagataaccttcattgtggaagacgtcaacgacaatcctgccacatgccaaaagttcaccttcaggtatgcacactttgaaagttgggctggacattctatctctttggtggccctctgcccttctgcttctctggtatattctcaggagaattataagcatttggagaaacagctcagtagaataaatcgatgtgaactgttcactgttgtccacaggtttccttgttatcgtccttttttcttccctctctttcattttccttcttcattatctcccttgttcactttcttactcttaagaattattttttattttgctcccttctatatctggctcatctctgttggtgaaaaggaccacagggacttgttaggccctccctggactgtgcctgttctttgtttattgccacgggtggcaagatggggctgttagttagcagttataatagacgtttgagacttaggatcagtgaataggaactcccaggaaaacataccaccagccagatgaataaatcaaaccaagtacttaggtaaaaccaaacaaagcatcgaattcacctt

SEQ ID NO: 1769 - DNA, 584 bp, Homo sapiens
atttacaaaagaaagaggtttaattggacttacagttccacatggctggggaagcctcacaatcatggcagaaggcaaggaggagcaagtcacatcttacatggatggcagcaggcaaagagatagagcttgtgtagggaaactcctccttataaagccatcagatctcatgagacttagtcactatcacgagaacaactcaggaaagacttgcccccatgattccatttcctcctaccaggtccctcccacaacatgtaggaattcaaggtgagactttggtggagacacagccaaaccatatcatcctgccccagcccttcccaaatctcacgttctcacatttcaaaaccaatcatgccttcccaacagtcatccaaagtctttactcatttcagcattaactcaaaagtccacagtccaaagtctcatccgagacaaggcaaatcccttctgcctatgagcctgtaaaatcaaaagcaagttagttacttcctagatacaatgggggtataggcattgggtaaatacagctgttccaatgggataaattggccaaaatgcaggtgctacaggccccatgc

SEQ ID NO: 1770 - DNA, 547 bp, Homo sapiens
gcagtgatttttgaaaaaaaaaaaaattggcttgttgttcttcctgaaaccagacaaattgatttgaaaacttaatggagagataaatgtacaagaatagctagaaaaatgccagaaaagaaaaagagtggtggaagggagggggctactaggtctaccaactacaaaaaatgtatgataatgcttttttaagagacagggtcccactacgttgcccaggctggtctcaaactcctgtcttcatttctcccttttattagagagctgttgctgtaagagaaaaaaatgaacttacccagaactcaaagagtagttctagcaagttggtttggtttgttcttttttttttgagacagagtctcgctctgtcgcccaggctggagtgcagtggcacaatcttggctcactgcaagctctgcctcccaggttcacgccattctcctgctcagcctcctgagtagctgggactacaggcttccaccaccacgcccggctaattttttgtatttttagtagagacagggtttcaccgtgttagccaggatgg

SEQ ID NO: 1771 - DNA, 599 bp, Homo sapiens
gcagtgatttttgaaaaaaaaaaaaattggcttgttgttcttcctgaaaccagacaaattgatttgaaaacttaatggagagataaatgtacaagaatagctagaaaaatgccagaaaagaaaaagagtggtggaagggagggggctactaggtctaccaactacaaaaaatgtatgataatgcttttttaagagacagggtcccactacgttgcccaggctggtctcaaactcctgtcttcatttctcccttttattagagagctgttgctgtaagagaaaaaaatgaacttacccagaactcaaagagtagttctagcaagttggtttggtttgttcttttttttttgagacagagtctcgctctgtcgcccaggctggagtgcagtggcacaatcttggctcactgcaagctctgcctcccaggttcacgccattctcctgctcagcctcctgagtagctgggactacaggcttccaccaccacgcccggctaattttttgtatttttagtagagacagggtttcaccgtgttagccaggatggtctcgatctcctggccttgtgatccgccagcctcggcctcccaaagtgctgg

SEQ ID NO: 1772 - DNA, 599 bp, Homo sapiens; identical to SEQ ID NO: 1771

SEQ ID NO: 1773 - DNA, 597 bp, Homo sapiens
gcagtgatttttgaaaaaaaaaaaaattggcttgttgttcttcctgaaaccagacaaattgatttgaaaacttaatggagagataaatgtacaagaatagctagaaaaatgccagaaaagaaaaagagtggtggaagggagggggctactaggtctaccaactacaaaaaatgtatgataatgcttttttaagagacagggtcccactacgttgcccaggctggtctcaaactcctgtcttcatttctcccttttattagagagctgttgctgtaagagaaaaaaatgaacttacccagaactcaaagagtagttctagcaagttggtttggtttgttcttttttttttgagacagagtctcgctctgtcgcccaggctggagtgcagtggcacaatcttggctcactgcaagctctgcctcccaggttcacgccattctcctgctcagcctcctgagtagctgggactacaggcttccaccaccacgcccggctaattttttgtatttttagtagagacagggtttcaccgtgttagccaggatggtctcgatctcctggccttgtgatccgccagcctcggcctcccaaagtgct

SEQ ID NO: 1774 - DNA, 741 bp, Homo sapiens
gggctagtcctgagctttggaaatgagcatgctcactcactgactcgcattctctcacgtgcacacactctctctctctctctcaggctggattggccagaccaattggaggaacttgctcttttttttgtttttttgtttgtttgtttgtttgtttgtttttgagccaatgttattctctgtcacccaggttggtccaaaactcttggcctcatgtgatcttccagccttagtctcccaaagtgctgggattacaggtgtgagccactgtaacccaccagaacttgttcttttacatgggccattcaaaggtcgccctgtgtttgctagactggtgaccttgggcttttccagttattcctttgtttggaatttaagggctcttttcaggaacttttctagactcattggaagttttaatcttctgagtttgatcaaaccaaattaagtcaaattaaaacctcagtttcacatacaggattagatatttgttcggggatgttgggttttttcatctctctagcagcccaggtgaaggaaatataaacaggacaaaggtcctctgtgaagtgcaggaaaacgcagtgcaggagttagctggggtcaagggccagttctcagctacctccagaaagcctctgttgtccccaggaaagttatagaaaggggttttccaaaggcccgaggcataggacatgccaagggctacaggcaggagagccaagaggagaagggaggaca

SEQ ID NO: 1775 - DNA, 740 bp, Homo sapiens
gggctagtcctgagctttggaaatgagcatgctcactcactgactcgcattctctcacgtgcacacactctctctctctctctcaggctggattggccagaccaattggaggaacttgctcttttttttggttttttgtttgtttgtttgtttgtttgtttttgagccaatgttattctctgtcacccaggttggtccaaaactcttggcctcatgtgatcttccagccttagtctcccaaagtgctgggattacaggtgtgagccactgtaacccaccagaacttgttcttttacatgggccattcaaaggtcgccctgtgtttgctagactggtgaccttgggcttttccagttattcctttgtttggaatttaagggctcttttcaggaacttttctagactcattggaagttttaatcttctgagtttgatcaaaccaaattaagtcaaattaaaactcagtttcacatacaggattagatatttgttcggggatgttgggttttttcatctctctagcagcccaggtgaaggaaatataaacaggacaaaggtcctctgtgaagtgcaggaaaacgcagtgcaggagttagctggggtcaagggccagttctcagctacctccagaaagcctctgttgtccccaggaaagttatagaaaggggttttccaaaggcccgaggcataggacatgccaagggctacaggcaggagagccaagaggagaagggaggaca

SEQ ID NO: 1776 - DNA, 741 bp, Homo sapiens; identical to SEQ ID NO: 1774

SEQ ID NO: 1777 - DNA, 741 bp, Homo sapiens; identical to SEQ ID NO: 1774

SEQ ID NO: 1778 - DNA, 102 bp, Homo sapiens
gcttgaacccgggaggcggaggttgcactgagccaagatcgcaccattgcactccagcctgggcaacagagcaagactccatctcaaaaaaaaaaaaaaaaa

SEQ ID NO: 1779 - DNA, 5819 bp, Homo sapiens
ttagcttttgatatgtaccaagatccagaagttgcacagatcatacgaaaattagatgaaagaaaacgggaagctgtccaaaaggaacgctatgattatgccaagaaactaaaacaagccattgctgatttgcaaaaggtattgcctttggagaaaacagttcctaatttatgcctgtaataggttttacgtatacttagaataactacatggtaaaagaaaccagttactaaaagccgtgaagttagtgtgagttcaaagatctcagcaaaataaagttacggagacagataagcactttaaaaatgtaaatggaagcagaagctttacctcttcagactcacgttcaggtgtcagggtcagctacctcgttactaggaccctgagcccaatgggaaaataggaaaaccagctatcctgaaagtcataaccaacccatgggcttattaaatgcccatacagcaacagcagccagacctttgctgagtgtggcccattccttccatttccctgtgctcactccctctccttgcaagacggttcacgcgtgattcttaaaaattagctttgcatttgatgtgagttgatccaaatttgaaagaaaaagcaaatattttgtgcttcaggttggtgagcgccttgggaggtatgaggtagagaaacgctgtgccgtggagaaggaagactacgatctcgccaaggagaagaagcagcagatggagcagtatcgtgccgaggtgtacgagcagctggagctgcacagcctcctggatgccgagctggtgggtgcaggagcccagacggagtggaggaaagcctaggagaacagagattcaactgtgtggttcacaacagtggatagatgtctttgaagtgtagtgtaaaacactctgcagtgctcaggggacagttatggatggcctcagctctgtgcctacgtcagggaggctttgcctcagcatgttctttcaggagactcacagtcgtgggaaagggaacaaaccggggtcaggaaaaccgaggccctgctgcttttctgctgcatcccttcatctctccagctgcttccttatttggaaaaggcagtgatgaccctgccccactgacccctcagtgttgtaaggatcaagtgagaacgtaatgctaacagcttcggtgtattgagaacatatttcccataaggtgctctgcctctgattttagaactcatgcaaatggggcactcagcccacgttacagattaggaaatgaaggttctgagatacggaatagtgattgagagtgcacactctcaaggccaggcatggtggctcacgcctgtaatcccatcactttgggaggccaaggctggaggattgtttgagcccaggagttcgagaccagcctgggcaacatagagagaccctgtctctacaaaaagtaagtaatagccaggcctggtggcacacacctgtagtcctagctactcaggagagtgagacaggaggatcacttgggcccagaagttcgaggctgcagtgagctacgatcgcaccactgcactccagccttggtgatggagcgagaccctgcctctgaaaaacaagagagcacactctggagctggactgtctgggttcaaatccgggcaccaccattccagctctgtgatcacagactaattcttatcagctttatgcctcagttttccatcagctttcaaatgggggtaaaaagagtaagcattaatgagcctacctgtccaaaacactcagtaccatgcctagtgtgcagcaactggtcagtcagctttgcttgttgggatgacacaacatcactttgctttgtacacacagtgaatagcagtgccagattttgaataaaagtccacttgggtccagcccaggtgctttctcacaccaccgtgctcctgcaggggcacatatgtgtggacatgctccatgcacaaatgctcattccttcactagcattttgatgtgtatgtcactttgtagtcaacacagaaatgtggagagacaactgagatgagtgcaacttgattgtgtgggactttcaagtagatttcactctgtggaagtttctctttggttttgaaatttttcattgtgccaaggagcctcttccagcacagctttctaaagtcttattcatctgaaggaatgagatagatatatctggcgtggcagtggcatttgaaattaaatgttcctttttgttctctagatgcgaagaccttttgatttgcccctccagcccctcgctcgttctggcagtccttgccaccaaaagccaatgccctcactaccacaactggaagaaagaggaacagaaaaccagtttgcagaacctttccttcaggaaaagccttcatcatattctctaactatttctcctcagcattctgcagtagacccgttactccctgccacagatcctcatccaaagatcaatgtaggtaattctgtttcagattggcgttcaatttatttgggtatttgtaaaggacatgtgttgtgccaggtgctgttcccatgcatggggtgcatgagtgctccccagccagacccacctctgttccattctaggagccatagtgctgagtgagagcatagccacataaggaataggcctaatgacaccttgtgagcatgtttattaaaatcaggcttgatgcttatttctaagcaataaactaagaaaatatcagagatcttgtcagaaaaaaagatgtaatagcctttactttagtagtctccatgtcagttgaactgaaattgctaccagtaaacagtcattgaggtggaatctaccttgcttttttttattaggtctgtaatgagtttagaaagtaatagaaagcctcatctaatcttttcaattacatcctatttgttgtataaattattctaatctgatgatactgatatttagcaaaataacatctttcagatcaggtaagtaagcgcagtaagcctgccagtgagagttgcactggagaatgtgacctatggagctccccagcactttcctctctccttcactcactgcaggcagagtccctgccctacgatgagcggcctcttccagctattcgtaagcattatggggaggcagtggtggagccggaaatgagtaatgcagacatcagcgatgctcggaggggaggcatgataggggagccagagcccttaaccgagaaggccttgagagaagccagctctgccatcgatgtgttgggagaaaccttggtaaaaaaaaaaaaaaaaaaaaaaaaacggggtggcagaggggaggctagtctatatggtacgcacacctctgtgtacttacacataaaggagggaaaacgcccacggctttgcatttgtaatattgttgacttccctttgttcttcctgaattggaaagtcttttgttaactttttttttttttttttgagacggagtcttgctcttcacccaggctggagtgcagtggcaagatctccgctcactgcaagctccgcctcctggcttcaccctgttctcctacctcagcctcctgagtagctgagactacaggtgcccgccaccacgcctggctaattttttgtaatttttttttagtagagatagagtttcaccacgttagccaggatggtctcgatctcctgatcttgtgatccactcaccttggcctcccaaagtgctgggattacaggcatgagccactgcgcccggcctttttttttttttatgaaacagagtgtcactctgtcacccagggtggagtacagtggcgtgatcataactcactatagccttgaactcctggccttggcctcccaaagtgctggaattacaaacattagccaccgtgcctgcccttctgtaaattataaattatgtgaaacagcaaaaacatgagctaagatgtatcagtgagtactcatttcagcctgggtgtttccttctggcattcatggagcttgtattaaacaactgctcccttctgaataccagctaattccagcgcaaaaggatggcatagcaaaagatggaagtatctccttatagaaatgagtagagttggccaggcgcagtggctcacgcctataatcccagcactttgggaggccaaggcgggtggatcacgaggtcaggagttcaagaccagcctggccaagatggtgaaaccccatctctactaaaaatacaaaaattagctgggcatggtgtcaggcacctgtaatcccagctagctggaagactgaggcaggagaattgcttgaacccgcagggggacagaggttgcagtgagccgagccactgcactccagcctgggcgacagagtgagactttgtctcaaaataaaaagaaatgagtagggttttccctcgttctcagctttaaaatatttctcttggagaatttaatactttttatattttaacatagtcttaaatttccttatcagagaaaattatttctctaaatatacatatttatttgtaaaagttctattattagaaatgaatcattttcatttataaaagttctgttcttagaaatgaatcattttagttaaaaaaaaaacaaagccttcaagttgtgtagtgttggaggatggttgtgtgatgccatgaaatgctgcctgttttgtggtaggttgctgaggcctattgtaagacgtggtcctaccgagaggatgcactgcttgccttgtctaagaagttaatggaaatgcctgttggaaccccaaaagaagatttaaagaacacactgagagcatccgtctttctcgttagaagagccataaaggacattgtgacctccgtgagtgccctcagctggcgctggctccagcgtgcatggatgagatcatgcgccgtaccacagaagaccagagcagcttgagagaggaccagttggtcattgacgtggtcaccaactgtaactcaatagaatcactaagaaatgaggttctctagcaagagctatactgtgcaactgatcttacatgaagggtctgggaaatctgcctttccttgggtcattgtctctggtctccagcagtgttagcttttccatggtctgcaaagccaggcgtttgtagaggcctagttcaatgctaccacatcttcagtttgtgttttcactttgcatgaaacctgatgaggttgagaattactgttttttctaatgctgaatgggccttaagaatggacattgcacagttgggcttctaacagcccactgaagcagggctgttagatactcagtatgaagggaagatttgggcttacccattgaagcagggatgttagatactcggtatgaagggaagatttgggcttacccattgaagcagggttgttagatactcggtatgaagggaagatttgggcttacccattgaagcagggatgttagatactcggtatgaagggaagatggggagtgatttctgacagagtgaagtaagagcatatgtcctctatatgcaaggtgctgtgtttagaaagcagttttcagtttgccactttcagcctttcagacgagatgtcattttcgatataatgttcgtatgtgttactgatagtaaatgccatgtttcctcttggtggaattgcaccgtagtaactcatccgtgttcatcacttttctcttaggtttttcaggcttctttgaaattgttgaaaatgatcattacacaatatattcctaaacataaactgagtaaacttgaaacagctcactgtgtggagaggaccattcccgttttgctcaccagaactggagattcttctgcccgcctccgcgtcacagctgcaaattt

SEQ ID NO: 1780 - DNA, 398 bp, Homo sapiens
gaattcatctagtctaggagttcttaagagtcctcctttgggcttaagaagcttatgaattacgttaagttttacacaaaattttgtgatgtgcagatccttcttaaaaaagaatccaggccagactgggcacggtggctcacacctgtaatcccagcactttgggaggctcaggcaggtggatcacaaggtcaggagatcgagactatcctagccaacctggtgaaaccccttctgtactaaaaatccaaaaattagccgggtgtggtggcgcgtgcctgtcgtcccagctacttgggaggctgaggcaggagaattcaacccgggaggcagagttttcagtgagccgagatcacgccactgcactccagcctggcgacagagtgagactccatctt

SEQ ID NO: 1781 - DNA, 458 bp, Homo sapiens
ggcctatggaaatgagctttaagccacattccatgaaccgaagggcctctgagctgggagtggatagtgggcacagccagccccagctctccctctcagttgagccaaagcatctgtgctcatttgtttttagatttcttaaaggatttcatttgaaagaaaaaagaaacaagtccatgagaccactgtcctgtgaacgtgaactactttctatttgggtaggtaggaagaagtgaggatagttgcaaagttataatttcattccccttccccacccagaaaaatagaactgagagtcttaaaacatggaatctggctgtagcttggccacagtacctatgtctctttagcatagcctcctggatctcagccttatctctaagaaaatgatatagattagtcacatggtccttctaattgcctgaaatcccactataaatttctagcacctgtcacgc

SEQ ID NO: 1782 - DNA, 6257 bp, Homo sapiens
gcgcctgcgcagtggtcaaggccgcgctcgcgccgaggggctgcgagagtgaccgcggctgctccagcgctgacgccgagccatggcggacgaggagcttgaggcgctgaggagacagaggctggccgagctgcaggccaaacacggggtgagcgcatcagcccccgccaggcttggccctcgcggggcgccgccctcgcccggagtgtagggcgcgcctccggggcggaggctctgggcgcctccccggggccccggtcccctgcgctgccctggcggcctcgtggccggctcagaggtggcctcgtcgctttcctcgtcgcgaggggcccaggaggctggcggcgggggccgccacgtgcgggacctgccctggcgttggggtgtggggtcccctagcctggagcgggctcgtcctggcgggcctggatccaagcacaatctcagcttttggagccagcagccggaccgaattcagtttttccggagttcagttgttatgacccaagtttagccgacaggtattgagggtccgctgtgttcccggtgctgagagcgcggcagggtcggaggaacgcttgccccgccgggatgacagggaggggccgcctgggaagcttggatggatcacacgcccggagaggcgtttctgataagggaccgggaccttagggacggagggcgcagtctttgagttatcgttgtccctaataccgaggcccgttttattttccagaaattattcctacatgtgaaacacggtttcgtaatacagggattcccctccccagggtgctctgtattccaaagccttctgaggttgtggttttagacgttcatcaaaacgttgtaagtgggaactagttcattgatttctgtgaggcccagtttcttatttggggagttgtttctaccaccgcaagagactgttatgtataggaaacaacagaaccgttcctttttcccgccgcctcccgtgaaatttctctattaaatttaagttttttttttccaggatcctggtgatgcggcccaacaggaagcaaagcacaggtatgggctggaaacgtgaactttttgaagggtggtttcaccaaatggatttcttttgctgtagttattttaagcaggtgtgtgactcagatttttttgttttgctggaatggtgatttggccaaaatcatccgcagggtatcttcattattgttaaataaacacgtgtgcagctccacatcagaccttgtattgcaattactggttgatgtttctctgctacaatgtgagtaccttaaaaatgagcctgataataggcagctgtggcagtttcctcggctgtgggggtgacgtgagtccggtgcctcacttagtaagtgctcaataagtgttaactggtaagctattctgattgttttatcccaacacagcgcacagcacctgagacagatgcaggtaattgattcggtggcaggtttattgaatgagtatgtgattaccctatcatgctatcattttttaaaaattgtggttaaataaaatttcaccatcacaaccatttttaagtgtgctcttcagtagtgttcacactctagaatgttttcatcttgcaagactgaaacctttagctactggacaattctctatttccccttcctcaccttcttactcctcctctccagcaaatatttatagagcacctgctctgggtcaggcactgtgctgggtctacagaaataggaagggagggttcgggagaagacagacggtgagaagtatctggagtagtgataggaagtaaaacgacgcaaatttcattgatttctgccgtgtacatcttttcattgtcacatatctgaaatcaggatgccttttaaaacagattgctcttgccccagattcttccagaggggatttacttttgactctgctatcacttgagtacatttctgagaccattgaaagttaaattctctgcttgaggttttcccctgcctcctgcctagtagtgtgaattcagacagcaaccctgtaagactgaacttttttcttctttacgtcagggccaggtgcatgcaagcttttgtactgccccttactgcatggcatatttatttattctttactttgtactgagaatgttgctctttgataccccagtggtgggatcagaactcactgcagcctcaaactcctgctgggctcaagtgatcctcccacctcagcctcctgaggagctgagatgacaggcgtgcaccaccatgcctggctaatttttttaaactttttttttttttaatagcctcgctatatcacccaggctggtctcaaactcctggcttcaagtgatcctcccaccttggcctcccgagaaaccccagttttgaatggagatctctattagacctctcattttagggtttttcatttttagagatacgtaaaactatggtgtatcttagaattgatggcatcttagggttctgtgatataatagtttgtggcaggccaggtgtggtgactgaagcctgtagacccagctactcaggaggccgagggggaagaatcacttgagcacaggagcttgagctgatcatagctgcagtgagctgtgattgcaccactgtactccagcatgaacagcagagtgagaccccatctttttttattgttgttgagatgaagtctcactccatcacccaggctggagtgcagtggcacaatcttggctcaccgtaacctctgcctctgagcttcaagcgattctcctgcctctgcctcccaagtagctgggattacaggcacccgccaccatgcccggctaatttttgtatttttagtagagatggggtttcaccatgttggccaggctggtctcaaactcctgacctcaagtgatccacccacctcagcctcccaaagtgctgagattacaggcatgagccaccatgcctggcctagaccccatctcttaaagtttgtggcagggctgcagtactcaaaccataaagaagtggcctatggaaatgagctttaagccacattccatgaaccgaagggcctctgagctgggagtggatagtgggcacagccagccccagctctccctctcagttgagccaaagcatctgtgctcatttgtttttagatttcttaaaggatttcatttgaaagaaaaaagaaacaagtccatgagaccactgtcctgtgaacgtgaactactttctatttgggtaggtaggaagaagtgaggatagttgcaaagttataatttcattccccttccccacccagaaaaatagaactgagagtcttaaaacatggaatctggctgtagcttggccacagttacctatgtctctttagcatagcctcctggatctcagctttatctctaagaaaatgatatagattagtcacatggtccttctaattgcctgaaatcccactataaatttctagcacctgtcacgcaataggtacttaagaaatgttggtgatggtgtttgaactgaggctccactctgatgaaactgtaaagctcaccttccagcctggtaggttgtcacctgtgtaatataaagctggttctttgagggcaaaaggggattctacttgaatgtagctgcagccttatgtacagcaactaccataatgcagtttgtataccgcaggccccatgtggagacacatactggatgggttctttctcgtatgttacatgggaatgccgacagctgtgttttaattgtgtttgacctatgttttcgttgtagggaagcagaaatgagaaacagtatcttagcccaagttctggatcagtcggcccgggccaggtgtaagcatctttgatttcatttccataaagttagcttgagttagttgaatggggtgattagataccattattgctatcactagatgaaatatttgcttaggctgaaaacacttgagatgtgtaagaagtgtgaagtttataaacctagagaactgtactttaatccctagtaaaagtaccaggtcacttctcttaccaagatgttctccaggtgtgtattaggtaagatttataggaaacaactcatagggccaatcacaaaatgttgctggtagttgacattttgtgtcaactggtgatggggactggggatgggggacttaggggctttttatatgtattgtcagttttagtgtatgttcagagttgttcatcataaaaaccaaaacctgtagaaagaaaaaatgagacagtcagaatgaactggtattttctgtattttaactggaagcccagtttgagtgtagaaaaggcggccacaggtggatcaccaccattatgtgtaatagataaaccgctttccagagggcagtcatatattttaagaaacaggaagcatggtgcttagaatctgagaacccaactttaatcttggctgggccactacccccatgtgcccatgtggagattggcatgggtgaacttcagttttctcatttttaagaggagtaacaatactgtcttgccctacactgagggacaagcttgtgaagtgctttggaaaggtcaatgcatagttttaaggtataacataagtgcatttgattttaatggattttttgcatatgtattttttctttttagtaagtaacttagcacttgtaaagcctgaaaaaactaaagcagtagagaattaccttatacagatggcaagatatggacaactaagtgagaaggtaagcttagacagccttgaggaactttactgttacctgctttatcaaaacatggcttcaaaaggtcagctgcatcttcactggattacagaattcttgctgactctcagaagaaattgttggagagaatagtcatacctactttaaaagagaataaattgcctttcctaaattcctctgcttcgctcctttcctggcgttgctctggaaccttgttggtgtctgtgacccaatgactgttagggtcagctagcttcaattgcccctgcactggaagcaaggtttgtcagtaacaccaattaaaatactaccagtgtaagtagaaggtgtgttttgcagatgagaaggtgctaagatgccttgcttatgttctctgtgttgctgtaataccatgaggggtatgttgtggcaaacctggcctttgagatcaagacgaaccccacctgccctgagaagccgtctgctaccaccacagcctacccgaattggtcctgtcccctaaacccctcacactgagaactgcttgtgtgggagagagctggttgggttgatcttttccgagtgtgacttacctccttcaaggggatgtttaagcttctcgggcagaagtggtgtgtctattcctgacaccaaacaccgtggtatatgtggttgtcacactcagctagtgatgataaaggtgttcttaaatatgttagctttcagttttcctgaggaagcaattttatggatacttccccctccttctcaagtgaggaatagcagagcaaattttatttggaacttaaaccaatagttataaccaatagtttcaacctcctgcctcaccactgcttccttcctgagctctttccccacacctcaaaaagagtacaaagtgattccatctgcagaggtaaattctttgtttaaaaaagtactgtttttcttatcttttctggttctcctaggtatcagaacaaggtttaatagaaatccttaaaaaagtaagccaacaaacagaaaagacaacaacagtgaaagtaagtgtccccagatgcttgtggcaaatgaaaagatggatactttaaagattaatgttgagtatacatctaccacacatatttttcagcccagagacattttccttttgtcaaacacgtgaaagtttggggagaaaggctgaatctgttgggggagggttctaatttttataggctcttgactccattcccacccttttagttcacgctaagttgctttaaagacacaaatgtcttgctaaaattggtagaaatcttttctcggaaaatctgagttatgctttattagaaatgttctgacactcatttaattttcctcccagttcaacagaagaaaagtaatggactctgatgaagatgacgattattgaactacaagtgctcacagactagaacttaacggaacaagtctaggacagaagttaagatctgattatttactttgtttattgtctatatgccttttaaaaaaataaacttgttatgcaaaataaaacatttgggtaa

SEQ ID NO: 1783 - DNA, 285 bp, Homo sapiens
ccactgtactccagcatgaacagcagagtgagaccccatctttttttattgttgttgagatgaagtctcactccatcacccaggctggagtgcagtggcacaatcttggctcaccgtaacctctgcctctgagcttcaagcgattctcctgcctctgcctcccaagtagctgggattacaggcacccgccaccatgcccggctaatttttgtatttttagtagagatggggtttcaccatgttggccaggctggtctcaaactcctgacctcaagtgatccaccc

SEQ ID NO: 1784 - DNA, 5710 bp, Homo sapiens
tttttttatttttatttttgttattatactttaagttttagggtacatgtgcacaatgtgcaggttagttacatatgtatacatgtgccatgctggtgcgctgcacccactaacttgtcatctagcattaggtatatctcccaatgctatccctcccccctccccccaccccacaagagtccccagagtgtgatgttccccttcctgtgtccatgtgttctcattgttcagttcccacctatgagtgagaatatgcggtgtttggttttttgttcttgcgatagtttactgagaatgatgatttccaatttcatccatgtccctacaaaggacatgaactcatcattttttatggctgcatagtattccatggtgtatatgtgccacattttcttaatccagtctatcattgtgggacatttgggttggttccaagtcttcgctattgtgaatagtgccgcaataaacatacatgtgcatgtgtctatatagcagcatgatttatagtcctttgggtatatacccagtaatgggatggctgggtcaaatggtatttctagttctagatccctgaggaattgccacactgacttccacaatggtcgaactagtttacagtcccaccaacagtgtaatagtgttcctatttctccacatcctctccagcacctgttgtttcctgactttttaatgattgctattctaaccggtgtgagatgatatctcattgtggttttgatttgcatttctctgatggccagtgatggtcagcattttttcatgtgttttttggctgcataaatgtcttcttttgagaagtgtctgttcatgtccttcgcccactttttgatggggttgtttgtttttttcttgtaaatttgttggagttcactgtagattgtggatattagccctttgtcagatgagtaggttgtgaaaattttctcccattttgtgggttgcccgttcactctgatggtagtttcttttgctgtgcagaagctctttagtttaattagatcccatttgtcaattttggcttttgttgccattgcttttggtgttttagacatgaagtccttgcccatgcctatgtcctgaatggtaatgcctaggttttcttctaggatttttatggttttaggtctaacgtttaagtctttaatccatcttgaattgatttttgtataaggtgtaaggaagggatccagtttcagctttttacatatggctagccagttttcccagcaccatttattaaatagggaatcctttccccattgcttgtttttctcaggtttgtcaaagatcaaatagttgtagatatgcgtcattatttctgagggctctgttctgttccattgatctatatctctgttttggtaccagtaccatgctgttttggttactgtagccttgtagtatagtttgaagtcaggtagcgtgatgcctccagctttgttcttttggcttaggattgacttggcgatgcaggctcttttttggttccatatgaattttgaagtagttttttccaattctgtgaagaaagtcattggtagcttgatggggatggcattgaatctataaattaccttgggcagtatggccattttcacaatattgattcttcctacccatgagcatggaatgttcttccatttctttgtatcctcttttatttcattgagcagtggtttgtagttctccttgaagaggtccttcacgtcccttgtaaggtggattcctaggtatttgattctctttgaagcaattgtgaatgggagttcactcatgatttggctgtttgtctgttattggtgtataagaatgcctgtgatttttgcacattgattttgtatcctgagactttgctgaagttgtttatcagcttaaggagattttgggctgagacagtggggttttctagatatacaatcatgtcatctgcaaacagggacaatttgacttcctcttttcctaaatgaatatcttttatttccttctcctgcctaattgccctggccagaacttccaacactatgttgaataggagtggtgagagagggcacccctgtcttgtgccagttttcaaagggaatgcttccagtttttgcccattcagtatgatattggctgtgggtgtgtcatagatagctcttattattttgagatacatcccatcagtacctaatttattgagagtttttagcatgaagggttgttgaattttgtcaaaggccttttctgcatctattgagataatcatgtggtttttgtctttggttctgtttatatgctggattacatttattgatttgcgaatgttgaaccagccttgcatcccagggatgaagcccacttgatcatggtggataagctttttgatgtgctgctggattcggtttgccagtattttattgaggatttttgcatcaatgttcatcaaggatattggtctaaaattctccttttttggttgtgtctctgccaggctttggtatcaggatgatgctggcctcataaaatgagttagggaggattccctctttttctattgattggaatagtttcagaaggaatggtaccagttcctccttgtacctctggtagaattcggctgtgaatccatctggtcctggactctttggttggtaagctgttgattattgccacaatttcagctcctgttattggtctattcagagattcaacttcttcctggtttagtcttgggagagtgtatgtgtcgaggaatttatccatttcttctagattttctagtttatttgcgtagaggtgtttgtagtattctctgatggtagtttgtatttctgtgggatcggtggtgatatcccctttatcattttttattgtgtctatttgattcttatctctttttttctttattagtcttgctagcagtctatcaattttgttgaccctttcaaaaaaccagctcctggattcattaattttttgaagggttttttgtgtctctctttccttcagttctgctctgattttagttatttcttgccttctgctagcttttgaatgtgtttgctcttgcttttctagttcttttaattgtgatgttagggtgtcaattttggatctttcctgctttctcttgtgggcatttagtgctataaatttccctctacacactgctttgaatgtgtcccagagattctggtatgttgtgtctttgttctcattggtttcaaagaacatctttatttctgccttcatttagttatgtacccagtagtcattcaggagcaggttgttcagtttccatgtagttgagctgttttgaatgagtttcttaatcctgagttctagtttgattgcactgtggtctgagagatagtttcttataatttctgttcttttacatttgctgaggagagcttccaactatgtggtcaattttggaatcggtgtggtgctgaaaaaaatgtatattctgttgatttggggtggagagttctgtagatgtctattaggtccacttggtgcagagctgagttcaattcctgggtatccttgttaactttccgtctcattgatctgtctaatgttgacagtggggtgttaaagtctcccattattaatgtgttgggagtctaagtctctttgtaggtcactcaggacttgctttatgaatctgggtgctcctgtattgggtgcatatatatttaggatagttagctcttcttgttgaattgatccctttaccattatgtaatggcctctttgtctcttttgatctttgttggtttaaagtctgttttatcagagactaggattgcaacccctgccttttttgttttccatttgcttggtagatcttcctccatccttttattttgagcctatgtgtgtctctgcatgtgagatgggtttcctgaatacagcacactgatgggtcttgactctttatccaatttgccagtctgtgtcttttaattggagcatttagtccatttacatttaaagttaatattgttatgtgtgaatttgatcctgtcattatgatgttagctggttattttgctcattagttgatgcagtttcttcctagtcttgatggtctttacattttggcatgattttgcagtggctggtaccggttgttcctttccatgtttagtgcttccttcaggagctcttttagggcaggcctggtggtgacaaaatctctcagcatttgcttgtctgtaaagtgttttatttctccttcacttatgaagcttaatttggctggatatgaaattctgggttgaaaattcttttctttaagaatgttgaatattggcccccactctcttctggcttgtagagtttctgccgagagatccgctgttagtctcatgggcttccctttgtgggtaacctgacctttctctctggctgcccttaacattttttccttcatttcaactttggtgaatctgacaattttgtgtcttggagttgctcttctcgaggagtatctttgtggcgttctctgtatttcctgaatctgaatgttggcctgccttgctagattggggaagttctcctggataatatcctgcagtgttttccaacttggttccattctccccatcactttcaggtacaccaatcagacgtagatttggtcttttcacatagtcccatatttcttggaggctttattcattttattttttctctaaacttcccttcttgcttcatttcattcatttcatcttctatcgctgataccctttcttccagttgatcgcatcggctcctgaggcttctgcattcttcacgtagttcttgagccttggctttcggctccatcagctcctttaagcacttctctgtattggttattctagttatacattcgtctgaatttttttcaaagtttttaacttctttgcctttggtttgaatttcctcctgtagctcgtagtttgatcgtctgaagtcttcttctctcagctcatcaaagtcattctccgtccagctttgttccattgctggtgaggaactgcgttcctttggaggaggagaggcgctctgctttttagagtttccagttttctgctctgttttttccccatctttgtggttttatctacttttggtctttgatgatggtgatgtacagatgggtttttggtgtggatgtcctttctgtttgttagttttccttctaacaggaccctcagctgcaggtctgttggagtttgctagaggtccactccagaccctgtttgcctgggtatcagcagtggtgtttgcagaacagcggtttttcatgaaccgcgaatgctgttgtctgatcattcctcaggaagttttgtctcagagtacctggccgtgtgaagtgtcagtctgcccctactggggggtgcctcccagttaggcgggtcaggagtcagggatccacttgaggaggcagtctgcccattctcagatctccagctgcgtgctgggagaaccactgctctcttcaaagctgtcagacagggacatttaagtctgcagaggttaccgctgtctttttgtttgtctgtgccctgcccccagaggtggagcctactgaggcaggcaggcctccttgagctgtggtgggctccacccagttcgagcttccaggctgctttgtttacctaagcaagcctgggcaatggcgggcgcccctcccccagcctcgctgccgcct

SEQ ID NO: 1785 - DNA, 2521 bp, Homo sapiens
cacgacccaatctcatcaaaccagctgcccagtggcaagatctgaaaaggttgggagaagaaaggcctaaaaagtctagagcagcatttgaatcagataagagcagctatttttcagtgtgtaacaacccattgtttgattctggggcacaggatgattctgaggatgactacggtgaatttctggatcttgggcctcctggaatctctgaattcactaagccaagtggccaaacagaaagagaacccaagcctggaccgagtcataaccaagcagcaaatgacattgtcaaccccagatcagagcagaaagtcatcatcttggaagaaggtagccttctttacacagaaagcgatcctttggaaactcagaaccagtcatccgaagactcagagacagagctgttatcaaatctaggagagtcagctgctctagcagatgatcaggccatcgaagaagactgctggttagatcatccttacttccagtctctgaaccaacagccccgtgaaataacaaaccaggtcgttcctcaggaacggcagcctgaagcagaactgggccgcttgttgtttcagcatgaattcccagggcccgcttttccaaggccggaaccccagcaaggtgggatttcaggcccctcttctcctcagcctgcccatcctctaggagagtttgaagaccagcagttagcaagtgatgatgaagagccaggtccagcctttccaatgcaagaatctcaagagcccaatttggaaaacatttgggggcaagaagctgcagaggtagatcaagagctcgttgaactactagtgaaagaaacggtaagttttattttatcaagtaaatgtagacactacatatactgagtttttttcttttttttttttcattgcaaaaaaaaaagttgttggtatgcgtggacttcattttcctaagaagtatatatctagatgtacagaatagaagagacactctgaagacatgaaaatggaatcagggttcctttactatacttaaccttcaggaagctctctgggattctaactgcatatcatggtggcctggtgctgtcatacctgcagtcccttgtttttttcaaattccttgagttcactccaaatggaaacccttaaagcagttttattgaattacctagacctatgctgtccaatatggcacttactagctccttgtggctgtttacatttaaatgtcttacagttaaataaaattttccagtggcatcagtcacatcttaaccttagtagccacatgaggctaacagcttacctcatcatcaagcatggaggacagtgtttctgtcatccaacaaagttctattagtggtgatattaagagtaacacaagggctgggcgtgctggctcacacctgtaatcccagcactttgggaggccaaggtgggtggatcacaagatcaggatatcaagaccatcctggctaacacggtgaaaccctgtctctactaaaaaaattaaaaattagccgggcgtggtggcgggcgcctgtagtcccaacttcttgggaggctgaggcaggagaatggtgtgaacccaggaggcagagcttgcagtgagtcaggatcgtgccactgcactccagcctgggcgacagagtgagactctatctcacaaaaaaaaaaaaaaaaaaaaaaaaaaaaaaaaaaaaaaggtgttacatctggtagccactatttgccttcaaacaagtccgttaaccctactttacccaggcgggttttttttgttttgtttttggtttgttttttttttgagaccgagtctcactctgtcacccaggctggggtacagtggtgcgatctcagctcactgcaacctccgcctcctgggttcaagcgattcttctgtctctgcctcccgagtagctgggatcacaggcacataccaccacgtctggctaatttttgtatttttttagtagagacggggtttcaccatgttggccaggctggttttgaactcctgacctcaggtgatccgcctgcctcgacctcccaaagtgcttcgattataggcatgagccactgcacccggccacccaggtgtttttatctaggcactaggttgtgtgctgcttgagggctggcatgagattgtaacttatttgtgtttggattccctttgtctagacagagatgctcaatatttgttgaagcaatgaagaatggatctgtaaaatggggacagagaaccagatctctcaagacctttctagacctcatcttctatgtagacagatgaatctgggaactagtgttgaatttgaagacacacacagacctgcttcacagcccttttctagtctttagtcattttattatactttttgccatctgtcttgtattgccatttgaaaccattctagtgaatgaaatataaattatgttcttatttgtttctaggaagcaagatttccagatgtagcaaatgggtttattgaggaaataattcattttaagaattattatgatctgaatgt

SEQ ID NO: 1786 - DNA, 449 bp, Homo sapiens
gagattcaccatctcctttcttctagggacttcccagaggaactgttgttaccagtttagcatgtatccttccaggtcttttctttgaatttgtatgtatccatgtgtatatacatgtgggtacatatacatacttttagaaatgattttgtttgtgtcttattgacatattttaagtaaatggaatcattctgtgtatgattttgcagcttgcttttcttcacttaatggcatttcttagtgaagcttcccatttcagtacagactgagctacctctttttttggtaggggtcagttgtagagtattttgtagaacaaataagtaatagtttatttaaccattcactcagggacaaacttcacaatgtctctaggcttttttctgtttatgctgaatattcttgtatatgccctttttcgatagagtttatagaacagtatgaaaaaa

SEQ ID NO: 1787 - DNA, 304 bp, Homo sapiens
tttttttttttttttttttttttgagacggagtctcactctgtctcccagactggagtccagtggtgcgatctcggctcactgcaagctccgcctcccaggttcaggccattctcctgcctcagcctcccgagtagctgggactacaggcgcctgccagcacgcctggctaattttgtgtatttttagtagagatggggtttcaccatgttagccaggatggtctcgatctcctgacctcgtgatccacccgcctcggcctcccaaagtgctgggattacaggtgtgagccaccgctcccagcc

SEQ ID NO: 1788 - DNA, 1988 bp, Homo sapiens
caacagagtgtcccgggactcaggcctctgatcaagttacccccagaggatcagagaggtagagagagctgaacctctcatttaggagggccggggaggagagggaattcttgagatcgcattcccaggctcaaatagaggaggaaagtggacaaagacgtagtgaaggtaaagaaggcagagaagaagggggagatcaggacaaccttcttaggtagtgagctccctgtccagggaggcattcaaatctgcccaatcaacattgataacaaaatcccttcctgaggggtagtcagtgccccatttcacagcagaggaaattgaggttgtcctttgtccaggacaacaaaggcaagagctcatggcaggctgtggttttaggggttgacgaaggagaagcattcagagggcactggcttctggacagcaatgagtgcccgggccacgcggccccgaagccggcgagggaggcatgctccacccgtaagtgtcaccctctcccctccacacccagatcctggggaccccaaggtcctgtcctgcctggctcagagcagggccccgggggtcatttgcagggtgaactggatcccgtggctgagagttcagaggaggtcgaggcagccagtgggagctccaagcccagctttgccccacctccggtgagctccgggctggagcagctgggccccatggaggaggtcagtggccaaggcctaggaagcaggtaagacccgcttggtctgtgcccttcactccagtccagacgcatctttgccatccacagatctgctgatgtgcctgctctgctcacacacctaccatagctccctattgccttcagcctgactttcttttttttttgagtcttgctgtgtcacccaggctgtagtgcagtgcagtggcacaatctcggctcacagcaacccctgcctcccggttcaagcgggagcctcagcttcctgagtagttgggattacaggtgtgcgccaccacatccggctaagttttgcatttttagtgagacagggtcttgccacattagccaggctggtcttgaactcctgcccttaagtgatcccccaactttggcctccaaaagtgctgggattacaagtgtaagccgccgccccagaagaccctatttccagaaacttctgtctctcaccttcaggcctttcccagtgcccgtcacagtccaacttcactctgtttctcagctccaggtctcccctccaacttcttcaccacctctatctagcctcttccttgaattcacagcctcccagtctcaccctgggatgccagtcccagaacacgcagctcttgccaactccctgctccgctcacacctccccaagaccatgaagtttaagccctcagaattccctgcccagggccgagcatggtggctcatgcctataatcccagcactttgggaggccgagttgggcggatcacctgaggtcaggagtttgacaccagcctagccaacatggtgaaaccctgtctctactaaaaatacaaaaattagccaggcgtggtggtgggagcctgtaatcccagctacttgggggaccgaggcaggagaatcacttgaacccaggaggtggaggttgcagtgagccgagatcgcgccactgcactccaggctgggcaacagagtgagactccgtctcaaaaaataaaaaagaattccttgcccagcatggagtgactcaagtgcctgagttggtgtccacaggactgacaagaagatggatgggggctctggcagggaactggcctcagcccccgaagtgccccacaaacctgcagtggaagcccaccaagccccagaagcagccctacagtacaaggagactgtgccccctgggaatggggcccccgatgtgtttcagaccctccagcacactctgagctccctggaggcagcggctgcagcctggcgccaccagccccccagccattctgggccgatggagttc

SEQ ID NO: 1789 - DNA, 2960 bp, Homo sapiens
gagctgagaaggagacgctgcagaaagaggtgagtggggccatcctgagtcccatgtggctctctgtctgagggaggaggtgggcctgatgtaggcaatattcattcatttgttcattcaaaaaaccttttaaggctgggtgtggtggctgacacctataatcccagcactttgggaggtggaggcaggaggatcctttgaggccaggagttcaagaccagcctcagcaacacagcaagactgccacctctgcaaaaaaattaaaaatcagccaggttggccaggcacagtggctcacacctgtaatcccagcactttgggaggctgaggtgggtggatcacaaagtcaggagttcaaggccagcttggccaacatggtcaaaccccatctctactaaaaatacaaaaaaaaattagccgggtgcggtggcataggcctgtaatcccagctactcaggaggctgaagcaggagaatcacttgaacccgggtgatggagatggcagtcagctgagatcgtgccaatgcactccaacctgggggacagagtgagactctgtctcaaaaaaaaaaaaaaaaaatcagccaggttggctgggtgcagtggctcatgcctgtaatctacaccagcactttgggaggccgaggtgggtggctcccttgaggccaggagttagagaccagcctggccaacatggtgaaaccttgtctttactaaaaatacaaaaattagccaggtgtggtggcacgtgcctgcaatcccagctactctggaggctgaggcaggagaattgcttgacacaattctgcagctaccagggaggctaaggcacgagaatcgcctgatcccaggaggtggaggttgcagtgagccgagatttcaccactgcactccagcctgggtgacggagtgagactctgtctcaaaaaaaaaaaaaaataataataatgctgggcacggtggctcacgcctgtaatcccagcactttgggaggccgaggcacagatcacgaggtcaggagatcgagaccatcctggctaacacggtgaaaacccgtctctactaaaaatacaaaaaattagccggcgtggtggcgggtgcctgtagtcccagctactccggaggctgaggcaggagaatggcgtgaacccgggaggcggagcttgcagtgagccgagatcccgccattgcactccagcctgggcgacagaagaaaactctttctcaaaaaaaaaaaaaaaaagaaagaaagaaagaaagaaaaagaaagaaaactgagggtggtgggagtaggccctggagtggcagcatgactggcctgttcaagaaacccgaaggaggccagtgtggctggaacacagggggcaacagggagagtgtggggagccagaacagaacagagggagaacaaatgcagatcgcgtagggcctcgtgggctgcaaggagacgcttgggctttgcttggattaaggtgagagccctggagggttttgagcagaggaggggcatgctcgacgcaggtgttcacaggcgccctctggtggcggaggtgagggtggactcctggagagccaggaggcgacttcattggtccagacatgcacgatggtggaggttgtagaagtggagagatgcggacggattctgggtgatgtggcagatggaactgacgtgtgagcgtgaaggctagagagaagtcaaggacaacttcaggctttgggacctgctggactagaagggagagatggaggagctacagggtaggcaggtttggctgggggtgaccagatctctttagcccttgataagctcaagtgtccatgagacatccacgtggggtcctcaagggagcagctatatgtctgagtccagggctcagaggagacagcagggcagaagggagaaacttgagcatccttagcacacaggtggcatttaaagccatgtggctgctgggtgcattgtctcatgcctgtaatcccagcactttgggaggctgagtcaggaagatcacttgaggtcaggagttcaagaccagcctggtcaacatggtgaaaccccatctctactgaaaatacaaatatttgtcaggcatggtggcagatgcctgtaatcccagctactcgggaggctgaagcaggagaatcacttgaatccgggaggcagaggttgcagtgagctgagactgtgccactgcactccagcctaggtaacagagcaagactccatctcaaaaataaaaataaaaaagccatgtggctgaatgagatattgagagggaagccctcatcttaggctggtagaaaaactttggagcccagtccagggattcatttttccccagagtggggcccatttttctgctgggaaaaataaaatcctcagcagctgagaaacattcccaaggtcagatagtgagatttttggcaggctaagtatccaagcctcttgccttccagctagggttcttgccacttccccaagaacaggccttggggagagagggctggtggttggtttgagcccctaggcctgacgtccccctcatctttcccaggttcaagagctgcaggattccctcttgaggctggagccctgcccacatctttcccacaaccaagcaggtggctcaggcagtggttctagcagctctgaggcagacagggaaccctgggagactcaggtgagtgcgagaagttcaatcccatggtcttgatgtccttagccttcaggggaatgagactcaaatctttgtcatgggatccaacagctttggggttgcaaaatgcctacaatcccaggctcttggtgacaattggggtcagttatatcacttcttcttggcaggactccttctccctggctcaccccctgcttcggcgcctccgcagccattccagcacccagatccttgggtctcttcccaaccagcccctcagtcctgagatgcacatcatgg

SEQ ID NO: 1790 - DNA, 15044 bp, Homo sapiens
gcgagctcggtgttccgctttttgtgggccgggtgggtttcctaatctggtttcgtctgcctggttcatctgtgtgcgatggctccggactcggatcccttccctgaagggccgctcttaaagctgctacccttagacgctagagaccggggcacccagcgctgccgcctgggcccggccgccctccacgccctgggcgcgcgcttgggctcggcagttaagatctcgctacccgacggcggctcctgcctctgcactgcctggcctcggcgggacggagcggacggctttgtgcagctggacccgctgtgcgcgagccccggggcggcggtcggggcgtcgagatcccggaggagtctcagcctgaatcgcctcctcctagtgccctgtccgcccctgcggcgcgtcgccgtgtggccggtgttgcgagagccggcaggcgcgcccggtgcccggaatacagccgcggtgctggaggcggcacaggagctgctgagaaaccgaccgatctccctgggccacgtggtggtcgctccgccaggcgctcctggcctggtggctgccttgcacatcgtcggcgggacgcccagtcccgatcccgctgggctggtcacccctcgtacccgcgtcagccttggcggggagcctccgtcggaagcccagccgcagcccgaggtgcccctgggaggtctttcggaggcggccgactcgctgcgggagctcctccgcctcccgctccgctacccgcgcgccctgaccgcgctgggcttagcggtgcctcgcggggtgctactggcggggccccccggagtgggcaagacccagctggtgcgggccgtggcgcgcgaggcgggcgcggagctgctggcagtcagcgccccggcgctgcagggttcccggcctggggagaccgaggagaacgtgcggcgggtcttccagcgcgcccgggaactggccagccgcggacccagcctcctcttcctggacgagatggacgccttgtgtccccagcggggcagtcgagcacccgagagccgcgtagtggcccaggtgttgacgctgttggacggcgccagtggggaccgcgaggtcgtggttgtgggagccactaaccggccggacgctctagacccagcgctgcgtagacccgggagatttgaccgagaggtgaatgggcttggcgggtttgcccactgtcggtggaacctcggccgcttctggcgccatttggctgccccggaggcgtttgcctcttaggtttgagcatcggtgaggttggagttggggctctttgcaatgcagagaacacgttctctgccgatatgtgatctgtgagtcaggacctgtatttccccagagtcaaattgtcaggacctgtgagtcaggatctgagagtcaggacctgtttccccagagtctaattgttttgggaagcgaggtgtccattacagattaattttgttgtgcaggtcctataatcagtaatgttaattcttaagagaattttggtcacctacaagcgtgttaaactcattttttggaatgagaatttaaagaaggatagcctcaagaagtaagtgtgttgaaataaaaagggagaaggtggggaagaactaaatggaagcaggcattaactcttctggatttattcattccttgtcataacaccagcatcctattccacaattgaggaggtacccacaactgctccctgagttgtcagggaggttgaatattcagagctgtcctattttaagctttggtcctaaattgacttgaattctaaagaacagtttgaaatttagtgactgatatttctattttgtgataggattcaaaagagaaatgataattacacacttttagctcagttagttcaggacttgagtggatttcttccttgcactatctagtacctgtgtccttaagggcagggacctagctatctatacctggcttctagaactttgtgtgttcttaaaaataacaaaaacttgttaaatgacatagaattttcattgtgcaactttctagccagtgttactcctctggaatattaggattttcgtatattcagaatctaaagtatacgtaaagtgcacggtactagttccaaagtggttcactaaattgtcgtacatgtttgtcaggataaaaaacatattattattttggccgggcgcggtggctcacgcctgcaatctcaatactttgggaggctgaggtgggtggatcacctgaggtcaggagttcgagaccagcctggccaagatggtgaaaccccgtctctgctaaaaatacaaaaaataagccgggcatggtggcacatgcctgtagttccagctactctggaggctgaggcaccagaatcacttgaaccaggaggtggaggttgcagtgagctgagatggtgcccgctgcactccagactgggcagcagagtgaaactgtgtctcaaaaaaaaaaaaaagaaaaaaaaaatatatatatgtatacacacacatatataaaatttttttggaagtaattcttttttaattgatctatttttattgatacataattgtgcatgttttggggtacatgtgatattttggtacatgcatacaatttgtaattatcaaatcagggtgcttaggatatccatcacctcaaacatttatcatttcttatctgagtgttgggaatatttcagattctctctagtagctattttgaaatatacgagaaattattgttaactatagtcaccctactacactatcaaacattacacatattccttctacctaactgtatgtttgtacccatgagccaacctgtcttcatcccctcacccccaacccttcccagtgtctggttgctatcattctgctgtctacctccatccatgagatcaactttaaaaataatatattttaaactatatacttcttcttcttttttttgttttgctttgcatataggtggtcattgggactcccacacttaaacaaagaaaggaaattctgcaagtgattacctcgaagatgcccatctccagtcatgttgatttgggccttcttgcagaaatgacagttggctatgttggtgccgacctgacagcactctgtagggaggctgccatgcatgccctccttcatagtgagaaggtaagaagtgttaatttatgaacatctatgttaatctattattgtaacagattaatttgggggttaaaaaaaagcggtgagtacattttccttagaacatttgatagcttccacagctgttgcttatacattttacatctcaactctatataaatagtatatgattgagggtggggataaagggctgagtcctctgggtctactgagtgaatttgttccctactcttatagtaactccctagtgctgaagcccagagcagccaagaaatagtgtggccccagaagaatcaaagagtttttttaatttgaatttttttattttgaggcaatttcagacttagaagttacaaaaatagtacaaagagtttccatatacccttctcctagattctccaaatgtaacatttgccacatttgctttatcattctctcttcatgtgtatttccttatatatatacatatatataatgaaatatttgagcatatactacatccatgatgcccctttacccgcgaaaacgtaagtgtatatttctgaaaaacaaggaccttaaccacagtatgatgatcaagctgagaaaattaacgcagacataatacttgtacttaacctaaataggccttaatctagaatcatacttcaggctttcttctatgaaaacataactttttaagagtcagttattctgtagaatattcgtcagtttgggtttaactaatgtttcttcatgattcaattcaggttttgcattttgggcaggaatataatagaaatgatcctgtgtctttctcattgcatctgttaggcagcacatgatatgtttctgttctatcactggtgaagttaactttgatttcttggttaaggtggtgtctgtgagatttctccattgtcaagataccgtttttccctttgttattaataagtatctagtgggagaaataagcttttctaacctaggagaagattgggcacttggaattgtatttaaatttgtccttgatctgcaggtctgtaattcatgactatttcctaacaatatttaagatattagattaaatataatacttttcaactttgttggttggaaaatccagtattttgtatataataaatagtcctgaatccttaaacccattcaggaaaaaactgatttcagcaggctaaggattctgaaacagagttttcaatctcatttgtaacatcaaaattgtcttttcatcttaaactgcaaaagaatgatttattatcctaaattttgaaaaacctttttacctaaataatttataccttgcctcacttcctttcctttatttctacagttacaccgaaggtggggaggagttatgtgatcttctagttgatcttttaagtcttcatcttgtaggtttagaccaaaactacttgaagttttaaagttctgtgtgtaaagatgtgagaatagatgtcttttgagggagacaataagtaagcaggagatgggaagggagatttacattcaggatttcctctgctttgaagttccaggtttgaccataagcacctctcacttaggtggaccagtcagctgctgtcgtcccagggtggagcccactgctacttcaggaggggcctgctcaggtgtagttaccacaggtgatggctgagttcagaaacaacccaggggaagtggaaggaagaaaggcaaaaagcatgaagggacagacaactgggaaggtactggctccatcttttattctttcccccaccagctgaggggctgctgctacctctccctgtaccagggcagataagggataccttacactttgttaaactttttgtgaagtattcctattaaaggattagaactgtagtttaacactcagacacacacagaggggaaagaatgtataagcccaaagaatcaagtaaaataatgtgtacacacatgatcttgaactataaatgagattttcaaatattagttcgtgttacctaaagattagttaatatttggacatcagacacctaacatactatcagccagttaaaaaggcttttttttaagtatataatagggttattcatgagaaatgaagatagaaaattataaagaactgcctacctgaaatctcactttccagagatgacaattgttaacacttttgggagaatactttacagaatagctctatacatacagattcacttaacatctgtttacaaataagaaaagacagtttgtttttgaaaacgggaatttgtggacaactagatgtttagaattggatataagagggcaaatactttaataaatacagtacagatatttttaataaaattttcaggactttttaactaacagaaaaaaatgtgtttcactagaatgatcaaggagaatgtaaagagtctccaaaatataacctgagagtgaagacgacttctctaggcataacataaaccttaatagccaaaaaagagattatttgctgagttgaccatttgggggtggcaaaacaatactataaagtagtcagactaggaaaaatacttttagtccaatttccttgatagggaatgaacaaatcttacaaatcagtaagaaaagaccaacagtccaagagaaaatgggtaatggggtatgaacaggtagttgacaataaaaggaatgacaataaacatgaaagatgttcaaccttgatttcttctaaaattattgtctttattttgaaataattaaaacttataggaaagttgcaagatagttacaaagaacttccactaaaccctttatccaaattcaccaatttttaactttttgccaaataagctttatcattctcttttgctctccttgctccctctcctcttctctttctctctctctctgtcatctccatatatatgtatttatatgcacatagtatttatttattttggactatttgagagaatgggttgcatatatcatgacactttatcccttaacattttaatgtctatttcctaagaacagaaatgttcccatatgtcaccacagtatggtgatgtatagtgttgtgtccttagagcctcacatgtagaggcacagagtgtacattggttcctcattggtgatgctaacttttatcaactagttcaggcagtgcgcagtttctccactgtggaactgctatttttccctttgccactaatgagaaatctgtggggagacactttgagatatcctgctcctcatcaaactttcaggctgggcacagtggcttacacctgtagtcccagctgctcaggaggctgagatagaatgatcacttgagcccaggtgttcgaggctcaatgagctgttgcctcaatgccactgcactccagcctgggcagcagagcaagaccctgtctcataaatgaataaacttttactcccctcaacatagcatccaattcttgctcataacagcctttactatcatgattgcaagacgggcgatttttttaattccaatattccctctacctcattttgaattgaagaaatttagttaacacagtaatgaatgagtactggttcttcctgtcatattggcagacatttaagagtttggaaatgggccatgtgcggtggctcacacctataatcccagcactttgggaggctgagatgggtgggtcagttgaggtcaggagttcaagaccagcctggccaacatggggaaaccccgtctctgctaaaaatacaaaaattagtcaggtgtggtggctcatgcctataaatcccagctactcggtaggctgaggcacgagaatcatttgaacccaggaggcggaggctgcagggagccaagatcacagcactgcactccaacctgggtgacagagtgagaccccgccaaaaaaaaaaaaaaaagagtttggtaatgtctgtactggagaggtgtggagagaacacagcttcatattatcggagaagaataaattgttgcagcttccttagaggacaatttggtaatagctgtcaaaattgtatatgtgtgtacttgtaaacccagtaattctactttgaggaaattattacataaaatacttgaacatgagtttgaacatggtggctcatgcctgtaatcccagcactttgggaggctgaggtgggaggatcgctcgagcccatgagttccagaccagcctgggcaacatagggagaccgcatctctacaaaaaaaatatatatatatttttttaattagccaggctggtggcacatacctgtagttctagctactccggagggtgaggtgcaaggattacttgagcctgggagactgcagtgagctatgataacatcactgcattccagcctgggtaacagagtgagaccctgtctcaaaataaacaaatacttgaacatgagcacaaagactttttcagttgcagctttgtttttaatatctaaagactggggatgacctaacgtttgtcagaaaggtgtagttggggtaaattcagtagtgtattatggaattgtcaaaaagaatgacgtagaactgtgttagttgacatgaaaagctctctaagataggtgaaagaagaaaagtacaggctgatatagtatggttccatttgtgtatctgtttaaaaggatatatgtatgcttactagcataacatactggaaaaatacacaaactcttgacatctttcggggaagaattactggcaggaattggcagggagacatttaattctttgtactatgtatataaattgtttttataatgataacaaaataactttacaaatccaaaagaagattttaaaaacaaattgtgctataaaaaaagaccaacctaatttttggtttgattttgcttttttgggtgtatttcttcagaaccaggacaatcctgtgattgatgaaatagacttccttgaagcttttaaaaatattcagccctcatcgtttcgaagcgtcattggattaatggatatcaagcctgttgactgggaggagattggtggccttgaagatgtaaaactgaagttaaaacaggtaagacagataatctacttaatccagtaggatattacagattaacattctgtgcatttatgatgacaacatactgcgctgaaactgctcttgctcctatcactaatgtgatcctaacatctaaatccaatgattgcttttcagtccttatttaattggacttctgtggatgtctaaactggtttttataatttcccacctcgaccctctctttgtttttgctttaaagagtttataacctaaggctgggtgtggtggcttatgtctataatcccagcactttgggaggccaagggaggaggattgcttgagttcaggagttcaaaaccagcctgggcaacatagcaagcccttgtcgctatttaaaaaaaaataagtttataatctaaggctgggcgcagtggctcatacctataatctcagcattttaggaggttgaggtgggtggatcacctgaggtcaggagttcaagaccagcctggccaacatggtgaaaccccgtctctactaaaaatacaaaaattagctgggcatgctggcaggtgcccataatcccagctactcggaaggctgaggcaggagaatcacttgaacccgggaggcagaggttgcagtgagccaagatcccaccactgcacgacagcctgggcaacagagaaaccatgtccggggggaaaaaagtgtataacctatagtcttagcactttagaaggccgagacaggaggatctcttgaggccaagagttcaagaccagactgggcaacaaagtaagactccccatctctatttaaaaaaattattttgacacatgtttgctctgtcacccaggctggagtattgtgtcacaaacacagctcactgcacccttgaactcctgggctcaagcagtccttctgcctcagtgccccaccaagtagctgggactacaggtgcataccaccacgcctggctaatttttaaattttttgtagagatagagtcccactgtgctactcaagctggccttgaactcctgggcttaaacagtcctccaactcggcctcctaaaatggtgggattatagtcatgagccaccatgcctggcctacaaaaaaattttttaaattagccaggtgtggtagcacgtgcttatggtcctagctactcaggaggatcacttgaggcttgaccccaggacacccaggagatcgaggctgcagtgagctatgattgcaccactgcactgcagcttgggcaacagagcaagatcctgtgtctttaaaaaaaaattaaaaaacaattttgactgggcatggtggcttacacctgtaatcccagcactttgggaggccgaggcaggcagatcacctgaggtcaggaattagaaaccaacctggctggcatggagaaaccccatttctactaaaaatgcaaaaaattagccaggcgtggtggcgcatgcctgtaatcccagctactcaggaggctgaggcaggagaatcgcttgaacccgggaggtggaggttgcagtgagccaagaccacgccattgtactccagcttgagcaacaaaagtgaaactccatctcaaaaaaacaaaaacaatttataggccgggcgtggtggctcacaccagtaatcccagcactttgggaggccgaggcaggaggatcacgaggtcaggagttcaagaccagcctggccaacatggtgaaaccctgtctctactaaaaatacaaaaatcagccaggtgtggtggcgcaagcctgtaatcccaactactgggaaggctgaggcaggagaatcgcttcaacctaagaggctgaggttgcagtgagctgaggttgcaccactgcactctagcctgggacagagtgagactccgtctcaaaaaaaaaaaaattataatctaaaacgggggtcaacagatttctgtagagagagccacatagtcaatgttttaagctttgtgatccacagtctctgtcataaccactcacctctgccgttgtagcaccaaagcagctgtagaccatatgtaaattagtaattgtattctgataaaagtatagacactgaaattatataattttcacatgtcagaaaatattcttttgattttttttcaagcatttacaaatgtaaaaactattcttagtttgggctgtaccaaataaaggtggaaggccttagtttgcctggatctctgatctaaaagacgttaaatggatgcagtacagggactggtaaaagcacaaaattgaaatgaacaatatggctacctgatagtggatttcacagtggaagctgtgggacgcaactcttcagatcctctcacctgcgttacagtttcagaaattgattttgccaattcgcctacatgtgatcctgccctaatgaactaggtttctctaaccacacacataacagactgatatataagtaataattataatttattcatcttaaccaggagatctatctccagtgaaccctagaatttttgagtccatggataagagcatttataatatgcgccaatattttttatgcattgtctcatttaatgttcacaagatgcatgagagaaattaaccacaccttcctgttggaagcactctgtttccttagctttgagacattaagcttttctgcctttctggccaccctctcccctcccttaaatgttagtgctcaagaggctcccagagtcctcctcttgttggagctgtgggtgattttatgatgatcttgatgtccacagcatccctgaaaactgttgactcagaaatctgtatatctagagtagacatttcttctgatcatcagaactacttcactgcctgcctactggataaccccggggatgtcaaactcagcatgtaaaaagttcagctagtcagctctgcccccacacttggattccctacctcagttaatacagccagccaccccatcccctaagtcagaaatctgtcttctaaaggcatagcatcagaactttgtccctatgtaaagtacaattctgttttatgtttcaaatatccatcccttccacaccatcttcactgcttgtgacactccagccttattatttttgtaggctgaatcattgcaagaaacttgtagctggtctccctgcctctagtttaatttccttccagtccattctccatactgcttcctcagtgcagactaaagctttcaaggcctattgtgatctgactcctacctccacttcaacaccgttgctccttgctggtgctcttgaattacattgtctggggtcagtattggttctgccacctcattagcagtaagacctaggcaaattacttaactttttttaggcccgagtttttttgcatctgtaaaataatgattaaagtggttaaaaaccatttaccttaaaggtaatgaggactcattcattattcggtttactgttactgagtgcctcctttgggtaggtgtcattctagctgctggggattttgaggtgagctttgcttacgttctagcagagcagaatgacaaacccaacgtggaaaaataataatagtgaatacttgctttaaaagtaaaggatgggcagtagcatagagagtgagtaggaggagggggttccgctttaaccaggtagttaggaaagactaactccaaggaattgacacctgcgctgagacctgagtgatgagggatagccacacgaagatcttggggaacgttcaggcagagagaaaagcaaggaaaggctctgagatgggaacaaactaagtgtttaggagacagtcagattatataaggccttgtcagctgtggcgagtaaggagtttggatttggattttattctagttctaatagtaaatcattgaaggattttaaacaggaagtggtatcacctgattcaaatgataagatctctgcagtgtggagaatggactgtttccagctcataataggaggctgagaattgttaaatgaagaaatgaatttactggatgatatgacattttattattatactaaaacaactcttctctttttgtgtactttcagagcattgagtggcctctgaaattcccttgggaatttgttagaatgggcctgacacaaccaaagggagttctcctctatgggccccctggatgtgctaaaaccactctggtgagggccctggccacaagctgtcactgctctttcgtttcagtgagtggagctgatctgttttcaccgtttgttggagattcagaaaaagtgttgtctcaggtttgtttatttccccatatgtttaaatttacttttgaatttttatttcatttcttatggacaaacctttttaaaaatattactagtgttttttccagttaaaaaatttatacgtttattgaaaaatttagaaaatataggaaagtgtaaatatgaaatccttcataatcctcctacctactgttaacattttggtgaatttcctttgtctttttttctgttttaaataaaatcaaaggtaggttttatatatctatagctttatcctgcttttttaaacttaatattactacttttgaaatttatagtattctttgaaaatatggtttttaactcttacataatactccattgtttcttgttttatttactcattccccaattcatagacattcagaatcttttttatatctattttaaaaattataaatagtggccaggcatggtggcttatgcatgtaatcccagcactttgggaggccaaggcgggtgaataactttaggccaggagttcaagaccagcctggccaacgtggcaaaaccccgtctctactaaaaatacaaaaaaattaagtggacgtggtagcgcaccctataatctcagctactcgagagactgaggcacaagaattgcttgagcctgggaggcagaagttgcagtgagctgaaatcgcatcactacactccaaactgagcaacagagcaagactgtctcaaaaaaaaaaaaaaaacaggattataaatagtaatatcacatgactaatgtataacatatagctttttaatatttttttcctaacaaaagatatttcgacaagcaagagcaagcactccagcaattttgtttttggatgaaattgattcaatcttgggagctcgctcagccagcaagacaggatgtgatgttcaagaacgagttctttctgttctcctgaatgaattagatggtgttggacttaagacaatagagagaagaggaagtaaatcaagtcaacagggtaaatacaaggagctgaaaaaatgaagaggtatttattagccagaatgcacctaaaatccaggccaacattaaatataatgcatatatgctatagctttacctatgctgaattcatctcatagaaggatttatataatttcagtttgactttgttaggacttttagagctaataaaaattgtgatttggctaggaaaggtgaggtacattttataataaattatcttaaatataagaatgtgaattttatttttcctaagaatgagaaatataattttacttattgctaatagagaaggcagtttattcttgtttgcatgtcctaaaaaccagtattcatttctttctaaaaatgtttatgtagactgggcacagtggcacacgcctgtaatcccagcactttgggaggccaaggcagaagggttgcttgaggccaggagtttgagactagcctggccaacatagcaaggccccatatctgaatgaatgaatgaatgaatgaaaaataaaggagattattatttccaatagtcttagtaatggaacatttccagttttcttgaggaatgagtttctttggttttaatgaattaaaatggcctttggaagtcccctccctctttctgagtctcttctccagatgagtttggtatccttaaattgtccctgatactttttcttttattcctctctcgttctcattcttttcctattttaaaaattgtcatatggaattgttgcatacactccttaggaatatgtcacactagaattaggaggtatccacgaggttatctaatcaaatcatttcaaaatgcaggaattccttctatagcatctgacaggtattcacccagcatctgctaaaatacttgcaaatatagggaactttgtactttgagggattacgtcactggagagctgcctgattattcaacaaatgattttgaatgcttagtatatgtaaagcctttctctgtctgcttttagacatttctttatccaggatttgcgcacctgcaacttagattgtcatttcaaagaaaaataaaaggtcgagtaaatcttcctctttagggatatgagagtcaagactttctgtagccatatatctccaccggttggtcatatgtatctgtctttttaagtagcctgtttaaggtgtaagccttcattggaggctcaggtgcactcaagtcaccagataagtgttctccgctttgggataaggcttttcataggttctcatatggagaatgtttctcttagctactcccttagccatgcacacaaagtagctctttggttaatgatttgtttctgggatatcttgatatcaagaagctggtctggaaagcggatataagcattctggtcccaagaaaaggatatccctatttgaatttaaatagaccttctgatttataatttttagaaaacttattaacaactgattgacattactttgtgttgtgtgtttgccctcagagtttcaagaagtttttaaccgaagtgtcatgattattgcagcaacaaatagacctgatgtgttagatactgctttgttacgacctggaagattagataagatcatctatatcccacctccagatcacaagg

SEQ ID NO: 1791 - DNA, 15046 bp, Homo sapiens
  SITE (9942): n equals a,t,g, or c
gcgagctcggtgttccgctttttgtgggccgggtgggtttcctaatctggtttcgtctgcctggttcatctgtgtgcgatggctccggactcggatcccttccctgaagggccgctcttaaagctgctacccttagacgctagagaccggggcacccagcgctgccgcctgggcccggccgccctccacgccctgggcgcgcgcttgggctcggcagttaagatctcgctacccgacggcggctcctgcctctgcactgcctggcctcggcgggacggagcggacggctttgtgcagctggacccgctgtgcgcgagccccggggcggcggtcggggcgtcgagatcccggaggagtctcagcctgaatcgcctcctcctagtgccctgtccgcccctgcggcgcgtcgccgtgtggccggtgttgcgagagccggcaggcgcgcccggtgcccggaatacagccgcggtgctggaggcggcacaggagctgctgagaaaccgaccgatctccctgggccacgtggtggtcgctccgccaggcgctcctggcctggtggctgccttgcacatcgtcggcgggacgcccagtcccgatcccgctgggctggtcacccctcgtacccgcgtcagccttggcggggagcctccgtcggaagcccagccgcagcccgaggtgcccctgggaggtctttcggaggcggccgactcgctgcgggagctcctccgcctcccgctccgctacccgcgcgccctgaccgcgctgggcttagcggtgcctcgcggggtgctactggcggggccccccggagtgggcaagacccagctggtgcgggccgtggcgcgcgaggcgggcgcggagctgctggcagtcagcgccccggcgctgcagggttcccggcctggggagaccgaggagaacgtgcggcgggtcttccagcgcgcccgggaactggccagccgcggacccagcctcctcttcctggacgagatggacgccttgtgtccccagcggggcagtcgagcacccgagagccgcgtagtggcccaggtgttgacgctgttggacggcgccagtggggaccgcgaggtcgtggttgtgggagccactaaccggccggacgctctagacccagcgctgcgtagacccgggagatttgaccgagaggtgaatgggcttggcgggtttgcccactgtcggtggaacctcggccgcttctggcgccatttggctgccccggaggcgtttgcctcttaggtttgagcatcggtgaggttggagttggggctctttgcaatgcagagaacacgttctctgccgatatgtgatctgtgagtcaggacctgtatttccccagagtcaaattgtcaggacctgtgagtcaggatctgagagtcaggacctgtttccccagagtctaattgttttgggaagcgaggtgtccattacagattaattttgttgtgcaggtcctataatcagtaatgttaattcttaagagaattttggtcacctacaagcgtgttaaactcattttttggaatgagaatttaaagaaggatagcctcaagaagtaagtgtgttgaaataaaaagggagaaggtggggaagaactaaatggaagcaggcattaactcttctggatttattcattccttgtcataacaccagcatcctattccacaattgaggaggtacccacaactgctccctgagttgtcagggaggttgaatattcagagctgtcctattttaagctttggtcctaaattgacttgaattctaaagaacagtttgaaatttagtgactgatatttctattttgtgataggattcaaaagagaaatgataattacacacttttagctcagttagttcaggacttgagtggatttcttccttgcactatctagtacctgtgtccttaagggcagggacctagctatctatacctggcttctagaactttgtgtgttcttaaaaataacaaaaacttgttaaatgacatagaattttcattgtgcaactttctagccagtgttactcctctggaatattaggattttcgtatattcagaatctaaagtatacgtaaagtgcacggtactagttccaaagtggttcactaaattgtcgtacatgtttgtcaggataaaaaacatattattattttggccgggcgcggtggctcacgcctgcaatctcaatactttgggaggctgaggtgggtggatcacctgaggtcaggagttcgagaccagcctggccaagatggtgaaaccccgtctctgctaaaaatacaaaaaataagccgggcatggtggcacatgcctgtagttccagctactctggaggctgaggcaccagaatcacttgaaccaggaggtggaggttgcagtgagctgagatggtgcccgctgcactccagactgggcagcagagtgaaactgtgtctcaaaaaaaaaaaaaagaaaaaaaaaatatatatatgtatacacacacatatataaaatttttttggaagtaattcttttttaattgatctatttttattgatacataattgtgcatgttttggggtacatgtgatattttggtacatgcatacaatttgtaattatcaaatcagggtgcttaggatatccatcacctcaaacatttatcatttcttatctgagtgttgggaatatttcagattctctctagtagctattttgaaatatacgagaaattattgttaactatagtcaccctactacactatcaaacattacacatattccttctacctaactgtatgtttgtacccatgagccaacctgtcttcatcccctcacccccaacccttcccagtgtctggttgctatcattctgctgtctacctccatccatgagatcaactttaaaaataatatattttaaactatatacttcttcttcttttttttgttttgctttgcatataggtggtcattgggactcccacacttaaacaaagaaaggaaattctgcaagtgattacctcgaagatgcccatctccagtcatgttgatttgggccttcttgcagaaatgacagttggctatgttggtgccgacctgacagcactctgtagggaggctgccatgcatgccctccttcatagtgagaaggtaagaagtgttaatttatgaacatctatgttaatctattattgtaacagattaatttgggggttaaaaaaaagcggtgagtacattttccttagaacatttgatagcttccacagctgttgcttatacattttacatctcaactctatataaatagtatatgattgagggtggggataaagggctgagtcctctgggtctactgagtgaatttgttccctactcttatagtaactccctagtgctgaagcccagagcagccaagaaatagtgtggccccagaagaatcaaagagtttttttaatttgaatttttttattttgaggcaatttcagacttagaagttacaaaaatagtacaaagagtttccatatacccttctcctagattctccaaatgtaacatttgccacatttgctttatcattctctcttcatgtgtatttccttatatatatacatatatataatgaaatatttgagcatatactacatccatgatgcccctttacccgcgaaaacgtaagtgtatatttctgaaaaacaaggaccttaaccacagtatgatgatcaagctgagaaaattaacgcagacataatacttgtacttaacctaaataggccttaatctagaatcatacttcaggctttcttctatgaaaacataactttttaagagtcagttattctgtagaatattcgtcagtttgggtttaactaatgtttcttcatgattcaattcaggttttgcattttgggcaggaatataatagaaatgatcctgtgtctttctcattgcatctgttaggcagcacatgatatgtttctgttctatcactggtgaagttaactttgatttcttggttaaggtggtgtctgtgagatttctccattgtcaagataccgtttttccctttgttattaataagtatctagtgggagaaataagcttttctaacctaggagaagattgggcacttggaattgtatttaaatttgtccttgatctgcaggtctgtaattcatgactatttcctaacaatatttaagatattagattaaatataatacttttcaactttgttggttggaaaatccagtattttgtatataataaatagtcctgaatccttaaacccattcaggaaaaaactgatttcagcaggctaaggattctgaaacagagttttcaatctcatttgtaacatcaaaattgtcttttcatcttaaactgcaaaagaatgatttattatcctaaattttgaaaaacctttttacctaaataatttataccttgcctcacttcctttcctttatttctacagttacaccgaaggtggggaggagttatgtgatcttctagttgatcttttaagtcttcatcttgtaggtttagaccaaaactacttgaagttttaaagttctgtgtgtaaagatgtgagaatagatgtcttttgagggagacaataagtaagcaggagatgggaagggagatttacattcaggatttcctctgctttgaagttccaggtttgaccataagcacctctcacttaggtggaccagtcagctgctgtcgtcccagggtggagcccactgctacttcaggaggggcctgctcaggtgtagttaccacaggtgatggctgagttcagaaacaacccaggggaagtggaaggaagaaaggcaaaaagcatgaagggacagacaactgggaaggtactggctccatcttttattctttcccccaccagctgaggggctgctgctacctctccctgtaccagggcagataagggataccttacactttgttaaactttttgtgaagtattcctattaaaggattagaactgtagtttaacactcagacacacacagaggggaaagaatgtataagcccaaagaatcaagtaaaataatgtgtacacacatgatcttgaactataaatgagattttcaaatattagttcgtgttacctaaagattagttaatatttggacatcagacacctaacatactatcagccagttaaaaaggcttttttttaagtatataatagggttattcatgagaaatgaagatagaaaattataaagaactgcctacctgaaatctcactttccagagatgacaattgttaacacttttgggagaatactttacagaatagctctatacatacagattcacttaacatctgtttacaaataagaaaagacagtttgtttttgaaaacgggaatttgtggacaactagatgtttagaattggatataagagggcaaatactttaataaatacagtacagatatttttaataaaattttcaggactttttaactaacagaaaaaaatgtgtttcactagaatgatcaaggagaatgtaaagagtctccaaaatataacctgagagtgaagacgacttctctaggcataacataaaccttaatagccaaaaaagagattatttgctgagttgaccatttgggggtggcaaaacaatactataaagtagtcagactaggaaaaatacttttagtccaatttccttgatagggaatgaacaaatcttacaaatcagtaagaaaagaccaacagtccaagagaaaatgggtaatggggtatgaacaggtagttgacaataaaaggaatgacaataaacatgaaagatgttcaaccttgatttcttctaaaattattgtctttattttgaaataattaaaacttataggaaagttgcaagatagttacaaagaacttccactaaaccctttatccaaattcaccaatttttaactttttgccaaataagctttatcattctcttttgctctccttgctccctctcctcttctctttctctctctctctgtcatctccatatatatgtatttatatgcacatagtatttatttattttggactatttgagagaatgggttgcatatatcatgacactttatcccttaacattttaatgtctatttcctaagaacagaaatgttcccatatgtcaccacagtatggtgatgtatagtgttgtgtccttagagcctcacatgtagaggcacagagtgtacattggttcctcattggtgatgctaacttttatcaactagttcaggcagtgcgcagtttctccactgtggaactgctatttttccctttgccactaatgagaaatctgtggggagacactttgagatatcctgctcctcatcaaactttcaggctgggcacagtggcttacacctgtagtcccagctgctcaggaggctgagatagaatgatcacttgagcccaggtgttcgaggctcaatgagctgttgcctcaatgccactgcactccagcctgggcagcagagcaagaccctgtctcataaatgaataaacttttactcccctcaacatagcatccaattcttgctcataacagcctttactatcatgattgcaagacgggcgatttttttaattccaatattccctctacctcattttgaattgaagaaatttagttaacacagtaatgaatgagtactggttcttcctgtcatattggcagacatttaagagtttggaaatgggccatgtgcggtggctcacacctataatcccagcactttgggaggctgagatgggtgggtcagttgaggtcaggagttcaagaccagcctggccaacatggggaaaccccgtctctgctaaaaatacaaaaattagtcaggtgtggtggctcatgcctataaatcccagctactcggtaggctgaggcacgagaatcatttgaacccaggaggcggaggctgcagggagccaagatcacagcactgcactccaacctgggtgacagagtgagaccccgccaaaaaaaaaaaaaaaagagtttggtaatgtctgtactggagaggtgtggagagaacacagcttcatattatcggagaagaataaattgttgcagcttccttagaggacaatttggtaatagctgtcaaaattgtatatgtgtgtacttgtaaacccagtaattctactttgaggaaattattacataaaatacttgaacatgagtttgaacatggtggctcatgcctgtaatcccagcactttgggaggctgaggtgggaggatcgctcgagcccatgagttccagaccagcctgggcaacatagggagaccgcatctctacaaaaaaaatatatatatatttttttaattagccaggctggtggcacatacctgtagttctagctactccggagggtgaggtgcaaggattacttgagcctgggagactgcagtgagctatgataacatcactgcattccagcctgggtaacagagtgagaccctgtctcaaaataaacaaatacttgaacatgagcacaaagactttttcagttgcagctttgtttttaatatctaaagactggggatgacctaacgtttgtcagaaaggtgtagttggggtaaattcagtagtgtattatggaattgtcaaaaagaatgacgtagaactgtgttagttgacatgaaaagctctctaagataggtgaaagaagaaaagtacaggctgatatagtatggttccatttgtgtatctgtttaaaaggatatatgtatgcttactagcataacatactggaaaaatacacaaactcttgacatctttcggggaagaattactggcaggaattggcagggagacatttaattctttgtactatgtatataaattgtttttataatgataacaaaataactttacaaatccaaaagaagattttaaaaacaaattgtgctataaaaaaagaccaacctaatttttggtttgattttgcttttttgggtgtatttcttcagaaccaggacaatcctgtgattgatgaaatagacttccttgaagcttttaaaaatattcagccctcatcgtttcgaagcgtcattggattaatggatatcaagcctgttgactgggaggagattggtggccttgaagatgtaaaactgaagttaaaacaggtaagacagataatctacttaatccagtaggatattacagattaacattctgtgcatttatgatgacaacatactgcgctgaaactgctcttgctcctatcactaatgtgatcctaacatctaaatccaatgattgcttttcagtccttatttaattggacttctgtggatgtctaaactggtttttataatttcccacctcgaccctctctttgtttttgctttaaagagtttataacctaaggctgggtgtggtggcttatgtctataatcccagcactttgggaggccaagggaggaggattgcttgagttcaggagttcaaaaccagcctgggcaacatagcaagcccttgtcgctatttaaaaaaaaataagtttataatctaaggctgggcgcagtggctcatacctataatctcagcattttaggaggttgaggtgggtggatcacctgaggtcaggagttcaagaccagcctggccaacatggtgaaaccccgtctctactaaaaatacaaaaattagctgggcatgctggcaggtgcccataatcccagctactcggaaggctgaggcaggagaatcacttgaacccgggaggcagaggttgcagtgagccaagatcccaccactgcacgacagcctgggcaacagagaaaccatgtccggggggaaaaaagtgtataacctatagtcttagcactttagaaggccgagacaggaggatctcttgaggccaagagttcaagaccagactgggcaacaaagtaagactccccatctctatttaaaaaaattattttgacacatgtttgctctgtcacccaggctggagtattgtgtcacaaacacagctcactgcacccttgaactcctgggctcaagcagtccttctgcctcagtgccccaccaagtagctgggactacaggtgcataccaccacgcctggctaatttttaaattttttgtagagatagagtcccactgtgctactcaagctggccttgaactcctgggcttaaacagtcctccaactcggcctcctaaaatggtgggattatagtcatgagccaccatgcctggcctacaaaaaaattttttaaattagccaggtgtggtagcacgtgcttatggtcctagctactcaggaggatcacttgaggcttgaccccaggacacccaggagatcgaggctgcagtgagctatgattgcaccactgcactgcagcttgggcaacagagcaagatcctgtgtctttaaaaaaaaattaaaaaacaattttgactgggcatggtggcttacacctgtaatcccagcactttgggaggccgaggcaggcagatcacctgaggtcaggaattagaaaccaacctggctggcatggagaaaccccatttctactaaaaatgcaaaaaattagccaggcgtggtggcgcatgcctgtaatcccagctactcaggaggctgaggcaggagaatcgcttgaacccgggaggtggaggttgcagtgagccaagaccacgccattgtactccagcttgagcaacaaaagtgaaactccatctcaaaaaaacaaaaacaatttatagggccgggcgtggtggctcacaccagtaatcccagcactttgggaggcgcgaggcaggaggatcacgaggtcaggagttcaagaccagcctggccaacatggtgaaaccctgtctctactaaaaatacaaaaatcagccaggtgtggtggcgcaagcctgtaatcccaactactgngaaggctgaggcaggagaatcgcttcaacctaagaggctgaggttgcagtgagctgaggttgcaccactgcactctagcctgggacagagtgagactccgtctcaaaaaaaaaaaattataatctaaaacgggggtcaacagatttctgtagagagagccacatagtcaatgttttaagctttgtgatccacagtctctgtcataaccactcacctctgccgttgtagcaccaaagcagctgtagaccatatgtaaattagtaattgtattctgataaaagtatagacactgaaattatataattttcacatgtcagaaaatattcttttgattttttttcaagcatttacaaatgtaaaaactattcttagtttgggctgtaccaaataaaggtggaaggccttagtttgcctggatctctgatctaaaagacgttaaatggatgcagtacagggactggtaaaagcacaaaattgaaatgaacaatatggctacctgatagtggatttcacagtggaagctgtgggacgcaactcttcagatcctctcacctgcgttacagtttcagaaattgattttgccaattcgcctacatgtgatcctgccctaatgaactaggtttctctaaccacacacataacagactgatatataagtaataattataatttattcatcttaaccaggagatctatctccagtgaaccctagaatttttgagtccatggataagagcatttataatatgcgccaatattttttatgcattgtctcatttaatgttcacaagatgcatgagagaaattaaccacaccttcctgttggaagcactctgtttccttagctttgagacattaagcttttctgcctttctggccaccctctcccctcccttaaatgttagtgctcaagaggctcccagagtcctcctcttgttggagctgtgggtgattttatgatgatcttgatgtccacagcatccctgaaaactgttgactcagaaatctgtatatctagagtagacatttcttctgatcatcagaactacttcactgcctgcctactggataaccccggggatgtcaaactcagcatgtaaaaagttcagctagtcagctctgcccccacacttggattccctacctcagttaatacagccagccaccccatcccctaagtcagaaatctgtcttctaaaggcatagcatcagaactttgtccctatgtaaagtacaattctgttttatgtttcaaatatccatcccttccacaccatcttcactgcttgtgacactccagccttattatttttgtaggctgaatcattgcaagaaacttgtagctggtctccctgcctctagtttaatttccttccagtccattctccatactgcttcctcagtgcagactaaagctttcaaggcctattgtgatctgactcctacctccacttcaacaccgttgctccttgctggtgctcttgaattacattgtctggggtcagtattggttctgccacctcattagcagtaagacctaggcaaattacttaactttttttaggcccgagtttttttgcatctgtaaaataatgattaaagtggttaaaaaccatttaccttaaaggtaatgaggactcattcattattcggtttactgttactgagtgcctcctttgggtaggtgtcattctagctgctggggattttgaggtgagctttgcttacgttctagcagagcagaatgacaaacccaacgtggaaaaataataatagtgaatacttgctttaaaagtaaaggatgggcagtagcatagagagtgagtaggaggagggggttccgctttaaccaggtagttaggaaagactaactccaaggaattgacacctgcgctgagacctgagtgatgagggatagccacacgaagatcttggggaacgttcaggcagagagaaaagcaaggaaaggctctgagatgggaacaaactaagtgtttaggagacagtcagattatataaggccttgtcagctgtggcgagtaaggagtttggatttggattttattctagttctaatagtaaatcattgaaggattttaaacaggaagtggtatcacctgattcaaatgataagatctctgcagtgtggagaatggactgtttccagctcataataggaggctgagaattgttaaatgaagaaatgaatttactggatgatatgacattttattattatactaaaacaactcttctctttttgtgtactttcagagcattgagtggcctctgaaattcccttgggaatttgttagaatgggcctgacacaaccaaagggagttctcctctatgggccccctggatgtgctaaaaccactctggtgagggccctggccacaagctgtcactgctctttcgtttcagtgagtggagctgatctgttttcaccgtttgttggagattcagaaaaagtgttgtctcaggtttgtttatttccccatatgtttaaatttacttttgaatttttatttcatttcttatggacaaacctttttaaaaatattactagtgttttttccagttaaaaaatttatacgtttattgaaaaatttagaaaatataggaaagtgtaaatatgaaatccttcataatcctcctacctactgttaacattttggtgaatttcctttgtctttttttctgttttaaataaaatcaaaggtaggttttatatatctatagctttatcctgcttttttaaacttaatattactacttttgaaatttatagtattctttgaaaatatggtttttaactcttacataatactccattgtttcttgttttatttactcattccccaattcatagacattcagaatcttttttatatctattttaaaaattataaatagtggccaggcatggtggcttatgcatgtaatcccagcactttgggaggccaaggcgggtgaataactttaggccaggagttcaagaccagcctggccaacgtggcaaaaccccgtctctactaaaaatacaaaaaaattaagtggacgtggtagcgcaccctataatctcagctactcgagagactgaggcacaagaattgcttgagcctgggaggcagaagttgcagtgagctgaaatcgcatcactacactccaaactgagcaacagagcaagactgtctcaaaaaaaaaaaaaaaacaggattataaatagtaatatcacatgactaatgtataacatatagctttttaatatttttttcctaacaaaagatatttcgacaagcaagagcaagcactccagcaattttgtttttggatgaaattgattcaatcttgggagctcgctcagccagcaagacaggatgtgatgttcaagaacgagttctttctgttctcctgaatgaattagatggtgttggacttaagacaatagagagaagaggaagtaaatcaagtcaacagggtaaatacaaggagctgaaaaaatgaagaggtatttattagccagaatgcacctaaaatccaggccaacattaaatataatgcatatatgctatagctttacctatgctgaattcatctcatagaaggatttatataatttcagtttgactttgttaggacttttagagctaataaaaattgtgatttggctaggaaaggtgaggtacattttataataaattatcttaaatataagaatgtgaattttatttttcctaagaatgagaaatataattttacttattgctaatagagaaggcagtttattcttgtttgcatgtcctaaaaaccagtattcatttctttctaaaaatgtttatgtagactgggcacagtggcacacgcctgtaatcccagcactttgggaggccaaggcagaagggttgcttgaggccaggagtttgagactagcctggccaacatagcaaggccccatatctgaatgaatgaatgaatgaatgaaaaataaaggagattattatttccaatagtcttagtaatggaacatttccagttttcttgaggaatgagtttctttggttttaatgaattaaaatggcctttggaagtcccctccctctttctgagtctcttctccagatgagtttggtatccttaaattgtccctgatactttttcttttattcctctctcgttctcattcttttcctattttaaaaattgtcatatggaattgttgcatacactccttaggaatatgtcacactagaattaggaggtatccacgaggttatctaatcaaatcatttcaaaatgcaggaattccttctatagcatctgacaggtattcacccagcatctgctaaaatacttgcaaatatagggaactttgtactttgagggattacgtcactggagagctgcctgattattcaacaaatgattttgaatgcttagtatatgtaaagcctttctctgtctgcttttagacatttctttatccaggatttgcgcacctgcaacttagattgtcatttcaaagaaaaataaaaggtcgagtaaatcttcctctttagggatatgagagtcaagactttctgtagccatatatctccaccggttggtcatatgtatctgtctttttaagtagcctgtttaaggtgtaagccttcattggaggctcaggtgcactcaagtcaccagataagtgttctccgctttgggataaggcttttcataggttctcatatggagaatgtttctcttagctactcccttagccatgcacacaaagtagctctttggttaatgatttgtttctgggatatcttgatatcaagaagctggtctggaaagcggatataagcattctggtcccaagaaaagatatccctatttgaatttaaatagaccttctgatttataatttttagaaaacttattaacaactgattgacattactttgtgtgtgtgtgttgccctcagagtttcaagaagttttttaaccgaagtgtcatgattattgcagccacaaaatagacctgatgtgttagatactgctttgttacgacctggaagattagataagatcatctatatcccacctccagatcacaagg

SEQ ID NO: 1792 - DNA, 505 bp, Homo sapiens
catttactctgtgtgagctcagcagaattgaattccaacttggatataggtgtccatggtgttctacttaccctgggttccaccttcttccttgcctggtggcctttcatgacatcataattttgatcttcctttgttggatactctgatcttgttcacagagaaacataagcctaaatatatggtggttattttttgtgttgtggcagactctaaatactgagtctactcagcgttattttgcaactagagtggaggaatcctaaagtgttaaaagggctttgaagattgagtcagcatccttatcatacagtgcagaaatctgaaattacagagattatgcagtgtatcgtggtcaaccagtaaatttgttgtccgtaaagtacggtgcagaaatctgagattacagagattatgcagtgtatcatggtcaaccagtacattttttgtcgttaacatccagagccactgacagggagggtgaaaggcacagagtgaatttttt

SEQ ID NO: 1793 - DNA, 541 bp, Homo sapiens
catttactctgtgtgagctcagcagaattgaattccaacttggatataggtgtccatggtgttctacttaccctgggttccaccttcttccttgcctggtggcctttcatgacatcataattttgatcttcctttgttggatactctgatcttgttcacagagaaacataagcctaaatatatggtggttattttttgtgttgtggcagactctaaatactgagtctactcagcgttattttgcaactagagtggaggaatcctaaagtgttaaaagggctttgaagattgagtcagcatccttatcatacagtgcagaaatctgaaattacagagattatgcagtgtatcgtggtcaaccagtaaatttgttgtccgtaaagtacggtgcagaaatctgagattacagagattatgcagtgtatcatggtcaaccagtacattttttgtcgttaacatccagagccactgacagggagggtgaaaggcacagagtgaatttttttgttccttgggcttttatcaagttttgaagggatag

SEQ ID NO: 1794 - DNA, 501 bp, Homo sapiens
aatttgaaatactagctatgttaatggaggtcaggattactaaggctggatttacagctacaaaaaagtgacccagatttattttctattactcaaaattagttatgtcgaaggaggagcaaggggcttcttggtctatagactatagctaatgtgtctctggacataaatcttctttggttttcattatctattctggagaaagcaatggtgactctgagtaagtggggcagcaattcaggtctttaccacaccacatgcagcatttgtacaggagtagctttggcctcccagaccttagtgacctgggcaggccacccatctctgccttttcttggagtgatttttacaggcacagagtaaactcctgccctcaaatacctactgccatttgcttcctgatgcttaacattccacatttatagaaaaggcctcaaatataaggaccacaataataacacgtgatttaaattcacatagagatgtattggctcctattga

SEQ ID NO: 1795 - DNA, 502 bp, Homo sapiens
aatttgaaatactagctatgttaatggaggtcagtattactaaggctggatttacagctacaaaaaagtgacccagatttattttctattactcaaaattagttatgtcgaaggaggagcaaggggcttcttggtctatagactattgctaatgtgtctctggacataaatcttctttggttttcattatctattctggagaaagcaatggtgactctgagtaagtggggcagcaattcaggtctttaccacaccacatgcagcatttgtacaggagtagctttggcctcccagaccttagtgacctgggcaggccacccatctctgccttttcttggagtgatttttacaggcacagagtaaactcctgccctcaaatacctactgccatttgcttcctgatgcttaacattccacatttataggataaggcccccaaaataagggcccccaaaattaccccgggatttaaatcccaaaaagaatttctggctccttttga

SEQ ID NO: 1796 - DNA, 501 bp, Homo sapiens
aatttgaaatactagctatgttaatggaggtcaggattactaaggctggatttacagctacaaaaaagtgacccagatttattttctattactcaaaattagttatgtcgaaggaggagcaaggggcttcttggtctatagactattgctaatgtgtctctggacataaatcttctttggttttcattatctattctggagaaagcaatggtgactctgagtaagtggggcagcaattcaggtctttaccacaccacatgcagcatttgtacaggagtagctttggcctcccagaccttagtgacctgggcaggccacccatctctgccttttcttggagtgatttttacaggcacagagtaaactcctgccctcaaatacctactgccatttgcttcctgatgcttaacattccacatttatagaaaaggcctcaaatataaggaccacaataataacacgtgatttaaattcacatagagatgtattggctcctattga

SEQ ID NO: 1797 - DNA, 501 bp, Homo sapiens
aatttgaaatactagctatgttaatggaggtcagtattactaaggctggatttacagctacaaaaaagtgacccagatttattttctattactcaaaattagttatgtcgaaggaggagcaaggggcttcttggtctatagactattgctaatgtgtctctggacataaatcttctttggttttcattatctattctggagaaagcaatggtgactctgagtaagtggggcagcaattcaggtctttaccacaccacatgcagcatttgtacaggagtagctttggcctcccagaccttagtgacctgggcaggccacccatctctgccttttcttggagtgatttttacaggcacagagtaaactcctgccctcaaatacctactgccatttgcttcctgatgcttaacattccacatttatagaaaaggcctcaaatataaggaccacaataataacacgtgatttaaattcacatagagatgtactggctcctattga

SEQ ID NO: 1798 - DNA, 985 bp, Homo sapiens
atcttggccaggctggtcttgaactcctgaccttgtgatccgcctgcctcggcctcccaaagtgctgggattacagacgtgagccaccgcacccagccaggactacccctctctttaaggacccttcccagaagtcacacacgatacttccaggtaaatcttagtcactctgtcacccctagctgctagagtggctggaaaatgtagcccttattttgggtggttatgtgaccagccaaaagtaagggatggtacgactcatgaagaagggaagaagggatattgttcctccttccggaactttgccagtgttctcaccttttcccggaagcctaatcatctctccgtgggcagtgacagactctctactctgtctgttcacagaatacctggggtaggtttttcagtttcaggagccacactacaaaatagatacatgtgaaccagtaaattcaagagtaaattaccagaatggttgtgaggactgggaccctccatctacccccatgatgattacaaaacttgaatggaccatatcatctgaggaacaaatgagggaactggtgatgtttagctgggaatttctgtatgcctttctcagaaaagacatagggaggacatatctgactcagaatgtttgacaagcgattctgtgtgttcctagctggtagaattagaacatgccccaaatcggtgagcctaacttcaggcaacacgtaaaggagcattttctgtttctcacagcagtcctgaggtccaataagctatctctggggaaagcaaactcactgtcatcaaagggattgaagcagtgtctttagggtcaattgatagccttctaacatgtcttcctggctctagtcttaagacctatccagaccattctccatatccccattggtgatctttttaaatgcaaaagagaacatatcacttcccagtttaatccttttcaatggttttccattgtctgccaatctctcag

SEQ ID NO: 1799 - DNA, 985 bp, Homo sapiens
atcttggccaggctggtcttgaactcctgaccttgtgatccgcctgcctcggcctcccaaagtgctgggattacagacgtgagccaccgcacccagccaggactacccctctctttaaggacccttcccagaagtcacacacgatacttccaggtaaatcttagtcactctgtcacccctagctgctagagtggctggaaaatgtagcccttattttgggtggttatgtgaccagccaaaagtaagggatggtacgactcatgaagaagggaagaagggatattgttcctccttccggaactttgccagtgttctcaccttttcccggaagcctaatcatctctccgtgggcagtgacagactctctactctgtctgttcacagaatacctggggtaggtttttcagtttcaggagccacactacaaaatagatacatgtgaaccagtaaattcaagagtaaattaccagaatggttgtgaggactgggaccctccatctacccccatgatgattacaaaacttgaatggaccatatcatctgaggaacaaatgagggaactggtgatgtttagctgggaatttctgtatgcctttctcagaaaagacatagggaggacatatctgactcagaatgtttgacaagcgattctgtgtgttcctagctggtagaattagaacatgccccaaatcagtgagcctaacttcaggcaacacgtaaaggagcattttctgtttctcacagcagtcctgaggtccaataagctatctctggggaaagcaaactcactgtcatcaaagggattgaagcagtgtctttagggtcaattgatagccttctaacatgtcttcctggctctagtcttaagacctatccagaccattctccatatccccattggtgatctttttaaatgcaaaagagaacatatcacttcccagtttaatccttttcaatggttttccattgtctgccaatctctcag

SEQ ID NO: 1800 - DNA, 985 bp, Homo sapiens
atcttggccaggctggtcttgaactcctgaccttgtgatccgcctgcctcggcctcccaaagtgctgggattacagacgtgagccaccgcacccagccaggactacccctctctttaaggacccttcccagaagtcacacacgatacttccaggtaaatcttagtcactctgtcacccctagctgctagagtggctggaaaatgtagcccttattttgggtggttatgtgaccagccaaaagtaagggatggtacgactcatgaagaagggaagaagggatattgttcctccttccggaactttgccagtgttctcacattttcccggaagcctaatcatctctccgtgggcagtgacagactctctactctgtctgttcacacaatacctggggtaggtttttcagtttcaggagccacactacaaaatagatacatgtgaaccagtaaattcaagagtaaattaccagaatggttgtgaggactgggaccctccatctacccccatgatgattacaaaacttgaatggaccatatcatctgaggaacaaatgagggaactggtgatgtttagctgggaatttctgtatgcctttctcagaaaagacatagggaggacatatctgactcagaatgtttgacaagcgattctgtgtgttcctagctggtagaattagaacatgccccaaatcggtgagcctaacttcaggcaacacgtaaaggagcattttctgtttctcacagcagtcctgaggtccaataagctatctctggggaaagcaaactcactgtcatcaaagggattgaagcagtgtctttagggtcaattgatagccttctaacatgtcttcctggctctagtcttaagacctatccagaccattctccatatccccattggtgatctttttaaatgcaaaagagaacatatcacttcccagtttaatccttttcaatggttttccattgtctgccaatctctcag

SEQ ID NO: 1801 - DNA, 3042 bp, Homo sapiens
aagcttatcatcctggttgtttttgttatatagaattgtctttactatttttcccctctcattgtcacctcttggttcatggtatgtgattaagagatggtaccattgccctctgattgccttgcttctggtgctccctctcctgaagtggccctttttagtcagatccttaaagctatttcaacatttctccacccgtatccccccaccaccctccaccaaatacacatgctttgcactattacagatgttaacttgtcaaagtccagaagctcctgagaagtcagcaggaagacatggtggattgaggcatagccatgacctgaaggaaataattaaaatgcaggagggttgctgtgagggacacactaacttagtacatctttctctgatgaaatctgtcaggctcttagtttaccaaatgtgggaacttttgtgcttgttttgctcttaggcacaggataggtcccaggagagattccattcattcctcaaagagaaacagaagaaaaagaatgaagtctcactaatagcttgttagaagaattgtgtttactctgagatctgactcaagaaatggacatggaatctcagcaaatccaagctacagatgatatctgttttgcagctgggccatgcagagctcagccatggcttctcctgaccaagggatgttaaagttatctagaacattaagagtgttaatgagtatatacagagagactaattgtgagcaaaatcattaattagggtcatgtttacatttttattgtggctaatctttcatctgttcggactaaggttcttactgtgttccaaaggtgataataatataactaaattcctctgatactaaagtagtcacacttttatttcttaatttacctgagttgattcctggccaccctccccctccttatcacactagagataattttcagtaatgttttctttatgctgttaagtgattcccttcccagtggagcgagaaggtgaatgtacttaatgaaatgattgatctgcattttggcattcgtccaaattgataaaatatagagggacttttccattcattattttgttcatcatttatagaaaatgcggaaacttttgggtaggtttggctttctgccaattaatgttgtcactgttttcctctgatgcatattcacatgagtcaacagaaaccttttcgactaagcagagttagatttagcgagactgcgtacatcacggtatttattggatgtggaaacctaaaataggaggggcgtggtaaaacctcagacagaagtactgacaaagagtttccccaaacaatagaaccgccatagcccgcacacattcccaggacacattctacagaatggacaaagaaatactcatctgtgtcatcacttgctcaaaaaaaaaaaaaaaattatctgaaacatggaaggtatatcaatcagatttgcatttggctgtgagtgatagaaaatgcaaaataatagtaggttaaaatacataaattttttttctgtctcttgtaaaagaagtcccagagtaggtaaaccaggagggagacacttaacagtatcagggatccacgttccgtctcttctgcggttctgcccaccttatcatggggcttccctgtcacggacaagatggctgctagtggtccagctgggaagaaggagaaaatacctgcagcaacagcaacaaggactacccctctcttttttttttttttttttttttttttgagacggaggcttgctctgttgcccaggctggagtgcagtggcgccattttggcccactgcaaactctgcctcccaagttcaagcaattctccatctcagcctcctaagtagctgggattacaggcgcccgccagcatgcccggctaatttttttgtatttttattagagatggggtttcagcatcttggccaggctggtcttgaactcctgaccttgtgatccgcctgcctcggcctcccaaagtgctgggattacagacgtgagccaccgcacccagccaggactacccctctctttaaggacccttcccagaagtcacacacgatacttccaggtaaatcttagtcactctgtcacccctagctgctagagtggctggaaaatgtagcccttattttgggtggttatgtgaccagccaaaagtaagggatggtacgactcatgaagaagggaagaagggatattgttcctccttccggaactttgccagtgttctcaccttttcccggaagcctaatcatctctccgtgggcagtgacagactctctactctgtctgttcacagaatacctggggtaggtttttcagtttcaggagccacactacaaaatagatacatgtgaaccagtaaattcaagagtaaattaccagaatggttgtgaggactgggaccctccatctacccccatgatgattacaaaacttgaatggaccatatcatctgaggaacaaatgagggaactggtgatgtttagctgggaatttctgtatgcctttctcagaaaagacatagggaggacatatctgactcagaatgtttgacaagcgattctgtgtgttcctagctggtagaattagaacatgccccaaatcagtgagcctaacttcaggcaacacgtaaaggagcattttctgtttctcacagcagtcctgaggtccaataagctatctctggggaaagcaaactcactgtcatcaaagggattgaagcagtgtctttagggtcaattgatagccttctaacatgtcttcctggctctagtcttaagacctatccagaccattctccatatccccattggtgatctttttaaatgcaaaagagaacatatcacttcccagtttaatccttttcaatggttttccattgtctgccaatctctcagttcctcttgacctggtgtttacttactcattgcaagtttctagataaaattttcacttcctcaaatatgtcaaatctctctcctgtccagaactttgattatgttgttccctcttttagaacactct

SEQ ID NO: 1802 - DNA, 409 bp, Homo sapiens
ggcctttttttcctgactctaaattactatgattcgaagtggccatgactacttgactgtttcctgaaaaaaatatgttaaaattttatttcatcttatgaatcctcatagtattggttcatttaccattaattctttttattatgaaattacactatcccagttctctgcttcaaccattagtttgataattagaccttggtgcagttcagttgagctcctgatagagttttatgtaccatgtattttataacatttgcacaattttcttaagaaatgcaaatcaaagttttatagtgccaagcacagttctgaaagttgaggacttttcagagtgagggagtgagcgctctgaagtcagcaaaattagaacccatctaaactaatttttcagtgtgtgaagtctcta

SEQ ID NO: 1803 - DNA, 278 bp, Homo sapiens
ggggcatttcatcactctaagcttcagtttgtccatctggcaaaggagggggttagatttcctagctatgactcttgtactgtgatgtgcttctgtagtgactagataagtagtctctgcaaccatatcatcctaaaatctcaagtggaggaaagcacgcattagggaaaaagcagcatgcttgtgtgaaactgtcagcacctcatgttgcaactgtaaaacgatgctttctagagcctttggatggcagcggttatttattcctggatgaaatatta

SEQ ID NO: 1804 - DNA, 3356 bp, Homo sapiens
gtttccatatggaaccatctgtgtgaattagtcatcagttaggtatagttaacgtaaagagcccctgccattgaaactttgcacaccttctctgctttattgaaggcaagggccagtgggcagtgatagcaggggagggaccctccagaaccacccagccctccaggaggccaataagcatggatatcatgtcaggagctgagctgacatatatttactcagaggacattggggtctgtagctaatcctaaagaatgctccgcaacagaaggaaaccaatgcattgtagaaaacaaagggagatggtgcccgaagtctgcctgtttctcttctcttttctttcccatctcaccaccatgtcctctctaacagaattatatttcatctcatatattatatgttactagaaaagtcatttggttccttggtttctctctttatcagtgggctggaaattcctccaaattaaatataaataccagtagcagctcccctgtgtccagccagtttctcaaatgctgtccacctggtcttactgtccacctaacataacttggaggctttggctggctcaaccacctgttcactttattttgttttcatttccatttgaacttgaagtgaggctatggaaaggtggaaatcatgggcaaggtttggaggctgcaattctagggcatagcttgtcaggagtttatattatctaaaatatatctttctataccccttttcattttaatctgttgccctgattataatttctttatatttgtggttatttttataagaatagagtccatttgctatgtctatttgagtactttttttctattgtccccacatggatgcagtaccaacctgttaatgaaatatctttttattatattattaatatgtaattctactgtagaccaaaaatataaaaacaaatttgttcattttaaagatataaagaactagggagtaaaagattaaaagttgaaggaaaagacagaagagcagtggttaactatgttgagttagaaatctaagagtagccttacctgttttttaaccagtgcttgccaatcataccatagttggaattatgtaatcttggctccttcatacttatgttctataattcttgtttgtctatttgttttctttgatataattgaggttgcacatcatgctattcttggcaatgcctgattctattgtattgtacttttgttagtcatttcctttagaaagatggggggaaacgtttatttcttcttttaatttaaaatttgtttaatgcactggaaataaaattggacatatttcactgtttaaaaaatcagaaacaaaacaaagcaaaaccatgagggaaaaaaacagcaaataagcaacaggggaaaacagctatgaaaaaaatatatttgtactgaatacacatacaaactacatcccacatgaaagattaatatcatcaagtaagaaaaatacatagtttaaactacaatgctgaaaatataaaaggaacctggtagttcaatggggatggagaaaacagagcattcctctgagagcagagatcttgtcattattgcaattaatgcccaaacaggttaaatgtggaagaaagtatggaggaaataaccccagccttcctcataccactggatttccacatcaccttttaacttatgcttgagctcccttttgagaaaaaatatttaaaaacaaattggctatgtaacaaatttgtgtgtgtgtgtgtatatatatatgtatatgcttatatatatatatatatgtatatgcttgagaaagtggtttttcaagatgtatgtgtacagtacacacatggacacgcttcagtcctctgacttcccatgtgctacctcatgtgtttctcttctcatgaggatttgcaatggatagttgtacaacctggggactgtcagtgactcattggtatcagcatatgctaaagaagctcttgaatccaatcttgaaacctgatctcccttcgtcaacattccccaataccaaactggcccgtttacccatacaaatgcacagtaaagggaagaacagcggtatttttcctagccaactgactctatcatttgtttaatgtttgctggtttttttctggttttgttttgttttagagcaggggtgggagtggctgtaacttcacaatcctaatacagtaaatgttttgcatcttccatgttttatgcaaaaacagacatttaaatcaataaataattgtgccctagactgaaggttaatgtttaggagaggaaaaaaattgttggaattttttctacatttttttgtgaagaatcttttttggaaaggaaggatacatatttttgttgtgtaatattttctatttttgaatgcattttattggtacaagactgtttttttggtgaagacattatttaaaaaaaaaaaaagaaaaaaactaatcgaaaagtttgcccttaaggatatgctgcagttttgaggttaaaaaaaaattactgattcaagatgcgtgttaaaagttgggattatattgttgttttttgtaattgttacaagaagaagtttgtacccactgctgtttattttgtttcagatgagtaagtaaagggattgttcttgttttattctttttttagagaaaaaaagctatttatgaaatgtcaaaaacactggactgtgagtttaagtgtggaagcattttaccaccctgtgtcttcaaccaattatgggaaaccccttttctcttccccctaccccctgccttagccttgccaaatgagaaaaatataacagctgtcagattatcaaagccaccgaagccctgctttaatttttatggtttgaaaaagttggaaaaccaaagttaaattgtttctgaaatcctgctgtgcgttgcccttttttgtatgacacagccgggctctgcctctctatctcaaatcattgccttcttagggactgggggccaacctgatgcaaagagaggcataaaggtggtgagcctgagagttgaggtctcacgaagtaaaatgtgagtgggacttcaccctctcagtgggcaaccacactttcccatcctgagatgaggctgccaagagagcacactgctaacactgcctgaggagagcacgcctcctgtctccttcaccctctgcttctgagaccctcctgttactgttatcatcgttccctagcctggctctgcctttctcagcagcccacattccatggatgggagcaggggggcagggacccaaaggagggaaatggctgtgggtggtgtgaaggccccccagccctcaggaaggtggggcaagagaccactgagcacaagggatcttgcccac

SEQ ID NO: 1805 - DNA, 3357 bp, Homo sapiens
gtttccatatggaaccatctgtgtgaattagtcatcagttaggtatagttaacgtaaagagcccctgccattgaaactttgcacaccttctctgctttattgaaggcaagggccagtgggcagtgatagcaggggagggaccctccagaaccacccagccctccaggaggccaataagcatggatatcatgtcaggagctgagctgacatatatttactcagaggacattggggtctgtagctaatcctaaagaatgctccgcaacagaaggaaaccaatgcattgtagaaaacaaagggagatggtgcccgaagtctgcctgtttctcttctcttttctttcccatctcaccaccatgtcctctctaacagaattatatttcatctcatatattatatgttactagaaaagtcatttggttccttggtttctctctttatcagtgggctggaaattcctccaaattaaatataaataccagtagcagctcccctgtgtccagccagtttctcaaatgctgtccacctggtcttactgtccacctaacataacttggaggctttggctggctcaaccacctgttcactttattttgttttcatttccatttgaacttgaagtgaggctatggaaaggtggaaatcatgggcaaggtttggaggctgcaattctagggcatagcttgtcaggagtttatattatctaaaatatatctttctataccccttttcattttaatctgttgccctgattataatttctttatatttgtggttatttttataagaatagagtccatttgctatgtctatttgagtactttttttctattgtccccacatggatgcagtaccaacctgttaatgaaatatctttttattatattattaatatgtaattctactgtagaccaaaaatataaaaacaaatttgttcattttaaagatataaagaactagggagtaaaagattaaaagttgaaggaaaagacagaagagcagtggttaactatgttgagttagaaatctaagagtagccttacctgttttttaaccagtgcttgccaatcataccatagttggaattatgtaatcttggctccttcatacttatgttctataattcttgtttgtctatttgttttctttgatataattgaggttgcacatcatgctattcttggcaatgcctgattctattgtattgtacttttgttagtcatttcctttagaaagatggggggaaacgtttatttcttcttttaatttaaaatttgtttaatgcactggaaataaaattggacatatttcactgtttaaaaaatcagaaacaaaacaaagcaaaaccatgagggaaaaaaacagcaaataagcaacaggggaaaacagctatgaaaaaaatatatttgtactgaatacacatacaaactacatcccacatgaaagattaatatcatcaagtaagaaaaatacatagtttaaactacaatgctgaaaatataaaaggaacctggtagttcaatggggatggagaaaacagagcattcctctgagagcagagatcttgtcattattgcaattaatgcccaaacaggttaaatgtggaagaaagtatggaggaaataaccccagccttcctcataccactggatttccacatcaccttttaacttatgcttgagctcccttttgagaaaaaatatttaaaaacaaattggctatgtaacaaatttgtgtgtgtgtgtgtatatatatatgtatatgcttatatatatatatatatgtatatgcttgagaaagtggtttttcaagatgtatgtgtacagtacacacatggacacgcttcagtcctctgacttcccatgtgctacctcatgtgtttctcttctcatgaggatttgcaatggatagttgtacaacctggggactgtcagtgactcattggtatcagcatatgctaaagaagctcttgaatccaatcttgaaacctgatctcccttcgtcaacattccccaataccaaactggcccgtttacccatacaaatgcacagtaaagggaagaacagcggtatttttcctagccaactgactctatcatttgtttaatgtttgctggtttttttctggttttgttttgttttagagcaggggtgggagtggctgtaacttcacaatcctaatacagtaaatgttttgcatcttccatgttttatgcaaaaacagacatttaaatcaataaataattgtgccctagactgaaggttaatgtttaggagaggaaaaaaattgttggaattttttctacatttttttgtgaagaatcttttttggaaaggaaggatacatatttttgttgtgtaatattttctatttttgaatgcattttattggtacaagactgtttttttggtgaagacattatttaaaaaaaaaaaaagaaaaaaactaatcgaaaagtttgcccttaaggatatgctgcagttttgaggttaaaaaaaaattactgattcaagatgcgtgttaaaagttgggattatattgttgttttttgtaattgttacaagaagaagtttgtacccactgctgtttattttgtttcagatgagtaagtaaagggattgttcttgttttattctttttttagagaaaaaaagctatttatgaaatgtcaaaaacactggactgtgagtttaagtgtggaagcattttaccaccctgtgtcttcaaccaattatgggaaaccccttttctcttccccctaccccctgccttagccttgccaaatgagaaaaatataacagctgtcagattatcaaagccaccgaagccctgctttaatttttatggtttgaaaaagttggaaaaccaaagttaaatttgtttctgaaatcctgctgtgcgttgcccttttttgtatgacacagccgggctctgcctctctatctcaaatcattgccttcttagggactgggggccaacctgatgcaaagagaggcataaaggtggtgagcctgagagttgaggtctcacgaagtaaaatgtgagtgggacttcaccctctcagtgggcaaccacactttcccatcctgagatgaggctgccaagagagcacactgctaacactgcctgaggagagcacgcctcctgtctccttcaccctctgcttctgagaccctcctgttactgttatcatcgttccctagcctggctctgcctttctcagcagcccacattccatggatgggagcaggggggcagggacccaaaggagggaaatggctgtgggtggtgtgaaggccccccagccctcaggaaggtggggcaagagaccactgagcacaagggatcttgcccac

SEQ ID NO: 1806 - DNA, 3223 bp, Homo sapiens
gagggaccctccagaaccacccagccctccaggaggccaataagcatggatatcatgtcaggagctgagctgacatatatttactcagaggacattggggtctgtagctaatcctaaagaatgctccgcaacagaaggaaaccaatgcattgtagaaaacaaagggagatggtgcccgaagtctgcctgtttctcttctcttttctttcccatctcaccaccatgtcctctctaacagaattatatttcatctcatatattatatgttactagaaaagtcatttggttccttggtttctctctttatcagtgggctggaaattcctccaaattaaatataaataccagtagcagctcccctgtgtccagccagtttctcaaatgctgtccacctggtcttactgtccacctaacataacttggaggctttggctggctcaaccacctgttcactttattttgttttcatttccatttgaacttgaagtgaggctatggaaaggtggaaatcatgggcaaggtttggaggctgcaattctagggcatagcttgtcaggagtttatattatctaaaatatatctttctataccccttttcattttaatctgttgccctgattataatttctttatatttgtggttatttttataagaatagagtccatttgctatgtctatttgagtactttttttctattgtccccacatggatgcagtaccaacctgttaatgaaatatctttttattatattattaatatgtaattctactgtagaccaaaaatataaaaacaaatttgttcattttaaagatataaagaactagggagtaaaagattaaaagttgaaggaaaagacagaagagcagtggttaactatgttgagttagaaatctaagagtagccttacctgttttttaaccagtgcttgccaatcataccatagttggaattatgtaatcttggctccttcatacttatgttctataattcttgtttgtctatttgttttctttgatataattgaggttgcacatcatgctattcttggcaatgcctgattctattgtattgtacttttgttagtcatttcctttagaaagatggggggaaacgtttatttcttcttttaatttaaaatttgtttaatgcactggaaataaaattggacatatttcactgtttaaaaaatcagaaacaaaacaaagcaaaaccatgagggaaaaaaacagcaaataagcaacaggggaaaacagctatgaaaaaaatatatttgtactgaatacacatacaaactacatcccacatgaaagattaatatcatcaagtaagaaaaatacatagtttaaactacaatgctgaaaatataaaaggaacctggtagttcaatggggatggagaaaacagagcattcctctgagagcagagatcttgtcattattgcaattaatgcccaaacaggttaaatgtggaagaaagtatggaggaaataaccccagccttcctcataccactggatttccacatcaccttttaacttatgcttgagctcccttttgagaaaaaatatttaaaaacaaattggctatgtaacaaatttgtgtgtgtgtgtgtatatatatatgtatatgcttatatatatatatatatgtatatgcttgagaaagtggtttttcaagatgtatgtgtacagtacacacatggacacgcttcagtcctctgacttcccatgtgctacctcatgtgtttctcttctcatgaggatttgcaatggatagttgtacaacctggggactgtcagtgactcattggtatcagcatatgctaaagaagctcttgaatccaatcttgaaacctgatctcccttcgtcaacattccccaataccaaactggcccgtttacccatacaaatgcacagtaaagggaagaacagcggtatttttcctagccaactgactctatcatttgtttaatgtttgctggtttttttctggttttgttttgttttagagcaggggtgggagtggctgtaacttcacaatcctaatacagtaaatgttttgcatcttccatgttttatgcaaaaacagacatttaaatcaataaataattgtgccctagactgaaggttaatgtttaggagaggaaaaaaattgttggaattttttctacatttttttgtgaagaatcttttttggaaaggaaggatacatatttttgttgtgtaatattttctatttttgaatgcattttattggtacaagactgtttttttggtgaagacattatttaaaaaaaaaaaaagaaaaaaactaatcgaaaagtttgcccttaaggatatgctgcagttttgaggttaaaaaaaaattactgattcaagatgcgtgttaaaagttgggattatattgttgttttttgtaattgttacaagaagaagtttgtacccactgctgtttattttgtttcagatgagtaagtaaagggattgttcttgttttattctttttttagagaaaaaaagctatttatgaaatgtcaaaaacactggactgtgagtttaagtgtggaagcattttaccaccctgtgtcttcaaccaattatgggaaaccccttttctcttccccctaccccctgccttagccttgccaaatgagaaaaatataacagctgtcagattatcaaagccaccgaagccctgctttaatttttatggtttgaaaaagttggaaaaccaaagttaaatttgtttctgaaatcctgctgtgcgttgcccttttttgtatgacacagccgggctctgcctctctatctcaaatcattgccttcttagggactgggggccaacctgatgcaaagagaggcataaaggtggtgagcctgagagttgaggtctcacgaagtaaaatgtgagtgggacttcaccctctcagtgggcaaccacactttcccatcctgagatgaggctgccaagagagcacactgctaacactgcctgaggagagcacgcctcctgtctccttcaccctctgcttctgagaccctcctgttactgttatcatcgttccctagcctggctctgcctttctcagcagcccacattccatggatgggagcaggggggcagggacccaaaggagggaaatggctgtgggtggtgtgaaggccccccagccctcaggaaggtggggcaagagaccactgagcacaagggatcttgcccac

SEQ ID NO: 1807 - DNA, 3487 bp, Homo sapiens
ggactctaaagcagccgaatcttgagactgtcaatgacagaaagctgaagagaggcctctatttcttcctttttcctttcttctgtctaaaaactctctcttgttccccttttccagcttcccttggactactgccccaatggccccttggactcgcgtttcatgtatgcgagcacacacacacacaaacttgcaaaataccgtttttcttaaggattgtgggaccgaataatatcacgtgccttcatcttttccttttatagttagatgaacctcttcctctttacaatttttttaaaaagtgataggggaggttgatgtgttagtggaagatttgggcatcgtttgagaagtaacttttgtttaacacattccccctaaacattgaacacaaacatttcaaccccttcatgacactctttggacatttaaagcattgagtaaccatgtacatgacagcctaaatccgtttgatttcagagcatttcctgaacattgtatttcatagacttctctgattttttcaaaaatgaggtgagcaatggcaagcagccttgttctcccaatttggtgcttttgcttttggtgtggggtgggcatggggggttgggggtggtgtgggtgtgtttagaaaaaagatgcattcctgaagatctctggtgctgaagggcctcgagttcctttcagagactgtatttgacacactttaggtacacacaaacgaatggtatcacatgcaatattttaatggagcaatgggagaggctctttgaaatggggtttgcatctttttgtaacattttgatttctctggtgccttattcctacttgatgctggcactcacatacccacaagaagctgacacagaagtcagccttaggcgtggggacatatgggtgatgtttgagcatgcaggggccatggggagtttggtgtcagttggtggagaagggactagatggcatctcttagccgaggccaacaggaactgcacaagtccattatagtcaaagttagcaattttgatacgtaaacacaatacttcattcttcctcatctgagctttccttccttcttccttttctatctctaccttctcataaaggtgctgctgctgctgctaaggtgcccggagtccagaatgtccattaatcactcaggcacgagcctggcactgccacgtcagcccccagcatgaccaaacccaggtttctcttgcttggggctgagaactgtcagatttttctcatcaaaaatgttttccaaggaatcagtggattacagtttttctgcattgaaaatgcactttaaaaaataaattaaagctccagactgtttaaaatatacagagggagcaggggaaagttaagcatgtgctagtgtctgaacccagttcagtttatctccagttgaaacgatatacactatattatgtataaatgtatacacacttcctatatgtatccacatatatatagtgtatatattatacatgtataggtgtgtatatgtgcatatatacacacatgcacataacaaaatcagatgctcattacaaatccagatgctcattacaaaaccagatgctacacaaacagcagcagaggaaacaaggttggactcttgcaacagatcacaaaaaataaaaacagctacttgcagtgactttggtcatttctgtatgttcataaagaatggattgtaacaaggaaaaaaaggaacagtgttagtgaaaaaggaaaaatgggcgaaaccatcttgatccgatgcgaatgcagtaatgttctatataccatttcatcagttatttcttttagtcatgttgatttgatttcagtttctggctatgaaaaacatttttaaactcgtcacccacaacaaactgaacaaaactactacagtgaaagcccttttcagtgaaagatgtcagaaacctcaaaacctttggcctgactcagaactaccatgtgaaaatcagtactctcttaatgtttgaaataaaaactgaaaaaaaaaacaaaaaaacaaaaaaccttttttgaagcaccttaacgtggccatccatttgagaagtgggtgccacttttttctttgagcaccttattgatgtgtttgctatctgctgtctttctgttacctgttggctgaatggctagctgttaacatatacatgtgcacagaagagatatctgggcatgtatgttctcaatgaagtttactgtggtgactgctgaaaggtgaacccatttcctgattttcccgccgcagtgttgtgataagattcgaagaaacctttttccctgcacagaaatgtttcttatcacattgtatcttagtatggaaaggaatatggtcccttttttgcaattgctactgtgtacacacacacacacacacacacacacacacacacacactgtatgtttagacctaaaatacacacacccacgcacacactgtatgtttatgtgacctaaaacatacacacatgcacacacacatacatatccattcattcattcattcaagtggtgtttccagtgtctgtgtgtcactgtttatgcagtttccatttcccagtgaattatgagtggagggcaacttttctaaccagattgtcttttcagaacaaagacctgggaattgaggaagagtttggaaagagggagaggcaaggaaagagagctttaaattgaaaggttaatttcctaagaggaacctgggctgaatgactgcagtgttataccctccaatctttgcaggtgggcatggaacactgcttgtatcactctgtgcacggtataaatccatatatccacaaaaacacacatccatccatcaacatatacatggtttgggatgagcaggtcaatagttttgagagggagtttgttcctttttttttctcattatactcttaaattgttgtcagttatcaaacaaacaaacagaaaaattgtttggaaaaaccttgcatacgccttttctatcaagtgctttaaaatatagactaaatacacacatcctgccagttttttcttacagtgacagtatccttacctgccatttaatattagcctcgtatttttctcacgtatatttacctgtgacttgtatttgttatttaaacaggaaaaaaaacattcaaaaaaagaaaaattaactgtagcgcttcattatactattatattattattattattgtgacattttggaatactgtgaagttttatctcttgcatatactttatacggaagtattacgccttaaaaatacgaaaataaattttacaaggtttctgttttgtgtggaagagtaattgatgttgctaagaatgatgtttgtttttttggggtttttgttgttttttttttaaatgttaccagcactttttttgtaagtttcactttccgaggtattgtacaagttcacactgtttgtgaagtttgaatatgaaggaataattaaaaaaaaaaaaactcttc

SEQ ID NO: 1808 - DNA, 3487 bp, Homo sapiens; identical to SEQ ID NO: 1807

SEQ ID NO: 1809 - DNA, 3487 bp, Homo sapiens; identical to SEQ ID NO: 1807

SEQ ID NO: 1810 - DNA, 323 bp, Homo sapiens
gtgatagtgcctttcttgtcgtagtgagtactagattaataatttattcagttacgcttttctgtaccattgcctccagtcttctgaggaggtttgaagggacagtatccacttaggatgaagggacaggatattgctctggaatgctgtgatttgatgatatttgcactagattctaaactctcctttaaactggagcaactgactgagagaaaaaccaaggacagctcaaagttaaaagaaaccaaaagcagtattttctgacagataccatttctttttctccttctttttttcctggaagaaaacttcacactagttgg

SEQ ID NO: 1811 - DNA, 9513 bp, Homo sapiens
aagatgtagaagtatcagaagaaacagtagaaccaagtgatgaattgatagaatatgattcgccagaacagttgaatgagcaatgggtgactctttcacttcttcctgaatcacgatggaaaaaccttcttaaccttgatgttattaaggtaataattaacattctttatagaccctaagcatgcatccagaagcatttttatttttttaagcagagagaacttctcctacattgagggcattagaagagcaattaatatgtaagacagcactgacaatgctatttaatcaaatattgtttaatatggtatgattatcacaagatattcatatatatatcaactttgagaacactcagcagacatttggatgtggcaaaagttgagcctgtaactacagagctactggaaactgatcttttaaaatccagcctaagaaatcacttttatataagtttctaaaacgagcgggaacacatatggctattataacatatttctactgctagtcatttgagaaccagagaaattccactagactttcattttattaagttaaccctttatctcacaccacaccctgtcaactactgaaagatttttagaacttgctgtgtcagggctaggtacataagttaacatgagctaggtactaaataatgtacctggagagtatggtggtgaagaaaaaacagcccctttgtccttgaggaatttatgattctgcatgaaaaatggacaactatggtatagattagtattttttagagtatgttttatgatcccccactagtgagtagcaaaaactactgaaaggaatacaatacagtgaaaaatttcaggttaccttttgatcatgaatgcaagtattgtttggtgaaacttgagttggttagacatacacatacactagatctgctggatgtacttaagtcacagtatgggctgtggtaaaaagtttaagaaacactgactaagtaactaataattatccttgtaactaataacacaagaaaagaagtgtgtgtcttgggtaaggaaagagaagttttcacattacatttcctcacagaagttaaaattgcttctttttacttgctaactttttgagagattagtcatcagcataaaggtgtgctgtctaggagcatggtgtggaatctcttcatcatgctgtccacacatcagctttaaagggagtactttatgaaatagttcaaatgcaaggcattaataagtacaaatagattagtgtgaggggagcaatcagaataatgcttaactaattgagcaaagttttggggctactgtggtcctcactaagatatagtttatactgcataaaatcttatatcaaaacataagtggattatctttatgataggaatatgctaaaacctctaatatttttattttctgctgaataaaagagaatgtaccaagactatagtttacatttgtcctgtggataacttctatttttgcttttctttataagactagataatttccagggcactgtggagttcctccaaagccttatggttttaacaaatcagtgaccatcccctttctaactcaagaatggtgagttagaatggtaactgtgactcataacagtctccaccatcctaaagggctctgcttacactacagtttgcggtgctttgtcctgtgttcatgtgatcattttattttataccatggcttccctttggaatagaatgtctccctagggcggcatagctcctaaagaatggaagaataatgtgaggtgaaattgtgagacttctttattaggcactttaccatagaaacgctcttccatcaaatgttcctgagaggtggggcacggtggcgcacgcctgtcccactttgggaggctgaaatggttgatcatttgaggtcaggagttcgagaccagcctggtcaacatggtgaaaccccatctctactataaatacaaaaatgagccaggcatgttgtacgtgcctgtaatcccggctgctcaggaggctgaggcaggagaattgcttgaacccgggaggcggaggttgcagtgagctgagatcgcaccacttcactccagcctaggcaatggagtgaaattccatctcaaaaaaaaaaatgttcctgagatactgatatgtagcagtgtacttaccaaaacaaaattctttcaatggaaatttcagtagagtttttgctaatataattttactagcatttgaaatacttataaaccagcaatcatgttttcttgaattttaaaagcacaaggtactaaagaaaaaattccagcaaaatagaaaaattagagctgtactttgaaaggaaattatcaaattacttataatgtcagtctgcttctggctccaaagttcctttggagaaaagtaatttaagaaactcttttgtattaagcatttatgtaaattttgctttccatcctgttttgtgaaagagtttgtactcaatacaaaaggaagtttaaaattacttaattgttatatcttcatgtaaatatattcatatttcaggaaaatgagctgtgtttgtcttagaacttcccctgtgccctgtcactttttttctgccttatcggcaagggtgctagagatctgcattgggaagcccaagttaaggatagctgtggtattggtcagaagagatcatattttaacattcttatgtgaaagagtttcattcctcttttactttttggtatttgttttaaaattgatttgaaattaaatatgagaaactgttggcaagataattcctatttttctttctcattttctcttaatcagaaaaagaataaaccaaaggaaccacccaaagtacccaaatcagcaccatttttcattccaacaattcctggccttgtacccagatatgctgcacctgaacaaaataatgatccccagcaggtaaaaaacaaattagaagattctaagtatatcggtgtatgtttgtatgtgttttctgcacttctttaccaagacctagttttacagatatagggtaaattaatgatagcttttaattacaaactatacatttttgggtgatacttgaattatttgaataatgtgtatttgtttttgtttaagtctaaagtggtaaatcttggagtttggctcaaaaatcagatttctgcttgaaacttgaagaaggactggtaaataataagtgtaagttgaattataagatattttaactaatatatttagcttattttactgtatatgaggagaaattgaaggaaatatcagcgttctcagtagttaagatagtaaaaatcaaaaagattgaaattttggttttaatttgacgtaattttagcatttatattaaataagcccactaaactcaaatggtattgatattataaaaatctgttgaagatttttcatatatctaacttactttttgctattggagatggacacagttattgactatatttataataaggagatccttcttgttgtgaattaaatgtaaaagttttgtttgtcgtttttgtagcaagtaatttgcaagtcttttgtttttatttataatttgtaattcagcggactgcttaggtgatttcatatattcctaaattattttattaaaaaggaaatgttttaatctgtctgttgtgttcatatatttaaatttcgaaggctacagtctgtagctaatagtgattagccataagaactgtaatcatttaaaaaactgtagtcactctcctaataattttaacttgtcctcttgttttgattcaaatgcttttgttttcataccgagattacttgagtccacattagcaaaagtcagagaatgatactgatgagcccttgtaaatgacttgttatgtttatggggagacaaagaaataaaaacactattgtttactatatactgaaggatctaaaagtgattagacttttgtcattggtgatactctttttcagaaagctaaagcatagtcattgcagttctcaaatgactcataaaaatagctgtaagtgtactgagtgtgttttcctagggtgcatatgaaacaattcttctagggaaaagaagtaggtttgggctgggtaagaataagggatggggtcttccccctctgattttatatattctgtactgttagtaatatagttcctaatgattatgtacttttataactttataacaatagaaaagaaaaattattttacctcatcagattcccaatgctaaccactattaatacttttgtatgtatcgttataggcttcttaattaggatttactctgagagaagatatatgagcattttaaaattctaacgtgcctgttgcaaggcattagattttctttattaacaggaaaaaggtttaaattacagaaaaaaaatgtgttatgagtactttctatatattggtgtcatcgtttgtactgattttcaattattttgggtttcattctactacataatatgaaaaaattaacccacaggaagaatttcctgtaccatttaaatatatcctatttggggtataaaaggaaaactgtaattttctaagttaaatgattataatcaagtcataactggattaaaatttaatgcagatgacactgctctcaaccttctgaaagaatcaggcccatcaggaattgaaacagagctgcgaagcttgtctcctgattgtggtgggtccatagaagttatgcagagcttcttgaaaatgattgggatgatgctggacagaaagcgtgattttgagttagcccaggcataccttgcattgtttctaaaggtaagtctaatgtaagacagtactgcccagcttgtcttcttctggggcagtgctatctaacagaactttctgcaaagatgggtatgctgtatatccatcctttccagtatcatagccacttgccacatgtagctattgagttcttgaaatgtaaatagtgtgatcaagaaactggatttttaattttatagaattttaattaatttaaatttaaataaccgcatgtggctagtgactaccacattggacagctagacagtgcagcttgggagtcttgttttgtttttttactcaactgcacaataattttgactttaccccctgacatttttatgctatctgcttgatccaatgtgctgaaccattaacttttctttttttagtggttagttacattttggaagttttttgtgattatgaatagaaagttgggtttgtttgtttttttttctactactgaaatcaaaatgttcacttctatcattattaaaggagttttgatcatttgacaataagactgttacttttatgattaatatagtggtgaactcatgttttgagggtctactttagtggtataatgtgttgaaggaggtagatgatgccgatttttggtgataatagatttgattctttatcccatttatacctaaaatgagttcacttgatctgattatttaaaagtatcaggactgtccttaggtggagaggagtgatgaccactttaattctaccaaggaagtcacagtatcataaaggaccttataataaaaaaagtttgatagaggaggggaaaatgggagatagtaataaaccagcgcttaagaaaacaaatattcacctagtgtcttttgtggttccttggtagaaaaattgaatccagattaggtaaaattttaattttcttaaatgttcaatcatcatatttttctttgcagttacaccttaaaatgcttccttcagagccagtactcctagaagaaataacaaatttgtcatcccaggtggaagaaaactggacccatttgcaatcactcttcaatcaaagcatgtgtattttaaattatctcaaaagtgctttgttgtaaaaataaatttgtgactaaacaaagactttcatattaaatgggttcaattgaactcatttcttattttccaagtgtcaatgtgaaaagaaaataaatgctagcactactgactagtcagtatatctccactttaaatgctaaatactttcttgaaataaaatcgcacctcccggccaggcatgatggataatgcctgtaattccagcactttcagaggccaaagcgggaggattgcttgaagccaggaatttgagcccagcctgggcaacatagcaagcaagatcccatctctacaaaaagttaaaaaaataaattacacctgccttttgttttgaagacttaaagaatctgctcaaatgatttattttctgagtctcttcacattaacttttatatgatttttaaaaaattattacctgcttatattttttgagtatctgtttcatataaagagatgctgcatgttcactgtgaagtattgctgaattaaattgaaaatgtcagataaaactgatacatgatgtagttataaaaatgctgttatgaagaaaaaaggaatgcttttttcctcggtggcctttgataaaaatatgaatgattgactctcagagttggaggataaactaatcatcttctagcacagccctgttgtgttgcaggagaggaatcaggctaaagtctgctggtatttcagtgacagattaaaactttctaacagtggcctagtgctttctccattgtaatgtactgaaaggaagttgttcatggatcagaaatgtgggaggcccttccttgcccaaggcaagtcgctgtagatggttaaactgataccaaggataggtaagggaaattccaaattccattggaagatggccttttactgacactgcagacatgtagataacaatagtttaatgtcctctgaaaaggtaaaaattccataaatccttgcaaacaatttttagcaatattgtttattgctaccacagccaagaatgggtatttcaaagccagggttttttttattttgttttgttttgtttttttttttttttttttggctacacttttttgggggggaccttttaatttgggaagaaaatgctgagtatacttttctttcacaaccattgcaaacccaggtagccctggagttttctttttttctcatcatcattgttttgttttttttatggttcaagacttttgcaatacatgaattaaaaataagcagttctttaaagcatagcgctctaaaaactattcttagtttataccctcaaaagttgggtctttcatgaaacacagtggtttgaatatgaacaccagtagcattctcgttcgttgttagggtaagagagttttgtagaatgatctccaaaagaagcagtcctcaaaaggcatttaccagtgatatcttttaatattcatgtttttatttaatgatgtaagatagaattaataaactactaaggaaataagccaatgtggttattgtactcaatttcgtttttcttttagaaatgtgtattgacttattaaagccactgacagaaatgttaatcatgacttaagttctaatttaaaaaactattttcctctttcctaaatactatattctaaattggaatatggcaaaatcccaatatataattctatacctagtaaagattgtaaataactaaaacaaaatgataagagctgtgaactgaaattgtattgcttacagaaatcatgaaccgaattttcttctctttttaaagtgagcataaagacttaagtgtattgttaccagagatatatttagatagaatacatcattttggcaggtaatcttctagaacctttcatgtactgtttccatcaagggagggaaagaaatagaaaatataattttatctatattttccttaaaatatatcaatctgtgcacactctttcagttttttaattactcatgtaatatatgactacattttgcttgtgtgctttttgaaaaccatcttcagtcccaatatcctctgtagaagtaatagttttaactctcctagatcttcttttagagtgtttttatgagtgtttaatgtaggaatgtgtatatattatctacagccacaggaaatgtatagttacgatttttacatacgtgtatgtatattattgtacaacttgctatttctacttgggagttttttattttggtacattcacatttacctaatctcttgtgcactgtccaacagtactttgcctataatagacacttaaggaagttttccttctttttattcctttataattacaaacaatgctgaaaggaacatcatcctacatgagccctttttgtacatataaggctctctctgtggtatatgcttaggatttgaatttcaggccagagtataaccatttttaatttgaagagatacttccatttgggttccagaatggctgtatcaagttacagttcccctgagcaagatatgagcatctgcttccccatgtaattaatgacacttgctattggatttttgtaatttaattactctgaaaaaattattttggttttaaatcagaaatttctcactagtgaagatggacatatttttgtatgtttattttagaacatataaacatttgttaattttctttttcctctcatttttctattgaatgatttgtccttttatctcatggatttgttaggagttctcttgtattttctgtattttatgtctgttgccaatgttttctcctacttagccatttggctttaattttacatggtgtctgtttaaataaatgttttatatttgtatacaatcaaattgattaattttcatgacttatttcaggatataaagcaaattattttctaagacatttacagtgtatgttttcctatgtttacatgtgctcatttcacgtcatgtattttcctctacgacatgtttctgtgtgagtagttaacatgtagatctttagaattgatttttctgaagagtgaaacagcgctgcttccaatatctgttcaaaattcatttattgaaaagtccactcatatgtctgatttgaaatgctgtttcattatgtgttaaattctttcactgagctcttccatattcctagtaaatgatgcattactttggtatgttctcagatttgggtaaagccttcctcatgttctataaaaattggttaactgctggtgagcacatctcttgaagttttgatatgggttgcacaacatttataggactgatttggagagaccgacaataccgagtgcagtcctcccttggtatctagttccaggacccctgtggataccaaaatccaagcaatgccctgcagatcatgggacctatgcatatgaaaagtcggtccttgtatttgagggttttgcatccctcaaataccatatgttttatttgtgtttggttgaaaaaagtttgcatataagtgaaacttagcatttcaaacctgtgttgttcaaagatcatttgtatttctcttcaagaacaatgaatgtcttcattaaatcatcttttgtgggagagcttttggtttcatagattttcatatatatatatgatataataaacactttttgacattctggga

SEQ ID NO: 1812 - DNA, 11427 bp, Homo sapiens
tggcaacttcccatgtggaccaccttggaatttatctatggtaagttctttcatacagttctgttttgggatgaagaagattgtattgtcagagagttagagttgctaaaattgtcatttaggctgtttttaagtgtattaaatggaaatgtcacaagttaacacagatacttaattcactgtaagtctgagtgattcaacatctgcttgataatgtagacagctttgctgaagtatattctaaaccacatgattgatttttgtctgttacatttggcttttatttgcagaaagaatgagtgatttttaaaagtttaggaaaagggagtccccagccaggccatggttttcctgccagtatcccacaactactttacgaccttggccaatcccttctgaacttcagcctagtttgtatataaaataaggcacaagtataagcagaatactttctgagatttattctagttgcatgacttttataaccgtgtaaagatacttcaaattctcttttgatgaacctgtaagggactgtcattgctcataataaatagaacatcacctgggtttagaaaaaattttgtttctttcctaactttatatctgtattgggtaaaagaaaaaattgattttttataaaagaattaattataaaatgttataattacatttgaagatacaaagggaattttaatatataatagaaacagaccctgttcaccttaatttgtaaaacagagtatgttttagaatccatgaggcttcaacagtttagaaaagaatagctatgagcactcacagcaggagtatggcccttctcaatgaagtactgctattaataacttgaaacctgagattctcaatttttattttctattccagattcataaggtgtgggaaaaagaacctgtcccctaaaagaccggtatctacatcttgattagtcatccatggctagggtgcaggctgagtagcagaaatatggctacttagagggccattctagagaaggggaatctatgacctttcagcagccacaagaatatgctcagcatattcgcactctgacttactctctgagttcatctttccttttaatttccttaaataaaggttgatatatgtcaaaacaatatatgaaatttactttaccttataaaattattatctactactggtctgtctttaatatgtttttgtactacatcaggaaagagactcaataatgtatttacacagctttgttatgatggcatctatgacataagtcaaggcgtttttaaattgataacaatctatctttgaggtattttttaactaataaaagtctgtagtcaaattcaagattgtagagtgtttctctgaaagaaactttttataatttttaaaatattgcttatgttttgatttttcaggtccaatatttccctgtattcagttgtttcattacggccacttcctgcagattatgtcccttcaatagtcatgcttcctggtacttgtcaaacccaaggtaattagaaaattgcaaagtaatttttgaggtgtaatattataaacctaatgtaggagatattgctaccaaaggcaaagtttagtgcattcaatcaaagtgttttttaactgatataaaagactttgaatgacttcatgaatttatgcaaaaatataattgatgtggtattgataagctatcaaatagtataccattgaagaaggtgttttgggtctagtgatgggagttttagttaatatgagaaaataaggaaaagacagggataagtaaatgaaataaatgaacagtctacaaggctgcattaaatgaacatgttatgaaatacagatggatttggaatgaattaagttgcttttatatgataaaaatcttttgttttacctgaaaaatttttttaagatgtagaagtatcagaagaaacagtagaaccaagtgatgaattgatagaatatgattcgccagaacagttgaatgagcaattggtgactctttcacttcttcctgaatcacgatggaaaaaccttcttaaccttgatgttattaaggtaataattaacattctttatagaccctaagcatgcatccagaagcatttttatttttttaagcagagagaacttctcctacattgagggcattagaagagcaattaatatgtaagacagcactgacaatgctatttaatcaaatattgtttaatatggtatgattatcacaagatattcatatatatatcaactttgagaacactcagcagacatttggatgtggcaaaagttgagcctgtaactacagagctactggaaactgatcttttaaaatccagcctaagaaatcacttttatataagtttctaaaacgagcgggaacacatatggctattataacatatttctactgctagtcatttgagaaccagagaaattccactagactttcattttattaagttaaccctttatctcacaccacaccctgtcaactactgaaagatttttagaacttgctgtgtcagggctaggtacataagttaacatgagctaggtactaaataatgtacctggagagtatggtggtgaagaaaaaacagcccctttgtccttgaggaatttatgattctgcatgaaaaatggacaactatggtatagattagtattttttagagtatgttttatgatcccccactagtgagtagcaaaaactactgaaaggaatacaatacagtgaaaaatttcaggttaccttttgatcatgaatgcaagtattgtttggtgaaacttgagttggttagacatacacatacactagatctgctggatgtacttaagtcacagtatgggctgtggtaaaaagtttaagaaacactgactaagtaactaataattatccttgtaactaataacacaagaaaagaagtgtgtgtcttgggtaaggaaagagaagttttcacattacatttcctcacagaagttaaaattgcttctttttacttgctaactttttgagagattagtcatcagcataaaggtgtgctgtctaggagcatggtgtggaatctcttcatcatgctgtccacacatcagctttaaagggagtactttatgaaatagttcaaatgcaaggcattaataagtacaaatagattagtgtgaggggagcaatcagaataatgcttaactaattgagcagagttttggggctactgtggtcctcactaagatatagtttatactgcataaaatcttatatcaaaacataagtggattatctttatgataggaatatgctaaaacctctaatatttttattttctgctgaataaaagagaatgtaccaagactatagtttacatttgtcctgtggataacttctatttttgcttttctttataagactagataatttccagggcactgtggagttcctccaaagccttatggttttaacaaatcagtgaccatcccctttctaactcaagaatggtgagttagaatggtaactgtgactcataacagtctccaccatcctaaagggctctgcttacactacagtttgcggtgctttgtcctgtgttcatgtgatcattttattttataccatggcttccctttggaatagaatgtctccctagggcggcatagctcctaaagaatggaagaataatgtgaggtgaaattgtgagacttctttattaggcactttaccatagaaacgctcttccatcaaatgttcctgagaggtggggcacggtggcgcacgcctgtcccactttgggaggctgaaatggttgatcatttgaggtcaggagttcgagaccagcctggtcaacatggtgaaaccccatctctactataaatacaaaaatgagccaggcatgttgtacgtgcctgtaatcccggctgctcaggaggctgaggcaggagaattgcttgaacccgggaggcggaggttgcagtgagctgagatcgcaccacttcactccagcctaggcaatggagtgaaattccatctcaaaaaaaaaaatgttcctgagatactgatatgtagcagtgtacttaccaaaacaaaattctttcaatggaaatttcagtagagtttttgctaatataattttactagcatttgaaatacttataaaccagcaatcatgttttcttgaattttaaaagcacaaggtactaaagaaaaaattccagcaaaatagaaaaattagagctgtactttgaaaggaaattatcaaattacttataatgtcagtctgcttctggctccaaagttcctttggagaaaagtaatttaagaaactcttttgtattaagcatttatgtaaattttgctttccatcctgttttgtgaaagagtttgtactcaatacaaaaggaagtttaaaattacttaattgttatatcttcatgtaaatatattcatatttcaggaaaatgagctgtgtttgtcttagaacttcccctgtgccctgtcactttttttctgccttatcggcaagggtgctagagatctgcattgggaagcccaagttaaggatagctgtggtattggtcagaagagatcatattttaacattcttatgtgaaagagtttcattcctcttttactttttggtatttgttttaaaattgatttgaaattaaatatgagaaactgttggcaagataattcctatttttctttctcattttctcttaatcagaaaaagaataaaccaaaggaaccacccaaagtacccaaatcagcaccatttttcattccaacaattcctggccttgtacccagatatgctgcacctgaacaaaataatgatccccagcaggtaaaaaacaaattagaagattctaagtatatcggtgtatgtttgtatgtgttttctgcacttctttaccaagacctagttttacagatatagggtaaattaatgatagcttttaattacaaactatacatttttgggtgatacttgaattatttgaataatgtgtatttgtttttgtttaagtctaaagtggtaaatcttggagttttggctcaaaaatcagatttctgcttgaaacttgaagaaggactggtaaataataagtgtaagttgaattataagatattttaactaatatatttagcttattttactgtatatgaggagaaattgaaggaaatatcagcgttctcagtagttaagatagtaaaaatcaaaaagattgaaattttggttttaatttgacgtaattttagcatttatattaaataagcccactaaactcaaatggtattgatattataaaaatctgttgaagatttttcatatatctaacttactttttgctattggagatggacacagttattgactatatttataataaggagatccttcttgttgtgaattaaatgtaaaagttttgtttgtcgtttttgtagcaagtaatttgcaagtcttttgtttttatttataatttgtaattcagcggactgcttaggtgatttcatatattcctaaattattttattaaaaaggaaatgttttaatctgtctgttgtgttcatatatttaaatttcgaaggctacagtctgtagctaatagtgattagccataagaactgtaatcatttaaaaaactgtagtcactctcctaataattttaacttgtcctcttgttttgattcaaatgcttttgttttcataccgagattacttgagtccacattagcaaaagtcagagaatgatactgatgagcccttgtaaatgacttgttatgtttatggggagacaaagaaataaaaacactattgtttactatatactgaaggatctaaaagtgattagacttttgtcattggtgatactctttttcagaaagctaaagcatagtcattgcagttctcaaatgactcataaaaatagctgtaagtgtactgagtgtgttttcctagggtgcatatgaaacaattcttctagggaaaagaagtaggtttgggctgggtaagaataagggatggggtcttccccctctgattttatatattctgtactgttagtaatatagttcctaatgattatgtacttttataactttataacaatagaaaagaaaaattattttacctcatcagattcccaatgctaaccactattaatacttttgtatgtatcgttataggcttcttaattaggatttactctgagagaagatatatgagcattttaaaattctaacgtgcctgttgcaaggcattagattttctttattaacaggaaaaaggtttaaattacagaaaaaaaatgtgttttgagtactttctcttatattggtgtcatcgtttgtactgattttcaattattttgggtttcattctactacataatatgaaaaaattaacccacaggaagaatttcctgtaccatttaaatatatcctatttggggtataaaaggaaaactgtaattttctaagttaaatgattataatcaagtcataactggattaaaatttaatgcagatgacactgctctcaaccttctgaaagaatcaggcccatcaggaattgaaacagagctgcgaagcttgtctcctgattgtggtgggtccatagaagttatgcagagcttcttgaaaatgattgggatgatgctggacagaaagcgtgattttgagttagcccaggcataccttgcattgtttctaaaggtaagtctaatgtaagacagtactgcccagcttgtcttcttctggggcagtgctatctaacagaactttctgcaaagatgggtatgctgtatatccatcctttccagtatcatagccacttgccacatgtagctattgagttcttgaaatgtaaatagtgtgatcaagaaactggatttttaattttatagaattttaattaatttaaatttaaataaccgcatgtggctagtgactaccacattggacagctagacagtgcagcttgggagtcttgttttgtttttttactcaactgcacaataattttgactttaccccctgacatttttatgctatctgcttgatccaatgtgctgaaccattaacttttctttttttagtggttagttacattttggaagttttttgtgattatgaatagaaagttgggtttgtttgtttttttttctactactgaaatcaaaatgttcacttctatcattattaaaggagttttgatcatttgacaataagactgttacttttatgattaatatagtggtgaactcatgttttgagggtctactttagtggtataatgtgttgaaggaggtagatgatgccgatttttggtgataatagatttgattctttatcccatttatacctaaaatgagttcacttgatctgattatttaaaagtatcaggactgtccttaggtggagaggagtgatgaccactttaattctaccaaggaagtcacagtatcataaaggaccttataataaaaaaagtttgatagaggaggggaaaatgggagatagtaataaaccagcgcttaagaaaacaaatattcacctagtgtcttttgtggttccttggtagaaaaattgaatccagattaggtaaaattttaattttcttaaatgttcaatcatcatatttttctttgcagttacaccttaaaatgcttccttcagagccagtactcctagaagaaataacaaatttgtcatcccaggtggaagaaaactggacccatttgcaatcactcttcaatcaaagcatgtgtattttaaattatctcaaaagtgctttgttgtaaaaataaatttgtgactaaacaaagactttcatattaaatgggttcaattgaactcatttcttattttccaagtgtcaatgtgaaaagaaaataaatgctagcactactgactagtcagtatatctccactttaaatgctaaatactttcttgaaataaaatcgcacctcccggccaggcatgatggataatgcctgtaattccagcactttcagaggccaaagcgggaggattgcttgaagccaggaatttgagcccagcctgggcaacatagcaagcaagatcccatctctacaaaaagttaaaaaaataaattacacctgccttttgttttgaagacttaaagaatctgctcaaatgatttattttctgagtctcttcacattaacttttatatgatttttaaaaaattattacctgcttatattttttgagtatctgtttcatataaagagatgctgcatgttcactgtgaagtattgctgaattaaattgaaaatgtcagataaaactgatacatgatgtagttataaaaatgctgttatgaagaaaaaaggaatgcttttttcctcggtggcctttgataaaaatatgaatgattgactctcagagttggaggataaactaatcatcttctagcacagccctgttgtgttgcaggagaggaatcaggctaaagtctgctggtatttcagtgacagattaaaactttctaacagtggcctagtgctttctccattgtaatgtactgaaaggaagttgttcatggatcagaaatgtgggaggcccttccttgcccaaggcaagtcgctgtagatggttaaactgataccaaggataggtaagggaaattccaaattccattggaagatggccttttactgacactgcagacatgtagataacaatagtttaatgtcctctgaaaaggtaaaaattccataaatccttgcaaacaatttttagcaatattgtttattgctaccacagccaagaatgggtatttcaaagccagggttttttttattttgttttgttttgtttttttttttttttttttggctacacttttttgggggggaccttttaatttgggaagaaaatgctgagtatacttttctttcacaaccattgcaaacccaggtagccctggagttttctttttttctcatcatcattgttttgttttttttatggttcaagacttttgcaatacatgaattaaaaataagcagttctttaaagcatagcgctctaaaaactattcttagtttataccctcaaaagttgggtctttcatgaaacacagtggtttgaatatgaacaccagtagcattctcgttcgttgttagggtaagagagttttgtagaatgatctccaaaagaagcagtcctcaaaaggcatttaccagtgatatcttttaatattcatgtttttatttaatgatgtaagatagaattaataaactactaaggaaataagccaatgtggttattgtactcaatttcgtttttcttttagaaatgtgtattgacttattaaagccactgacagaaatgttaatcatgacttaagttctaatttaaaaaactattttcctctttcctaaatactatattctaaattggaatatggcaaaatcccaatatataattctatacctagtaaagattgtaaataactaaaacaaaatgataagagctgtgaactgaaattgtattgcttacagaaatcatgaaccgaattttcttctctttttaaagtgagcataaagacttaagtgtattgttaccagagatatatttagatagaatacatcattttggcaggtaatcttctagaacctttcatgtactgtttccatcaagggagggaaagaaatagaaaatataattttatctatattttccttaaaatatatcaatctgtgcacactctttcagttttttaattactcatgtaatatatgactacattttgcttgtgtgctttttgaaaaccatcttcagtcccaatatcctctgtagaagtaatagttttaactctcctagatcttcttttagagtgtttttatgagtgtttaatgtaggaatgtgtatatattatctacagccacaggaaatgtatagttacgatttttacatacgtgtatgtatattattgtacaacttgctatttctacttgggagttttttattttggtacattcacatttacctaatctcttgtgcactgtccaacagtactttgcctataatagacacttaaggaagttttccttctttttattcctttataattacaaacaatgctgaaaggaacatcatcctacatgagccctttttgtacatataaggctctctctgtggtatatgcttaggatttgaatttcaggccagagtataaccatttttaatttgaagagatacttccatttgggttccagaatggctgtatcaagttacagttcccctgagcaagatatgagcatctgcttccccatgtaattaatgacacttgctattggatttttgtaatttaattactctgaaaaaattattttggttttaaatcagaaatttctcactagtgaagatggacatatttttgtatgtttattttagaacatataaacatttgttaattttctttttcctctcatttttctattgaatgatttgtccttttatctcatggatttgttaggagttctcttgtattttctgtattttatgtctgttgccaatgttttctcctacttagccatttggctttaattttacatggtgtctgtttaaataaatgttttatatttgtatacaatcaaattgattaattttcatgacttatttcaggatataaagcaaattattttctaagacatttacagtgtatgttttcctatgtttacatgtgctcatttcacgtcatgtattttcctctacgacatgtttctgtgtgagtagttaacatgtagatctttagaattgatttttctgaagagtgaaacagcgctgcttccaatatctgttcaaaattcatttattgaaaagtccactcatatgtctgatttgaaatgctgtttcattatgtgttaaattctttcactgagctcttccatattcctagtaaatgatgcattactttggtatgttctcagatttgggtaaagccttcctcatgttctataaaaattggttaactgctggtgagcacatctcttgaagttttgatatgggttgcacaacatttataggactgatttggagagaccgacaataccgagtgcagtcctcccttggtatctagttccaggacccctgtggataccaaaatccaagcaatgccctgcagatcatgggacctatgcatatgaaaagtcggtccttgtatttgagggttttgcatccctcaaataccatatgttttatttgtgtttggttgaaaaaagtttgcatataagtgaaacttagcatttcaaacctgtgttgttcaaagatcatttgtatttctcttcaagaacaatgaatgtcttcattaaatcatcttttgtgggagagcttttggtttcatagattttcatatatatatatgatataataaacactttttgacattctggga

SEQ ID NO: 1813 - DNA, 374 bp, Homo sapiens
ctgagtgtagcatgcccccagtcgagaatggagagttgtccttctaactatagtagtagtagcaatcataatagcacttttctgtgcaaatgctctaaaaattgagggaaagtggggcttttgtttggtgtcactctttttttaattgtggtggaaatatatataacatgacatttaccattgtaatcatttttaagtgtgcagttcagtggcatgaagtacattcacattgtcgtgcaaccatctctaccatctatctctgtaactttttcatcttcccaaactgaaactctctacccctgaaataataaccatctaccctgtcgccccagctcccagccccaggcaaccactattcagctttctgtctgtat

SEQ ID NO: 1814 - DNA, 267 bp, Homo sapiens
ggcaagaccctccaacaagccccctcccactttccacggtgtctccctctccccctcgcagggccctccaagttactagacgagcccagacccatttgtgggagaccccgcccctccctgcaagcacccacagcctcagagagcagcagaggcccctcactcctgcacgctcctccaaggttgccaggacaagaagcctggagccagggagacaagggaatccgtgtccctgacccacagagcattcagggagagggcacaggcggg

SEQ ID NO: 1815 - DNA, 267 bp, Homo sapiens; identical to SEQ ID NO: 1814

SEQ ID NO: 1816 - DNA, 267 bp, Homo sapiens
ggcaagaccctccaacaagccccctcccactttccacggtgtctccctctccccctcgcagggccctccaagttactagacgagcccagacccatttgtgggagaccccgcccctccctgcaagcacccacagcctcagagagcagcagaggcccctcactcctgcacgctcctccaaggttgccaggacaagaagcctggagccagggagacaagggaatccatgtccctgacccacagagcattcagggagagggcacaggcggg

SEQ ID NO: 1817 - DNA, 267 bp, Homo sapiens
ggcgagaccctccaacaagccccctcccactttctgcggtgtctccctctccccctcgcagggccctccaagttactagccgagcccagacccatttgtgggagaccccgcccctccctgcaagcacccacagcctcagagagcagcagaggcccctcactcctgcacgctcctccaagcttgccaggacaacgagcctggagccagggagacaagggaatcggtgtccctgacccacggagctttcagggagagggcgcaggcggg

SEQ ID NO: 1818 - DNA, 267 bp, Homo sapiens; identical to SEQ ID NO: 1816

SEQ ID NO: 1819 - DNA, 8515 bp, Homo sapiens
gggcagttggtgggcacaagagcgagaggacatcattatgaaatacgaaaaggtacaagtcggtctgcttcttggagggaggcctcttccagtgtgccctggtcaaagggtcctgggctccctaggagcacagggcagggacgggtggccaatgcccccaggcccttgcaccctttaccttggacccctcaccaaggctccctctgggctacagggacaccgagctgggctgccagaggacaaggggcctaagccttttcgaagctacaacaacaacgtcgatcatttggggattgtacagtgagtcctctgcactcccctcacccctaaagcacctgtctcagctcagggatgggtttgcttttagaaaggcctttctgacgcaggacatgtctcaccaggtcgggtcaacctcctttccagggatagaactcctccctgactcccctgcaggtccagcccgaggttgttaggccagaggtgtggggcccatctagggagccggtgggaatggagactgggctaggtcaggcccctgggcgctcagcagttctgtcggcaagtgagcacaagaggagcggggcagcctgagggtctggccctgtctacttggagacaaccccggtgagatgcaagggttatggccacagggtgaggggacgcctggcccagcctcagggctgttgtccagcaggtctctgagggcccacctgcccctgttctcccccattcccctagagctacagccctcactgtcccgtgaggggaaaaggcatggtgacaatgggggctgtagccctaggagaacgggggagaagatgggcagggccccgttctgggcatctcacggtgaggccagggaggcagcagggctcgcggctaaagacctgggtctggtgctgggaagggatctggggccgggtaagaggagcccagccaggagcccatccctcagggatcacaggatggagagacagaggatccctggggaggtagggcgggagggagctgacgagccgtgccacttctgaaacgcagggtgtgtggctcgggtgcagggagaggcaggtggatgctgggaggtcagaacctgcaagggccttggggctgtcaagtggggtgggcccctggtgcagccagagtacaccgggcaggtctcagggcaggctcccttgaccctggcggggggatgtggtcactccctgagggactcctgtcagggcccggtcgcccaccctgggcggcccccatcccatctcagggctaacctttctcagctccagcagaaagcaccacctcgagtccaggacgggcagccccactgggcagcctgaccgccccccacgccaggggccccagtaaccccggccaggctgtccctacactccttcttctcccaggtcctgcccctcctgggagtcagccccacaggaaggcccttgtcctcccttccctgtgccttctcctgggctgagccctgagctggaaagggacagagccagtcctttctgggggtcggcacccaggctggggccgctccaggccccgtgcagttcctcagctctgcctgggttgccttacagtgagacggagctgcctcctctgactgcgcgggaggcgaaggtaagagcctgatgcgtggaggggctggtccagggacgtagggactgggcgggtggtcagtgaggcagaggaagcagctggcctgagcggtggcgggtgagggcaacacgctgtcactgggaggggcagcagtccctgctggacctgaccccaggttgctgttcactttggcagtttgataaaattccaaaaggagaaccacagtcctggcttgggggtggctgcgcgcttgtgtcaggaccccacctagaggctgggacctaagactggtgtgtctgtggcctgaggatggtacatcccggggtcccaaagccagcccactggtgctcatttgctcaaaggctctcagcccttgaggtctgcccttccctggctccttccagctggctcccaccagggctccagagcccaagacccagcatccgcgggcggctctgggaagcctggcagctccgctaactccaacatgcctcatttgacagcaaattcggcgggagatcagccgaaagagcaagtgggtggatatgctgggagactgggagaaatacaaaagcagcagaaaggtaacgtgtggagggaggaagcactctctgcagagacaggggacaggcacccatggctgtggcctggcaccatcagcctctcagagggtgggcggcacactgtcctcgcccagaggactgcaggcctggtcgccagatttcctgcctattcgtgcaagcgtcaccttgcagggagggaatctgaatctagggctgggactacccggagctcaaggctagggatgccctggtgacctgaaggaaggaaaaggttcagatcagagtttcgactctgagtgtccatccactctttcagtcctgggaagggagaccctgtcccagcttgatctcacctctactgaggaatcatggggccaaaaccgacaatttccagaatccccgggctctggtcctcactggggtcaccccgtggcctgtgacaccagatcattttctgcccacagctcatagatcgagcgtacaagggaatgcccatgaacatccggggcccgatgtggtcagtcctcctgaacattgaggaaatgaagttgaaaaaccccggaagataccaggtacgctcagccagagcacaacaaacaggacaggccgtgtcggggcccaggtctccagctggagggaacgtcaagaccaccctggggagctgggggtgaaggtcagatgaacaccctgggcacagatggtgacacagtcaccacagacaaactcagctctggtgaccctccctggcttcagtaacaagccaaaatgcagctttctgcagaaggaaaccttccttctgtccttccttcccgaagtgctgactgtgggctgactgccactgggggcagggagtcttccatctgttctgagactgcttcctcctcttggccctgccctacagatcatgaaggagaagggcaagaggtcatctgagcacatccagcgcatcgaccgggacgtaagcgggacattaaggaagcatatattcttcagggatcgatacggaaccaagtaagcctacgggagccacagggtcccagcagagatggggtgaatgagagggatgggggcttccccggagcagaagccagggtcacccaggagggatgacacagctgccaagagctctcccggcccagggagcagccggcaccatgaaccgagcacctccctggttccaagccctgggccagactggaacatgtggggccagaacccaggaggatcctgaggagatggaaggcagcaaacaaaatcatgcacaatggtgaagggtgctctccctgacccatggggacccatggtaggacccacgggagggtggcaggatagagggcccatgagccccccccaggcaacagtgacagcaccaaatgctgggagaattaggggtcctggaaactctcatccaggtccgctgggaacatgacatggcacagccacgttggcagcccgttgggcagtggctcacaaagctcgatggacttgaaccacacatccccaaagtgtcacagatattgaacccactgatttgcaaactgacatccacatgaaaccagcatgccaggttcactgcttgactcctcgtcactcacacacggagccttcggggacggccttcaacacggggatggggagagcaaggctggtcctcccttcaaacggaagacccagtgagaaaagggaacgagccggtgatgcccgcacgaacgtgggtggatcctagatgcattttgctgagggacagaagccagacccaataagctaccacagtaggattcccattcctaggccattctggaaaaggccaaaccacagggactgagaagcagtctgggtggccaggggctgacggatcggggagaggctgggtgcataggggccaccctggagacttggaggatgaaggagtcgccccaggaggggctggagcggtggccgggagactctgcacattggtttggaaccgtggaggaactgtacacccacagactgaactggcgtgtgtgcaaactgaaaaaaaaaaaaaaaaatcattcagagtgaaaaggatcaggcaagtcactgtacaactgggctatttgcatgtcacagatgtggattttactgaaacatttcttcaagagtctcaggccctgaagagctcactgcttatctggtgaaacatctgaacctgaaatgggatttgctgttaggctttgtagacaaagtgaaattaacaacatctgcacaaaacaaaccaaagccccctttctctgtttcctaggcagcgggaactactccacatcctcctggcatatgaggagtacaacccggtgagtattcccggcagtgaggttcccgggccatatttccatattgacaggagtgggtgtctggtgggggtgtcgttgcttcttttaaagttagtatttgtgacccaccaggatataggaggtaggatgtcagctcaccgctggcataaacctccaaggaagggggtggtctcaaggggtcaagctgagacacagaggagtcagggcctggactcctggtgtcacctgggcctgaccaccacttctcagaacaagaaatgacgccctcctcctggggctgccccaaagcccaggagcttggcagcatcgcacacaggatggtgctatcagcagacattttggacaaggtgctgaagtgcctgatggacttggctcttgtcatgaaatgaatgtgcatcctgaggaagcctctttttcagaggaagcctctccttcagaggaagcctctccagtcacctctgccctctccaatgacatgagtcctcccaggtgacctcagccctcccaggtgatgtccttccatggtgactctggctcttgcaggaggtgggctactgcagggacctgagccacatcgccgccttgttcctcctctatcttcctgaggaggatgcattctgggcactggtgcagctgctggccagtgagaggcactccctgcagggtaagtgaacagctgccccggggacctcctgcagccagacctggggatggccaccctggccaggtgatcacagctttcagccaaggcaccctccttgtgtcgccagcttgttgggagactttaggatgtctctgctgagggtcccacaggagtccacggctgacccccaaagcccaaatcagacgcctctcatccccatcagcagagggcatctcatcctccccgtggccaccctctgtgtcctggagccacgccctccggctctgattctgtgcagctgactctcccctccctgagagtcctcctgccctccagctgcccgggctcctgctgccatcggtgcccacgaatgggccgaccaagcccaggtggcagcatctccccatcccctgttccctggcccgaccccactaccaggagatgaccgggaagcccagcgcccacccagttccggccaccctgtcgtggcctgaaagtcaggcttgccctttttgcaccctggcccaggaggcctccaggggaacctccagccaggctccagggaatgttcccgccccacctccccagggtaaaggccgcatgttggggtcaccagatgggagggtgggaggccttggggtttgggggcctctccagctgcccagctcttgcagctgatggctccacatcttgggggaaggctctgatttcatgatgggctgggggcttctcaggatttcacagcccaaatggcgggaccgtccaggggctccaagaccaacaggagcatgtggtagccacgtcacaacccaagaccatggggcatcaggtgagtttatggtcccctcagctcttcccagaggccctgcctcccgtggggctgtaggagcaggggggctggagcccctcgtggggctggtgactggctgagtcccagccagggcctgacctgggacgtcgggttctccatgggctgggagttggtttcctttcctgccctggaggagacagaggcacagggatgggggcccagctcccgcagagcagggcaaagggcagtgtgtccaccgggagtgtgggaaggtgacagtgttgtggggagctctggacaccgcccagtgttctgcactaggggaagggtcttcagaggccctggaagagggaggtttttagggcagcccagtggcctgagcacctctgttgcttccatcaggacaagaaagatctatgtgggcagtgttccccgttaggctgcctcatccggatattgattgacggggtaaggaggcatagggagaccctggctcagggaccttccttgccctgcagtgccctgcttccccagcccgggggtctggctcactcccagcccacaggaggctcaggcgggtccccaaaggacacacaagcaaaaccctctgcccaaggggggtcatcccagggccatggctggggctcaggcccagcctcatgggcagactgggccaggacccgacttgagagggctcagggaagcctcaagccctgggcaagcccctctctccaggagccacatccccactcaaatgagtgccccccatgaggagcttcaagaccttgtctgacccagcgtcctggagggctcaggcgaccctcatggggaaggtcactgactctggagactgaagccccagtgtgcgcagctcgagccaccagccccagcctggaaggaccaggttctttcacacctgctgtccccacagatctctctcgggctcaccctgcgcctgtgggacgtgtatctggtagaaggcgaacaggcgttgatgccgataacaagaatcgcctttaaggttcagcagagtaagtctacgtgtgcccagcggggcctggggagccctggggtcagaccccgactggcccgagggcagcttcctcacactgtcctcatgatcctctgttctggcccagagggaggtctggccaggtgggctgggcaggacactgtgacaccgagcccatcccccacatgacccagatgaaagtcgagagtgtggtgagcacttccctgtccggatcgccccccagccacagtctcctgtgtatatctggacacctggggtggccacaaaaggatccggcaccgcccagtaggagactgaagtggccacggggtatgagctgtgaccattcccaggtaactcccctggcctgatatccaccctgtccctagagcgcctcacgaagacgtccaggtgtggcccgtgggcacgtttttgcaaccggttcgttgatacctgggccagggatgaggacactgtgctcaagcatcttagggcctctatgaagaaactaacaagaaagaagggggacctgccacccccaggtgggctccagtgccatgtcccctcccatgtcaccctctggggtagtcagtagtaggggagtgcccgggacccgcaaccctactacctgggccttcctcttcaccttttcttcctcctcttcctcctggactctaagaaagtacaggaggcccaccggtcctcagggcaggcgctcagtgcgtgtatactggacatgctgtgcacgcaggagggggatgtgggcaagaccctccaacaagccccctcccactttccacggtgtctccctctccccctcgcagggccctccaagttactagacgagcccagacccatttgtgggagaccccgcccctccctgcaagcacccacagcctcagagagcagcagaggcccctcactcctgcacgctcctccaaggttgccaggacaagaagcctggagccagggagacaagggaatccgtgtccctgacccacagagcattcagggagagggcccagagccagagccaagagttcagccagaagtgggaacggtcagtcctggcatggactgggcagcccaggagggcagagggtgacccacgtccgggcccaatcacccactgcggagacgggtccccacgtgaggtgacaaggggctgggtgacatccaaggcccctcccacctgagttctgactgggggccgtatcccaggcccaacagccctgggacgaaggtgtgtggcaggaagcccccagccagtctgaaccctgggggcagtcccaggagccacccgccatgccacgacagcttccccacgccaggcagcacgcacccctccctctgggatcagcagactacaggcgtgtcctcggtgtcaggccacgggggccacacagagaccccgaggactccagagacgcaggcaggtggggcccagcccggaaaggcctgcgtgggctcactggagatgctgaccgcgtctgttttcctttcagccaaacccgagcaaggggtcgtcggcatccaggcctgtgccggcttcacgtggcgggaagaccc

SEQ ID NO: 1820 - DNA, 266 bp, Homo sapiens
ggcaagaccctccaacaagccccctcccactttccacggtgtctcgctctctccctcacagggccctcaaagttactagatgagccagacccatttgtgggagaccccgcccctccctgcaagcacccacagcctcagagagcagcagaggcccctcactcctgcacgctcctccaaggttgccaggacaacaagccttgagcaagggagacaagggaatcgggtgtccctgagccacagggcattcagggagagggcacaggcgg

SEQ ID NO: 1821 - DNA, 6696 bp, Homo sapiens
ggaatgcccatgaacatccggggcccgatgtggtcagtcctcctgaacactgaggaaatgaagttgaaaaaccccggaagataccaggtacgctcagccagagcacaacaaacaggacaggccgtgtcggggcccaggtctccagctggagggaacgtcaagaccaccctggggatctgggggtgaaggtcagatgaacaccctgggcacagatggtgacacagtcaccacagacaaactcagctctggtgaccctccctggcttcagtaacaagccaaaatgcagctttctgcagaaggaaaccttccttctgtccttccttcccgaactgctgactgtgggctgactgccactgggggcagggagtcttccatctgttctgagactgcttcctcctcttggccctgccctacagatcatgaaggagaagggcaagaggtcatctgagcacatccagcgcatcgaccgggacgtaagcgggacattaaggaagcatatattcttcagggatcgatacggaaccaagtaagcctacgggagccacagggtcccagcagagatggggtgaatgagagggatgggggcttccccggagcagaagccagggtcacccaggagggatgacacagctgccaagagctctcccggcccagggagcagccggcaccatgaaccgagcacctccctggttccaagccctgggccagactggaacatgtggggccagaacccaggaggatcctgaggagatggaaggcagcaaacaaaatcatgcacaatggtgaagggtgctctccctgacccatggggacccatggtaggacccacgggagggtggcaggatagagggcccatgagcccccgccaggcaacagtgacagcaccaaatgctgggagaattaggggtcctggaaactctcatccaggtccgctgggaacatgacatggcacagccacgttggcagcccgttgggcagtggctcacaaagctcgatggacttgaaccacacatccccaaagtgtcacagatattgaacccactgatttgcaaactgacatccacatgaaaccagcatgccaggttcactgcttgactcctcgtcactcacacacggagccttcggggacggccttcaacacggggatggggagagcaaggctggtcctcccttcaaacggaagacccagtgagaaaagggaacgagccggtgatgcccgcacgaacgtgggtggatcctagatgcattttgctgagggacagaagccagacccaataagctaccacagtaggattcccattcctaggccattctggaaaaggccaaaccacagggactgagaagcagtctgggtggccaggggctgacggatcggggagaggctggttgcataggggccaccctggagacttggaggatgaaggagtcgccccaggaggggctggagcggtggccgggagactctgcacatcggtttggaaccgtggaggaactgtacacccacagactgaactggcgtgtgtgcaaactgaaaaaaaaaatcattcagagtgaaaaggatcaggcaagtcactgtacaactgggctatttgcatgtcacagatgtggattttactgaaacatttcttcaagagtctcaggccctgaagagctcactgcttatctggtgaaacatctgaacctgaaatgggatttgctgttaggctttgtagacaaagtgaaattaacaacatctgcacaaaacaaaccaaagccccctttctctgtttcctaggcagcgggaactactccacatcctcctggcatatgaggagtataacccggtgagtattcccggcagtgaggttcccgggccatatttccatattgacaggagtgggtgtctggtgggggtgtcgttgcttcttttaaagttagtatttgtgacccaccaggatataggaggtaggatgtcagctcaccgctggcataaacctccaaggaagggggtggtctcaaggggtcaagctgagacacaaaggagtcagggcctggactcctggtgtcacctgggcctgaccaccacttctcagaacaagaaatgacgccctcctcctggggctgccccaaagcccaggagcttggcagcatcgcacacaggatggtgctatcagcagacattttggacaaggtgctgaagtgcctgatggacttggctcttgtcatgaaatgaatgtgcatcctgaggaagcctctttttcagaggaagcctctccttcagaggaagcctctccagtcacctctgccctctccaatgacatgagtcctcccaggtgacctcagccctcccaggtgatgtccttccatggtgactctggctcttgcaggaggtgggctactgcagggacctgagccacatcgccgccttgttcctcctctatcttcctgaggaggatgcattctgggcactggtgcagctgctggccagtgagaggcactccctgcagggtaagtgaacagctgccccggggacctcctgcagccagacctggggatggccaccctggccaggtgatcacagctttcagccaaggcaccctccttgtgtcgccagcttgttgggagactttagaatgtctctgctgagggtcccacaggagtccacggctgacccccaaagcccaaatcagacgcctgtcatccccatcagcagagggcatctcatcctccccgtggccaccctctgtgtcctggagccacgccctccggctctgattctgtgcagctgactctcccctccctgagagtcctcctgccctccagctgcccgggctcctgctgccatcggtgcccacgaatgggccgaccaagcccaggtggcagcatctccccatcccctgttccctggcccgaccccactaccaggagatgaccgggaagcccagcgcccacccagttccggccaccctgtcgtggcctgaaagtcaggcttgccctttttgcaccctggcccaggaggcctccaggggaacctccagccaggctccagggaatgttcccgccccacctccccagggtaaaggccgcatgttggggtcaccagatgggagggtgggaggccttggggtttgggggcctctccagctgcccagctcttgcagctgatggctccacatcttgggggaaggctctgatttcatgatgggctgggggcttctcaggatttcacagcccaaatggcgggaccgtccaggggctccaagaccaacaggagcatgtggtagccacgtcacaacccaagaccatggggcatcaggtgagtttatggtcccctcagctcttcccagaggccctgcctcccgtggggctgtaggagcaggggggctggagcccctcgtggggctggtgactggctgagtcccagccagggcctgacctgggacgtcgggttctccatgggctgggagttggtttcctttcctgccctggaggagacagaggcacagggatgggggcccagctcccgcagagcagggcaaagggcagtgtgtccaccgggagtgtgggaaggtgacagtgttgtggggagctctggacaccgcccagtgttctgcactaggggaagggtcttcagaggccctggaagagggaggtttttagggcagcccagtggcctgagcacctctgttgcttccatcaggacaagaaagatctatgtgggcagtgttccccgttaggctgcctcatccggatattgattgacggggtaaggaggcatagggagaccctggctcagggaccttccttgccctgcagtgccctgcttccccagcccgggggtctggctcactcccagcccacaggaggctcaggcgggtccccaaaggacacacaagcaaaaccctctgcccaaggggggtcatcccagggccatggctggggctcaggcccagcctcatgggcagactgggccaggacccgacttgagagggctcagggaagcctcaagccctgggcaagcccctctctccaggagccacatccccactcaaatgagtgccccccatgaggagcttcaagaccttgtctgacccagcgtcctggagggctcaggcgaccctcatggggaaggtcactgactctggagactgaagccccagtgtgcgcagctcgagccaccagccccagcctggaaggaccaggttctttcacacctgctgtccccacagatctctctcgggctcaccctgcgcctgtgggacgtgtatctggtagaaggcgaacaggcgttgatgccgataacaagaatcgcctttaaggttcagcagagtaagtctacgtgtgcccagcggggcctggggagccctggggtcagaccccgactggcccgagggcagcttcctcacactgtcctcatgatcctctgttctggcccagagggaggtctggccaggtgggctgggcaggacactgtgacaccgagcccatcccccacatgacccagatgaaagtcgagagtgtggtgagcacttccctgtccggatcgccccccagccacagtctcctgtgtatatctggacacctggggtggccacaaaaggatccggcaccgcccagtaggagactgaagtggccacgggatatgagctgtgaccattcccaggtaactcccctggcctgatatccaccctgtccctagagcgcctcacgaagacgtccaggtgtggcccgtgggcacgtttttgcaaccggttcgttgatacctgggccagggatgaggacactgtgctcaagcatcttagggcctctatgaagaaactaacaagaaagcagggggacctgccacccccaggtgggctccagtgccatgtcccctcccatgtcaccctctggggtagtcagtagtaggggagtgcccgggacccgcaaccctactacctgggccttcctcttcaccttttcttcctcctcttcctcctggactctaagaaagtacaggaggcccaccggtcctcagggcaggcgctcagtgcgtgtatactggacatgctgtgcacgcaggagggggatgtgggcaagaccctccaacaagccccctcccactttccacggtgtctccctctccccctcgcagggccctccaagttactagacgagcccagacccatttgtgggagaccccgcccctccctgcaagcacccacagcctcagagagcagcagaggcccctcactcctgcacgctcctccaaggttgccaggacaagaagcctggagccagggagacaagggaatccgtgtccctgacccacagagcattcagggagagggcacaggcgggaccccgggcccagagccagagccaagagttcagccagaagtgggaacggtcagtcctggcatggactgggcagcccaggagggcagagggtgacccacgtccgggcccaatcacccactgcggagacgggtccccacgtgaggtgacaaggggctgggtgacatccaaggcccctcccacctgagttctgactgggggccgtatcccaggcccaacagccctgggacgaaggtgtgtggcaggaagcccccagccagtctgaaccctgggggcagtcccaggagccacccgccatgccacgacagcttccccacgccaggcagcatgcacccctccctctgggatcagcagactacaggcgtgtcctcggtgtcaggccacgggggccacacagagaccccgaggactccagagacgcaggcaggtggggcccagcccggaaaggcctgcgtgggctcactggagatgctgaccgcgtctgttttcctttcagccaaacccgagcaagggtcgtcggcatccaggcctgtgccggcttcacgtggcgggaagaccctctgcaagggggacaggcaggcccctccaggcccaccagcctggttcccgcggcccatttggtcagcttccccgccacgggcacctcgttcttccacaccctgtcctggtggggctgtccgggaagacacctaccctgtgggcactcagggtgtgcccagcccggccctggctcagggaggacctcagggttcctggagattcctgcagtggaactccatgccccgcctcccaacggacctggacgtagagggcccttggttccgccattatgatttcagacagagctgctgggtccgtgccatatcccaggaggaccagctggccccctgctggcaggctgaacaccctgcggagcgggtgagatcggctttcgctgcacccagcactgattccgaccagggcacccccttcagagctagggacgaacagcagtgtgctcccacctcagggccttgcctctgcggcctccacttggaaagttctcagttccctccaggcttctagaagcatctgggccagggctcatggctggataatttccctaggcttaacaacccaagcaagcttcgcatcctcgttttatttttggttaaacttatgaaaatgtattaagaaagagtgcagctcgagagagattcagagatggaacacaccagaccccagatcacaaagccaaccatgcccagcccctcccagcacccccagccccacgaccatcgttctgaattctgacgacaccgtgagcctgcctttgtacttcaaactcatggaaggataaccaccttcatgttttgaaataaatgtttcctgttgaaatga

SEQ ID NO: 1822 - DNA, 267 bp, Homo sapiens; identical to SEQ ID NO: 1814

SEQ ID NO: 1823 - DNA, 267 bp, Homo sapiens; identical to SEQ ID NO: 1814

SEQ ID NO: 1824 - DNA, 9805 bp, Homo sapiens
ggagagatcttgttccctgtaggaaactgggcatcgctgaggccctgagcatcccaggaggccgattgcacagagacctctggtcgctgaccccagtctgcctccacatccctggaatagcccatcatgggcccttcacccttggcaggtggaaaccattcaacctgctggggccggtgtgtccccatttcatggcattgggggacaacaggattctctgtctaggtcccactgtactcaagtccttgggaagacgcccacccctgcttgggacttgagactccagagactggagcagctgtgggccactgggtctggcccctttttccctgggggcggcggtggaatgggggctacgcagccagccagcatctgggagcccggcgagagcggttcaggtgttctccgaagccgcggcgtacagtgtgacctttagacaattctgtctcacaggatggacgtggtagaggtcgcgggcagttggtgggcacaagagcgagaggacatcattatgaaatacgaaaaggtacaagtcggtctgcttcttggagggaggcctcttccagtgtgccctggtcaaagggtcctgggctccctaggagcacagggcagggacgggtggccaatgcccccaggcccttgcaccctttaccttggacccctcaccaaggctccctctgggctacagggacaccgagctgggctgccagaggacaaggggcctaagccttttcgaagctacaacaacaacgtcgatcatttggggattgtacagtgagtcctctgcactcccctcacccctaaagcacctgtctcagctcagggatgggtttgcttttagaaaggcctttctgacgcaggacatgtctcaccaggtcgggtcaacctcctttccagggacagaactcctccctgactcccctgcaggtccagcccgaggttgttaggccagaggtgtggggcccatctagggagccggtgggaatggagactgggctaggtcaggcccctgggcactcagcagttctgtcggcaagtgagcacaagaggagcggggcagcctgagggtctggccctgtctacttggagacaaccccggtgagatgcaagggttatggccacagggtgaggggacgcctggcccagcctcagggctgttgtccagcaggtctctgagggcccacctgcccctgttctcccccattcccctagagctacagccctcactgtcccgtgaggggaaaaggcatggtgacaatgggggctgtagccctaggagaacgggggagaagatgggcagggccccgttctgggcatctcacggtgaggccagggaggcagcagggctcgcggctaaagacctgggtctggtgctgggaagggatctggggccgggtaagaggagcccagccagaagcccatccctcagggatcacaggatggagagacagaggatccctggggaggtagggcgggagggagctgacgagcggtgccacttctgaaacgcagggtgtgtggctcgggtgcagggagaggcaggtagatgctgggaggtcagaacctgcaagggccttggggctgtcaagtggggtgggcccctggtgcagccagagtacaccgggcaggtctcagggcaggctcccttgaccctggcggggggatgtggtcactccctgagggactcctgtcagggcccggtcgcccaccctgggcggcccccatcccatctcagggctaacctttctcagctccagcagaaagcaccacctcgagtccaggacgggcagccccattgggcagcctgaccgccccccacgccaggggccccagtaaccccggccaggctgtccctacactccttcttctcccaggtcctgcccctcctgggagtcagccccacaggaaggcccttgtcctcccttccctgtgccttctcctgggctgagccctgagctggaaagggacagagccagtcctttctgggggtcggcacccaggctggggccgctccaggccccgtgcagttcctcagctctgcctgggttgccttacagtgagacggagctgcctcctctgactgcgcgggaggcgaaggtaagagcctgatgcgtggaggggctggtccagggacgtagggactgggcgggtggtcagtgaggcagaggaagcagctggcctgagcggtggcgggtgagggcaacacgctgtcactgggaggggcagcagtccctgctggacctgaccccaggttgctgttcactttggcagtttgataaaattccaaaaggagaaccacagtcctggcttgggggtggctgcgcgcttgtgtcaggaccccacctagaggctgggacctaagactggtgtgtctgtggcctgaggatggtacatcccggggtcccaaagccagcccactggtgctcatttgctcaaaggctctcagcccttgaggtctgcccttccctggctccttccagctggctcccaccagggctccagagcccaagacccagcatccgcgggcggctctgggaagcctggcagctccgctaactccaacatgcctcatttgacagcaaattcggcgggagatcagccgaaagagcaagtgggtggatatgctgggagactgggagaaatacaaaagcagcagaaaggtaacgtgtggagggaggaagcactctctgcagagacaggggacaggcacccatggcttgtggcctggcaccatcagcctctcagagggtgggcggcacactgtcctcgcccagaggactgcaggcctggtcgccagatttcctgcctattcgtgcaagcgtcaccttgcagggagggaatctgaatctagggctgggactacccggagctcaaggctagggatgccctggtgacctgaaggaaggaaaaggttcagatcagagtttcgactctgagtgtccatccactctttcagtcctgggaagggagaccctgtcccagcttgatctcacctctactgaggaatcatggggccaaaaccaacaatttccagaatccccgggctctggtcctcactggggtcaccccgtggcctgtgacaccagattgttttctgcccacagctcatagatcgagcatacaagggaatgcccatgaacatccggggcccgatgtggtcagtcctcctgaacattgaggaaatgaagttgaaaaaccccggaagataccaggtacgctcagccagagcacaacaaacaggacaggccgtgtcggggcccaggtctccagctggagggaacgtcaagaccaccctggggagctgggggtgaaggtcagatgaacaccctgggcacagatggtgacacagtcaccacagacaaactcagctctggtgaccctccctggcttcagtaacaagccaaaatgcagctttctgcagaaggaaaccttccttctgtccttccttcccgaagtgctgactgtgggctgactgccactgggggcagggagtcttccatctgttctgagactgcttcctccgcttggccctgccctacagatcatgaaggagaagggcaagaggtcatctgagcacatccagcgcatcgaccgggacataagcgggacattaaggaagcatatgttcttcagggatcgatacggaaccaagtaagcctacgggagccacagggtcccagcagagatggggtgaatgagagggatgggggcttccccggagcagaagccagggtcacccaggagggatgacacagctgccaagagctctcccggcccagggagcagccggcaccatgaaccgagcacctccctggttccaagccctgggccagactggaacatgtggggccagaacccaggaggatcctgaggagatggaaggcagcaaacaaaatcatgcacaatggtgaagggtgctctccctgacccatggggacccatggtaggacccacgggagggtggcaggatagagggcccatgagcccccccaggcaacagtgacagcaccaaatgctgggagaattaggggtcctggaaactctcatccaggtccgctgggaacatgacatggcacagccacgttggcagccagttgggcagtggctcacaaagctcgatggacttgaaccacacatccccaaagtgtcacagatattgaacccactgatttggaaactgacatccacatgaaaccagcatgccaggttcactgcttgactcctcgtcactcacacacggagccttcggggacggccttcaacacgggaatggggagagcaaggctggtcctcccttcaaacggaagacccagtgagaaaagggaacgagccggtgatgcccgcacgaacgtgggtggatcctagatgcattttgctgagggacagaagccagacccaataagctaccacagtaggattcccattcctaggccattctggaaaaggccaaaccacagggactgagaagcagtctgggtggccaggggctgacggatcggggagaggctgggtgcataggggccaccctggagacttggaggatgaaggagtcgccccaggaggggctggagcggtggccgggagactctgcacattggtttggaaccgtggaggaactgtacacacacagactgaactggcgtgtgtgcaaactgaaaaaaaaaaaaaaatcattcagagtgaaaaggatcaggcaagtcactgtacaactgggctatttgcatgtcacagatgtggattttactgaaacatttcttcaagagtctcaggccctgaagagctcactgcttatctggtgaaacatctgaacctgaaatgggatttgctgttaggctttgtagacaaagtgaaattaacaacatctgcacaaaacaaaccaaagccccctttctctgtttcctaggcagcgggaactactccacatcctcctggcatatgaggagtataacccggtgagtattcccggcagtgaggttcccgggccatatttccatattgacaggagtgggtgtctggtgggggtgtcgttgcttcttttaaagttagtatttgtgacccaccaggatataggaggtaggatgtcagctcaccgctggcataaacctccaaggaagggggtggtctcaaggggtcaagctgagacacaaaggagtcagggcccggactcctggtgtcacctgggcctgaccaccacttctcagaacaagaaatgacgccctcctcctggggctgccccaaagcccaggagcttggcagcatcgcacacaggatggtgctatcagcagacattttggacaaggtgctgaagtgcctgatggacttggctcttgtcatgaaatgaatgtgcatcctgaggaagcctctttttcagaggaagcctctccttcagaggaagcctctccagtcacctctgccctctccaatgacatgagtcctcccaggtgacctcagccctcccaggtgatgtccttccatggtgactctggctcttgcaggaggtgggctactgcagggacctgagccacatcgccgccttgttcctcctctatcttcctgaggaggatgcattctgggcactggtgcagctgctggccagtgagaggcactccctgcagggtaagtgaacagctgccccggggacctcctgcagccagacctggggatggccaccctggccgggtgatcacagctttcagccaaggcaccctccttgtgtcgccagcttgttgggagactttaggatgtctctgctgagggtcccacaggagtccacggctgacccccaaagcccaaatcagacgcctctcatccccatcagcagagggcatctcatcctccccgtggccaccctctgtgtcctggagccacgccctccggctctgattctgtgcagctgactctcccctccctgagagtcctcctgccctccagctgcccgggctcctgctgccatcggtgcccacgaatgggccgaccaagcccaggtggcagcatctccccatcccctgttcccctggcccgaccccactaccaggagatgaccgggaagcccagcgcccacccagttccggccgccctgtcgtggcctgaaagtcaggcttgccctttttgcaccctggcccaggaggcctccaggggaacctccagccaggctccagggaatgttcccgccccacctccccagggtaaaggccgcatgttggggtcaccagatgggagggtgggagtagccttggggtttgggggcctctccagctgcccagctcttgcagctgatggctccacatcttgggggaaggctctgatttcatgatgggctgggggcttctcaggatttcacagcccaaatggcgggaccgtccaggggctccaagaccaacaggagcatgtggtagccacgtcacaatccaagaccatggggcatcaggtgagtttatggtcccctcagctcttcccagaggccctgcctcccgtggggctgtaggagcaggggggctggggcccctcgtggggctggtgactggctgagtcccagccagggcctgacctgggacgtcgggttctccatgggctgggagttggtttcctttcctgccctggaggagacagaggcacagggatgggggcccagctcccgcagagcagggcaaagggcagtgtgtccaccgggagtgtgggaaggtgacagtgttgtggggagctctggacaccgcccagtgttctgcactaggggaagggtcttcagagacccgagaagagggaggtttttagggcagcccagtggcctgagcacctctgttgcttccatcaggacaagaaagatctatgtgggcagtgttccccgttaggctgcctcatccggatattgattgacggggtaaggaggcatagggagaccctggctcagggaccttccttgccctgcagtgccctgcttccccagcccgggggtctggctcactcccagcccacaggaggctcaggcgggtccccaaaggacacacaagcaaaaccctctgcccaagaggggtcatcccagggcaatggctggggctcaggcccagcctcatgggcagactgggccaggacccgacttgagagggctcagggaagcctcaagccctgggcaagcccctctctccaggagccacatccccactcaaatgagtgccccccatgaggagcttcaagaccttgtctgacccagcgtcctggagggctcaggcgaccctcatggggaaggtcactgactctggagactgaagccccagtgtgcgcagctcgagccaccagccccagcctggaaggaccaggttctttcacacctgctgtccccacagatctctctcgggctcaccctgcgcctgtgggacgtgtatctggtagaaggcgaacaggcgttgatgccgataacaagaatcgcctttaaggttcagcagagtaagtctacgtgtgcccagcggggcctggggagccctggggtcagaccccgactggcccgagggcagcttcctcacactgtcctcatgatccgctgttctggcccagagggaggtccggccaggtgggctgggcaggacactgtgacaccgagcccatccctcacatgatccggacagggaagtgctcaccacactctcgactttcatctgggtccccagccacagtctcctgtgtatatctggacacctggggtggccacaaaaggatccggcaccgaccagtaggagactgaagtggccacggggtatgagctgtgaccattcccaggtaactcccctggcctgatatccaccctgtccctagagcgcctcacgaagacgtccaggtgtggcccgtgggcacgtttttgcaaccggttcgttgatacctgggccagggatgaggacactgtgctcaagcatcttagggcctctatgaagaaactaacaagaaagcagggggacctgccacccccaggtgggctccagtgccatgtcccctcccatgtcaccctctggggtagtcagtagtaggggagtgcccgggacccgcaaccctactacctgggccttcctcttcaccttttcttcctcctcttcctcctggactctaagaaagtacaggaggcccaccggtcctcagggcaggcgctcagtgcgtgtatactggacatgctgtgcacgcaggagggggatgtgggcaagaccctccaacaagccccctcccactttccacggtgtctccctctccccctcgcagggccctccaagttactagacgagcccagacccatttgtgggagaccccgcccctccctgcaagcacccacagcctcagagagcagcagaggcccctcactcctgcacgctcctccaaggttgccaggacaagaagcctggagccagggagacaagggaatccgtgtccctgacccacagagcattcagggagagggcccagagccagagccaagagttcagccagaagtgggaacggtcagtcctggcatggactgggcagcccaggagggcagagggtgacccacgtccgggcccaatcacccactgcggagacgggtccccacgtgaggtgacaaggggctgggtgacatccaaggcccctcccacctgagttctgactgggggccgtatcccaggcccaacagccctgggacgaaggtgtgtggcaggaagcccccagccagtctgaaccctgggggcagtcccaggagccacccgccatgccacgacagcttccccacgccaggcagcatgcacccctccctctgggatcagcagactacaggcgtgtcctcggtgtcaggccacgggggccacacagggaccccgaggactccgagatgcaggcaggtggggcccagcccggaaaggcctgcgtgggctcactggagatgctgaccgcgtctgttttcctttcagccaaacccgagcaagggtcgtcggcatccaggcctgtgccggcttcacgtggcgggaagaccctctgcaagggggacaggcaggcccctccaggcccaccagcccggttcccgcggcccatttggtcagcttccccgccacgggcacctcgttcttccacaccctgtcctggtggggctgtccgggaagacacctaccctgtgggcactcagggtgtgcccagcccggccctggctcagggaggacctcagggttcctggagattcctgcagtggaactccatgccccgcctcccaacggacctggacgtagagggcccttggttccgccattatgatttcagacagagctgctgggtccgtgccatatcccaggaggaccagctggccccctgctggcaggctgaacaccctgcggagcgggtgagatcggctttcgctgcacccagcactgattccgaccagggcacccccttcagagctagggacgaacagcagtgtgctcccacctcagggccttgcctctgcggcctccacttggaaagttctcagttccctccaggcttctagaagcatctgggccagggctcatggctggataatttccctaggcttaacaacccaagcaagcttcgcatcctcgttttatttttggttaaacttatgaaaatgtattaagaaagagtgcagctcgagagagattcagagatggaacacaccagaccccagatcacaaagccaaccatgcccagcccctcccagcacccccagccccacgaccatcgttttgaattctgacgacaccgtgagcctgcctttgtacttcaaactcatggaaggataaccaccttcatgttttgaaataaatgtttcctgttgaaatga

SEQ ID NO: 1825 - DNA, 9796 bp, Homo sapiens
ggagagatcttgttccctgtaggaaactgggcatcgctgaggccctgagcatcccaggaggccgattgcacagagacctctggtcgctgaccccagtctgcctccacatccctggaatagcccatcatgggcccttcacccttggcaggtggaaaccattcaacctgctggggccggtgtgtccccatttcatggcattgggggacaacaggattctctgtctaggtcccactgtactcaagtccttgggaagatgcccacccctgcttgggacttgagactccagagactggagcagctgtgggccactgggtctggcccctttttccctgggggcggcggtggaatgggggttacgcagccagccagcatctgggagcccggcgagagcggttcaggtgttctccgaagccgccgcgtacagtgtgacctttagacaattctgtctcacaggatggacgtggtagaggtcgcgggtagttggtgggcacaagagcgagaggacatcattatgaaatacgaaaaggtacaagtcggtctgcttcttggagggaggcctcttccagtgtgccctggtcaaagggtcctgggctccctaggagcacagggcagggacgggtggccaatgcccccaggcccttgcaaccctttaccttggacccctcaccaaggctccctctgggctacagggacaccaagctgggctgccagaggacaaggggcctaagccttttcgaagctacaacaacaacgtcgatcatttggggattgtacagtgagtcctctgcactcccctcacccctaaagcacctgtctcagctcagggatgggtttgcttttagaaaggcctttctgacgcaggacatgtctcaccaggtcgggtcaacctcctttccagggacagaactcctccctgactcccctgcaggtccagcccgaggttgttaggccagaggtgtggggcccatctagggagccggtgggaatggagactgggctaggtcaggcccctgggcgctcagcagttctgtcggcaagtgagcacaagaggagcggggcagcctgagggtctggccctgtctacttggagacaaacccggtgagatgcaagggttatggccacagggtgaggggactcctggcccagcctcagggctgttgtccagcaggtctctgagggcccacctgcccctgttctcccccattcccctagagctacagccctcactgtcccgtgaggggaaaaggcatggtgacaatgggggctgtagccctaggagaacggggggaagatgggcagggccccgttctgggcatctcacggtgaggccagggaggcagcagggctcgcggctaaagacctgggtctggtgctgggaagggatctggggccgggtaagaggagcccagccaggagcccatccctcagggatcacaggatggagagacagaggatccctggggaggtagggcgggagggagctgatgagccgtgccacttctgaaacgcagggtgtgtggctcgggtgcagggagaggcaggtggatgctgggaggtcagaatctgcaagggccttggggctgtcaagtggggtgggcccctggtgcagccagagtacaccgggcaggtctcagggcaggctcccttgaccctggtggggggatgtggtcactccctgagggactcctgtcagggcccggtcgcccaccctgggcggcccccatcccatctcagggctaacctttctcagctccagcagaaagcaccacctcgagtccaggacgggcagccccattgcgagctgaccgccccccacgccagggccccagtaaccccggccaggctgtccctacactccttcttctcccaggtcctgcccctcctgggaatcagccccacaggaaggcccttgtcctcccttccctgtgccttctcctgggctgagccctgagctggaaagggacagagccagtcctttctgggggtcggcacccaggctgggccgctccaggccccgtgcagttcctcagctctgcctgggttgccttacagtgagacggagctgcctcctctgactgcgcgggaggcgaaggtaagagcctgatgcgtggaggggctggtccagggacgtagggactgggcgggtggtcagtgaggcagaggaagcagctggcctgagcggtggcgggtgagggcaacacgctgtcactgggaggggcagcagtccctgctggacctgaccccaggttgctgttcactttggcagtttgataaaattccaaaaggagaaccacagtcctggcttgggggtggctgcgcgcttgtgtcaggaccccacctagaggctgggacctaagactggtgtgtctgtggcctgaggatggtacatcccggggtcccaaagccagcccactggtgctcatttgctcaaaggctctcagcccttgaggtctgcccttccctggctccttccagctggctcccaccagggctccagagcccaagacccagcatccgcgggcggctctgggaagcctggcagctccgctaactccaacatgcctcatttgacagcaaattcggcgggagatcagccgaaagagcaagtgggtggatatgctgggagactgggagaaatacaaaagcagcagaaaggtaacgtgtggagggaggaagcactctctgcagagacaggggacaggcacccatggctgtggcctggcaccatcagcctctcagagggtgggcggcacactgtcctcgcccagaggactgcaggcctggtcgccagatttcctgcctattcgtgcaagcgtcaccttgcagggagggaatctgaatctagggctgggactacccggagctcaaggctagggatgccctggggacctgaaggaaggaaaaggttcagatcagagtttcgactctgagtgtccatccactctttcagtcctgggaagggagaccctgtcccagcttgatctcacctctactgaggaatcatggggccaaaaccgacaatttccagaatccccgggctctggtcctcactggggtcaccccgtggcctgtgacaccagatcgttttctgcccacagctcatagatcgagcgtacaagggaatgcccatgaacatccggggcccgatgtggtcagtcctcctgaacattgaggaaatgaagttgaaaaaccccggaagataccaggtacgctcagccagagcacaacaaacaggacaggccgtgtcggggcccaggtctccagctggagggaacgtcaagaccaccctggggagctgggggtgaaggtcagatgaacaccctgggcacagatggtgacacagtcaccacagacaaactcagctctggtgaccctccctggcttcagtaacaagccaaaatgcagctttctgcagaaggaaaccttccttctgtccttccttcccgaagtgctgactgtgggctgactgccactgggggcagggagtcttccatctgttctgagactgcttcctcctcttggccctgccctacagatcatgaaggagaagggcaagaggtcatctgagcacatccagcgcatcgaccgggacataagcgggacattaaggaagcatatgttcttcagggatcgatacggaaccaagtaagcctatgggagccacagggtcccagcagagatggggtgaatgagagggatgggggcttccccggagcagaagccagggtcacccaggagggatgacacagctgccaagagctctcccggcccagggagcagccggcaccatgaaccgagcacctccctggttccaagccctgggccagactggaacatgtggggccagaacccaggaggatcctgaggagatggaaggcagcaaacaaaatcatgcacaatggtgaagggtgctctccctgacccatggggacccatggtaggacccacgggagggtggcaggatagagggcccatgagccccccccaggcaacagtgacagcaccaaatgctgggagaattaggggtcctggaaactctcatccaggtccgctgggaacatgacatggcacagccacgttggcagccagttgggcagtggctcacaaagctcgatggacttgaaccacacatccccaaagtgtcacagatattgaacccactgatttgcaaactgacatccacatgaaaccagcatgccaggttcactgcttgactcctcgtcactcacacacggagccttcggggacggccttcaacacggggatggggagagcaaggctggtcctcccttcaaacggaagacccagtgagaaaagggaacgagccggtgatgcctgcacgaacgtgggtggatcctagatgcattttgctgagggacagaagccagacccaataagctaccacagtaggattcccattcctaggccattctggaaaaggccaaaccacagggactgagaagcagtctgggtggccaggggctgacggatcggggagaggctggttgcataggggccaccctggagacttggaggatgaaggagtcgccccaggaggggctggagcggtggccgggagactctgcacatcggtttggaaccgtggaggaactgtacacccacagactgaactggcgtgtgtgcaaactgaaaaaaaaaatcattcagagtgaaaaggatcaggcaagtcactgtacaactgggctatttgcatgtcacagatgtggattttactgaaacatttcttcaagagtctcaggccctgaagagctcactgcttatctggtgaaacatctgaacctgaaatgggatttgctgttaggctttgtagacaaagtgaaattaacaacatctgcacaaaacaaaccaaagccccctttctctgtttcctaggcagcgggaactactccacatcctcctggcatatgaggagtataacccggtgagtattcccggcagtgaggttcccgggccatatttccatattgacaggagtgggtgtctggtgggggtgtcgttgcttcttttaaagttagtatttgtgacccaccaggatataggaggtaggatgtcagctcaccgctggcataaacctccaaggaagggggtggtctcaaggggtcaagctgagacacaaaggagtcagggcctggactcctggtgtcacctgggcctgaccaccacttctcagaacaagaaatgacgccctcctcctggggctgccccaaagcccaggagcttggcagcatcgcacacaggatggtgctatcagcagacattttggacaaggtgctgaagtgcctgatggacttggctcttgtcatgaaatgaatgtgcatcctgaggaagcctctttttcagaggaagcctctccttcagaggaagcctctccagtcacctctgccctctccaatgacatgagtcctcccaggtgacctcagccctcccaggtgatgtccttccatggtgactctggctcttgcaggaggtgggctactgcagggacctgagccacatcgccgccttgttcctcctctatcttcctgaggaggatgcattctgggcactggtgcagctgctggccagtgagaggcactccctgcagggtaagtgaacagctgccccggggacctcctgcagccagacctggggatggccaccctggccaggtgatcacagctttcagccaaggcaccctccttgtgtcgccagcttgttgggagactttagaatgtctctgctgagggtcccacaggagtccacggctgacccccaaagcccaaatcagacgcctgtcatccccatcagcagagggcatctcatcctccccgtggccaccctctgtgtcctggagccacgccctccggctctgattctgtgcagctgactctcccctccctgagagtcctcctgccctccagctgcccaggctcctgctgccatcggtgcccacgaatgggccgaccaagcccaggtggcagcatctccccatcccctgttccctggcccgaccccactaccaggagatgaccgggaagcccagcgcccacccagttccggccaccctgtcgtggcctgaaagtcaggcttgccctttttgcaccctggcccaggaggcctccaggggaacctccagccaggctccagggaatgttcccgccccacctccccagggtaaaggccgcatgttggggtcaccagatgggagggtgggaggccttggggtttgggggcctctccagctgcccagctcttgcagctgatggctccacatcttgggggaaggctctgatttcatgatgggctgggggcttctcaggatttcacagcccaaatggcgggaccgtccaggggctccaagaccaacaggagcatgtggtagccacgtcacaacccaagaccatggggcatcaggtgagtttatggtcccctcagctcttcccagaggccctgcctcccgtggggctgtaggagcaggggggctggagcctcgtggggctggtgactggctgagtcccagccagggcctgacctgggacgtcgggttctccatgggctgggagttggtttcctttcctgccctggaggagacagaggcacagggatgggggcccagctcccacagagcagggcaaagggcagtgtgtccaccgggagtgtgggaaggtgacagtgttgtggggagctctggacaccgcccagtgttctgcactaggggaagggtcttcagaggccctggaagagggaggtttttagggcagcccagtggcctgagcacctctgttgcttccatcaggacaagaaagatctatgtgggcagtgttccccgttaggctgcctcatccggatattgattgacggggtaaggaggcatagggagaccctggctcagggaccttccttgccctgcagtgccctgcttccccagcccgggggtctggctcactcccagcccacaggaggctcaggcgggtccccaaaggacacacaagcaaaaccctctgcccaaggggggtcatcccagggccatggctggggctcaggcccagcctcatgggcagactgggccaggacccgacttgagagggctcagggaagcctcaagccctgggcaagcccctctctccaggagccacatccccactcaaatgagtgccccccatgaggagcttcaagaccttgtctgacccagcgtcctggagggctcaggcgaccctcatggggaaggtcactgactctggagactgaagccccagtgtgcgcagctcgagccaccagccccagcctggaaggaccaggttctttcacacctgctgtccccacagatctctctcgggctcaccctgcgcctgtgggacgtgtatctggtagaaggcgaacaggcgttgatgccgataacaagaatcgcctttaaggttcagcagagtaagtctacgtgtgcccagcggggcctggggagccctggggtcagaccccgactggcccgagggcagcttcctcacactgtcctcatgatcctctgttctggcccagagggaggtctggccaggtgggctgggcaggacactgtgacaccgagcccatcccccacatgacccagatgaaagtcgagagtgtggtgagcacttccctgtccggatcgccccccagccacagtctcctgtgtatatctggacacctggggtggccacaaaaggatctggcaccgcccagtaggagactgaagtggccacgggatatgagctgtgaccattcccaggtaactcccctggcctgatatccaccctgtccctagagcgcctcacgaagacgtccaggtgtggcccgtgggcacgtttttgcaaccggttcgttgatacctgggccagggatgaggacactgtgctcaagcatcttagggcctctatgaagaaactaacaagaaagcagggggacctgccacccccaggtgggctccagtgccatgtcccctcccatgtcaccctctggggtagtcagtagtaggggagtgcccgggacccgcaaccctactacctgggccttcctcttcaccttttcttcctcctcttcctcctggactctaagaaagtacaggaggcccaccggtcctcagggcaggcgctcagtgcgtgtatactggacatgctgtgcacgcaggagggggatgtgggcaagaccctccaacaagccccctcccactttccacggtgtctccctctccccctcgcagggccctccaagttactagacgagcccagacccatttgtgggagaccccgcccctccctgcaagcacccacagcctcagagagcagcagaggcccctcactcctgcacgctcctccaaggttgccaggacaagaagcctggagccagggagacaagggaatccgtgtccctgacccacagagcattcagggagagggcccagagccagagccaagagttcagccagaagtgggaacggtcagtcctggcatggactgggcagcccaggagggcagagggtgacccacgtccgggcccaatcacccactgcggagacgggtccccacgtgaggtgacaaggggctgggtgacatccaaggcccctcccacctgagttctgactgggggccgtatcccaggcccaacagccctgggacgaaggtgtgtggcaggaagcccccagccagtctgaaccctgggggcagtcccaggagccacccgccatgccacgacagcttccccacgccaggcagcatgcacccctccctctgggatcagcagactacaggcgtgtcctcggtgtcaggccacgggggccacacagggaccccgaggactccgagatgcaggcaggtggggcccagcccggaaaggcctgcgtgggctcactggagatgctgaccgcgtctgttttcctttcagccaaacccgagcaagggtcgtcggcatccaggcctgtgccggcttcacgtggcgggaagaccctctgcaagggggacaggcaggcccctccaggcccaccagcccggttcccgcggcccatttggtcagcttccccgccacgggcacctcgttcttccacaccctgtcctggtggggctgtccgggaagacacctaccctgtgggcactcagggtgtgcccagcccggccctggctcagggaggacctcagggttcctggagattcctgcagtggaactccatgccccgcctcccaacggacctggacgtagaggggccttggttccgccattatgatttcagacagagctgctgggtccgtgccatatcccaggaggaccagctggccccctgctggcaggctgaacaccctgcggagcgggtgtgagatcggctttcgctgcacccagcactgattccgaccagggcacccccttcagagctagggacgaacagcagtgtgctcccacctcagggccttgcctctgcggcctccacttggaaagttctcagttccctccaggcttctagaagcatctgggccagggctcatggctggataatttccctaggcttaacaacccaagcaagcttcgcgtcctcgttttatttttggttaaacttatgaatatgtattaagaaagagtgcagcttgagagacattcagagatggaacacaccagaccccagatcacaaagccaaccatgcccagcccctcccagcaccccaagccccacgaccatcgttctgaattctgacgacaccgtgagcctgcctttgtactttaaactcatggaaggataactaccttcacgttttgaaataaatgtttcctgttgaaatg

SEQ ID NO: 1826 - DNA, 9404 bp, Homo sapiens
acagtgtgacctttagacaattctgtctcacaggatggacgtggtagaggtcgcgggcagttggtgggcacaagagcgagaggacatcattatgaaatacgaaaaggtacaagtcggtctgcttcttggagggaggcctcttccagtgtgccctggtcaaagggtcctgggctccctaggagcacagggcagggacgggtggccaatgcccccaggcccttgcaccctttaccttggacccctcaccaaggctccctctgggctacagggacaccgagctgggctgccagaggacaaggggcctaagccttttcgaagctacaacaacaacgtcgatcatttggggattgtacagtgagtcctctgcactcccctcacccctaaagcacctgtctcagctcagggatgggtttgcttttagaaaggcctttctgacgcaggacatgtctcaccaggtcgggtcaacctcctttccagggacagaactcctccctgactcccctgcaggtccagcccgaggttgttaggccagaggtgtggggcccatctagggagccggtgggaatggagactgggctaggtcaggcccctgggcgctcagcagttctgtcggcaagtgagcacaagaggagcggggcagcctgagggtctggccctgtctacttggagacaaccccggtgagatgcaagggttatggccacagggtgaggggacgcctggcccagcctcagggctgttgtccagcaggtctctgagggcccacctgcccctgttctcccccattcccctagagctacagccctcactgtcccgtgaggggaaaaggcatggtgacaatgggggctgtagccctaggagaacgggggagaagatgggcagggccccgttctgggcatctcacggtgaggccagggaggcagcagggctcgcggctaaagacctgggtctggtgctgggaagggatctggggccgggtaagaggagcccagccaggagcccatccctcagggatcacaggatggagagacagaggatccctggggaggtagggcgggagggagctgacgagccgtgccacttctgaaacgcagggtgtgtggcccgggtgcagggagaggcaggtggatgctgggaggtcataacctgcaagggccttggggctgtcaagtggggtgggcccctggtgcagccagagtacaccgggcaggtctcatggcaggctcccttgaccctggcggggggatgtggtcactccctgagggactcctgtcagggcccggtcgcccaccctgggcggcccccatcccatctcaggctaacctttctcagctccagcagaaagcaccacctcgagtccaggacgggcagccccattgggcagcctgaccgccccccacgccaggggccccagtaaccccggccaggctgtccctacactccttcttctcccaggtcctgcccctcctgggagtcagccccacaggaaggcccttgtcctcccttccctgtgccttctcctgggctgagccctgagctggaaagggacagagccagtcctttctgggggtcggcacccaggctggggccgctccaggccccgtgcagttcctcagctctgcctgggttgccttacagtgagacggagctgcctcctctgactgcgcgggaggcgaaggtaagagcctgatgcgtggaggggctggtccagggacgtagggactgggcgggtggtcagtgaggcagaggaagcagctggcctgagcggtggcgggtgagggcaacacgctgtcactgggaggggcagcagtccctgctggacctgaccccaggttgctgttcactttggcagtttgataaaattccaaaaggagaaccacagtcctggcttgggggtggctgcgcgcttgtgtcaggaccccacctagaggctgggacctaagactggtgtgtctgtggcctgaggatggtacatcccggggtcccaaagccagcccactggtgctcatttgctcaaaggctctcagcccttgaggtctgcccttccctggctccttccagctggctcccaccagggctccagagcccaagacccagcatccgcgggcggctctgggaagcctggcagctccgctaactccaacatgcctcatttgacagcaaattcggcgggagatcagccgaaagagcaagtgggtggatatgctgggagactgggagaaatacaaaagcagcagaaaggtaacgtgtggagggaggaagcactctctgcagagacaggggacaggcacccatggctgtggcctggcaccatcagcctctcagagggtgggcggcacactgtcctcgcccagaggactgcaggcctggtcaccagatttcctgcctattcgtgcaagcgtcaccttgcagggagggaatctgaatctagggctgggactacccggagctcaaggctagggatgccctggtgacctgaaggaaggaaaaggttcagatcagagtttcgactctgagtgtccatccactctttcagtcctgggaagggagaccctgtcccagcttgatctcacctctactgaggaatcatggggccaaaaccgacaatttccagaatccccgggctctggtcctcactggggtcaccccgtggcctgtgacaccagatcgttttctgcccacagctcatagatcgagcgtacaagggaatgcccatgaacatccggggcccgatgtggtcagtcctcctgaacactgaggaaatgaagttgaaaaaccccggaagataccaggtacgctcagccagagcacaacaaacaggacaggccgtgtcggggcccaggtctccagctggagggaacgtcaagaccaccctggggagctgggggtgaaggtcagatgaacaccctgggcacagatggtgacacagtcaccacagacaaactcagctctggtgaccctccctggcttcagtaacaagccaaaatgcagctttctgcagaaggaaaccttccttctgtccttccttcccgaagtgctgactgtgggctgactgccactgggggcagggagtcttccatctgttctgagactgcttcctcctcttggccctgccctacagatcatgaaggagaagggcaagaggtcatctgagcacatccagcgcatcgaccgggacgtaagcgggacattaaggaagcatatattcttcagggatcgatacggaaccaagtaagcctacgggagccacagggtcccagcagagatggggtgaatgagagggatgggggcttccccggagcagaagccagggtcacccaggagggatgacacagctgccaagagctctcccggcccagggagcagccggcaccatgaaccgagcacctccctggttccaagccctgggccagactggaacatgtggggccagaacccaggaggatcctgaggagatggaaggcagcaaacaaaatcatgcacaatggtgaagggtgctctccctgacccatggggacccatggtaggacccacgggagggtggcaggatagagggcccatgagcccccgccaggcaacagtgacagcaccaaatgctgggagaattaggggtcctggaaactctcatccaggtccgctgggaacatgacatggcacagccacgttggcagcccgttgggcagtggctcacaaagctcgatggacttgaaccacacatccccaaagtgtcacagatattgaacccactgatttgcaaactgacatccacatgaaaccagcatgccaggttcactgcttgactcctcgtcactcacacacggagccttcggggacggccttcaacacggggatggggagagcaaggctggtcctcccttcaaacggaagacccagtgagaaaagggaacgagccggtgatgcccgcacgaacgtgggtggatcctagatgcattttgctgagggacagaagccagacccaataagctaccaccgtaggattcccattcctaggccattctggaaaaggccaaaccacagggactgagaagcagtctgggtggccaggggctgacggatcggggagaggctgggtgcataggggccaccctggagacttggaggatgaaggagtcgccccaggaggggctggagcggtggccgggagactctgcacatcggtttggaaccgtggaggaactgtacacccacagactgaactggcgtgtgtgcaaactgaaaaaaaaaaaaaaatcattcagagtgaaaaggatcaggcaagtcactgtacaactgggctatttgcatgtcacagatgtggattttactgaaacatttcttcaagagtctcaggccctgaagagctcactgcttatctggtgaaacatctgaacctgaaatgggatttgctgttaggctttgtagacaaagtgaaattaacaacatctgcacaaaacaaaccaaagccccctttctctgtttcctaggcagcgggaactactccacatcctcctggcatatgaggagtataacccggtgagtattcccggcagtgaggttcccgggccatatttccatattgacaggagtgggtgtctggtgggggtgtcgttgcttcttttaaagttagtatttgtgacccaccaggatataggaggtaggatgtcagctcaccgctggcataaacctccaaggaagggggtggtctcaaggggtcaagctgagacacaaaggagtcagggcctggactcctggtgtcacctgggcctgaccaccacttctcagaacaagaaatgacgccctcctcctggggctgccccaaagcccaggagcttggcagcatcgcacacaggatggtgctatcagcagacattttggacaaggtgctgaagtgcctgatggacttggctcttgtcatgaaatgaatgtgcatcctgaggaagcctctttttcagaggaagcctctccttcagaggaagcctctccagtcacctctgccctctccaatgacatgagtcctcccaggtgacctcagccctcccaggtgatgtccttccatggtgactctggctcttgcaggaggtgggctactgcagggacctgagccacatcgccgccttgttcctcctctatcttcctgaggaggatgcattctgggcactggtgcagctgctggccagtgagaggcactccctgcagggtaagtgaacagctgccccggggacctcctgcagccagacctggggatggccaccctggccaggtgatcacagctttcagccaaggcaccctccttgtgtcgccagcttgttgggagactttaggatgtctctgctgagggtcccacaggagtccacggctgacccccaaagcccaaatcagacgcctctcatccccatcagcagagggcatctcatcctccccgtggccaccctctgtgtcctggagccacgccctccggctctgattctgtgcagctgactctcccctccctgagagtcctcctgccctccagctgcccgggctcctgctgccatcggtgcccacgaacgggccgaccaagcccaggtggcagcatctccccatcccctgttccctggcccgaccccactaccaggagatgaccgggaagcccagcgcccacccagttccggccaccctgtcgtggcctgaaagtcaggcttgccctttttgcaccctggcccaggaggcctccaggggaacctccagccaggctccagggaatgttcccgccccacctccccagggtaaaggccgcatgttggggtcaccagatgggagggtgggaggccttggggtttgggggcctctccagctgcccagctcttgcagctgatggctccacatcttgggggaaggctctgatttcatgatgggctgggggcttctcaggatttcacagcccaaatggcgggaccgtccaggggctccaagaccaacaggagcatgtggtagccacgtcacaacccaagaccatggggcatcaggtgagtttatggtcccctcagctcttcccagaggccctgcctcccgtggggctgtaggagcaggggggctggagcccctcgtggggctggtgactggctgagtcccagccagggcctgacctgggacgtcgggttctccatgggctgggagttggtttcctttcctgccctggaggagacagaggcacagggatgggggcccagctcccgcagagcagggcaaagggcagtgtgtccaccgggagtgtgggaaggtgacagtgttgtggggagctctggacaccgcccagtgttctgcactaggggaagggtcttcagaggccctggaagagggaggtttttagggcagcccagtggcctgagcacctctgttgcttccatcaggacaagaaagatctatgtgggcagtgttccccgttaggctgcctcatccggatattgattgacggggtaaggaggcatagggagaccctggctcagggaccttccttgccctgcagtgccctgcttccccagcccgggggtctggctcactcccagcccacaggaggctcaggcgggtccccaaaggacacacaagcaaaaccctctgcccaaggggggtcatcccagggccatggctggggctcaggcccagcctcatgggcagactgggccaggacccgacttgagagggctcagggaagcctcaagccctgggcaagcccctctctccaggagccacatccccactcaaatgagtgccccccatgaggagcttcaagaccttgtctgacccagcgtcctggagggctcaggcgaccctcatggggaaggtcactgactctggagactgaagccccagtgtgcgcagctcgagccaccagccccagcctggaaggaccaggttctttcacacctgctgtccccacagatctctctcgggctcaccctgcgcctgtgggacgtgtatctggtagaaggcgaacaggcgttgatgccgataacaagaatcgcctttaaggttcagcagagtaagtctacgtgtgcccagcggggcctggggagccctggggtcagaccccgactggcccgagggcagcttcctcacactgtcctcatgatcctctgttctggcccagagggaggtctggccaggtgggctgggcaggacactgtgacaccgagcccatcccccacatgacccagatgaaagtcgagagtgtggtgagcacttccctgtccggatcgccccccagccacagtctcctgtatatatctggacacctggggtggccacaaaaggatccggcaccgcccagtaggagaatgaagtggccacggggtatgagctgtgaccattcccaggtaactcccctggcctgatatccaccctgtccatagagcgcctcacgaagacgtccaggtgtggcccgtgggcacgtttttgcaaccggttcgttgatacatgggccagggatgaggacactgtgctcaagcatcttagggcctctatgaagaaactaacaagaaagcagggggacctgccacccccaggtgggctccagtgccatgtcccctcccatgtcaccctctggggtagtcagtagtaggggagtgcccgggacccgcaaccctactacctgggccttcctcttcaccttttcttcctcctcttcctcctggactctaagaaagtacaggaggcccaccggtcctcagggcaggcgctcagtgcgtgtatactggacatgctgtgcacgcaggagggggatgtgggcaagaccctccaacaagccccctcccactttccacggtgtctccctctccccctcgcagggccctccaagttactagacgagcccagacccatttgtgggagaccccgcccctccctgcaagcacccacagcctcagagagcagcagaggcccctcactcctgcacgctcctccaaggttgccaggacaagaagcctggagccagggagacaagggaatccgtgtccctgacccacagagcattcagggagagggcacaggcgggaccccgggcccagagccagagccaagagttcagccagaagtgggaacggtcagtcctggcatggactgggcagcccaggagggcagagggtgacccacgtccgggcccaatcacccactgcggagacgggtccccacgtgaggtgacaaggggctgggtgacatccaaggcccctcccacctgagttctgactgggggccgtatcccaggcccaacagccctgggacgaaggtgtgtggcaggaagcccccagccagtctgaaccctgggggcagtcccaggagccacccgccatgccacgacagcttccccacgccaggcagcacgcacccctccctctgggatcagcagactacaggcgtgtcctcggtgtcaggccacgggggccacacagagaccccgaggactccagagacgcaggcaggtggggcccagcccggaaaggcctgcgtgggctcactggagatgctgaccgcgtctgttttcctttcagccaaacccgagcaagggtcgtcggcatccaggcctgtgccggcttcacgtggcgggaagaccctctgcaagggggacaggcaggcccctccaggcccaccagcccggttcccgcggcccatttggtcagcttccccgccacgggcacctcgttcttccacaccctgtcctggtggggctgtccgggaagacacctaccctgtgggcactcagggtgtgcccagcccggccctggctcagggaggacctcagggttcctggagattcctgcagtggaactccatgccccgcctcccaacggacctggacgtagagggcccttggttccgccattatgatttcagacagagctgctgggtccgtgccatatcccaggaggaccagctggccccctgctggcaggctgaacaccctgcggagcgggtgagatcggctttcgctgcacccagcactgattccgaccagggcacccccttcagagctagggacgaacagccgtgtgctcccacctcagggccttgcctctgcggcctccacttggaaagttctcagttccctccaggcttctagaagcatctgggccagggctcatggctggataatttccctaggcttaacaacccaagcaagcttcgcatcctcgttttatttttggttaaacttatgaaaatgtattaagaaagagtgcagctcgagagagattcagagatggaacacaccagaccccagatcacaaagccaaccatgcccagcccctcccagcacccccagccccacgaccatcgttctgaattctgacgacaccgtgagcctgcctttgtacttcaaactcatggaaggataaccaccttcatgttttgaaataaatgtttcctgttgaaatga

SEQ ID NO: 1827 - DNA, 9831 bp, Homo sapiens
ggagagatcttgttccctgtaggaaactgggcatctctgaggccctgagcatcccaggaggccgattgtacagagacctctggtcgctgaccccagtctgcctccacatccctggaatagcccatcatgggcccttcacccttggcaggtggaaaccattcaacctgctggggccggtgtgtccccatttcatggcactgggggacaacaggattctctgtctaggtcccactgtactcaagtccttgggaagatgcccacccctgcttgggacttgagactccagagactcgagcagctgtgggccactgggtctggcccctttttccctgggggcggcggtggaatgggggttacgcagccagccagcatctgggagcccggcgagagcggttcaggtgttctccgaagccgccgcgtacagtgtaacctttagacaattttgtctcacaggatggacgtggtagaggtcgcgggtagttggtgggcacaagagcgagaggacatcattatgaaatacgaaaaggtacaagtcggtctgcttcttggagggaggcctcttccagtgtgccctggtcaaagggtcctgggctccctaggagcacagggcagggacgggtggccaatgcccccaggcccttgcaccctttaccttggacccctcaccaaggctccctctgggctacagggacaccgagctgggctgccagaggacaaggggcctaagtcttttggaagctacaacaacaacgtcgatcatttggggattgtacagtgagtcctctgcactcccctcacccctaaagcacctgtctcagctcagggatgggtttgcttttagaaaggcctttctgatgcaggacatgtctcaccaggtcgggtcaacctcctttccagggacagaactcctccctgactcccctgcaggtccagcccgaggttgttgttaggccagaggtgtggggcccatctagggagctggtgggaatggagactgggctaggtcaggcccctgggcgctcagcagttctgtcggcaagtgagcacaagaggagctgggcagcctgagggtctggccctgtctacttggagacaaccccggtgagatgcaagggttatggccacagggtgaggggacgcctggcccggcctcagggctgttgtccagcaggtctctgagggcccacctgcccctgttctcccccatgcccctagagctatggccctcactgtcccgtgaggggaaaaggcatggtgacaatgggggctgtagccctaggagaacggggggaagatgggcagggccccgttctgggcatctcacggtgaggccggggaggcagcagggctcgcggctaaagacctgggtctggtgctgggaagggatctggggccgggtaagaggagcccagccaggagcccatccctcagggatcacaggatggagagacagaggatcccaggggaggtagggcgggagggagctgatgagccgtgccacttctgaaacgcagggtgtgtggctcgggtgcagggagaggcaggtggatgctgggaggtcagaacctgcaagggccttggggctgtcaagtgggatgggcccctggtgcacccagagtacacggggcaggtctcagggcaggctcccttgaccctggcggggtgatgtggtcactccctgagggactcctgtcagggcccggtcacccaccctgggcggcccccatcccatctcagggctaacctttctcagctccagcagaaagcaccacctcgagtccaggacgggcagccccactgggcagcctgaccgccccccacgccaggggccccagtaaccccggccaggctgtccctacactccttcttctcccaggtcctgcccctcctgggagtcagccccacaggaaggcccttgtcctcccttccctgtgccttctcctgggctgagccctgagctggaaagggacagagccagtcctttctgggggccggcacccaggctggggccgctccaggccccgtgcagttcctcagctctgcctgggttgccttacagtgagacggagctgcctcctctgactgcgcgggaggtgaaggtaagagcctgatgcatggaggggctggtccagggacgtagggactgggcgggtggtcagtgaggcagaggaagcagctggcctgagcggtggcgggtgagggcaacgcgctgtcactgggaggggcagcagtccctgctggacctgaccccaggttgctgttaactttggcagtttgataaaattccaaaaggagaaccacagtcctggcttgggggtggctgcgcgcttgtgtcaggatcccacctagaggctgggacctaagactggtgtggctgtggcctgaggatggtacatcccggggtcccaaagccagcccactggtgctcatttgctcaaaggctctcagcccttgaggtctgcccttccctggctccttccagctggctcccaccagggctccagagcccaagacccagcatccgcgggcggctctgggaagcctggcagctccgctaactccaacatgcctcatttgacagcaaattcggcgggagatcagccgaaagagcaagtgggtgaaaatgctgggagaatgggacacctacaaaaacagcagaaaggtaatgtgtggagggaggaagcactctctgcagagacaggggacaggcacccatggctgtggcctggcgccgtcagcctctcagagggtgggtggcacgctgtcctcgcccagaggactgcaggcctggtcgccagatttcctgcctattcgtgcaagcgtcaccttgctgggagggaatctgaatctagggctgggactacccggagctcaaggctagggatgccctggtgacctgaaggaaggaaaaggttcagatcagagtttcgactctgagtgtccatccactctttcagtcctgggaagggagaccctgtcccagcttgatctcacctctactgaggaatcatggggccaaaaccaacaatttccagaatccccgggctctggtcctcactggggtcaccccgtggcctgcgacaccagattgttttctgcccacagctcatagatcgagcgtaccagggaattcccatgaacatccggggcccgatgtggtcagtcctcctgaacattgaggaaatcaagttgaaaaaccccggaagataccaggtacgctcagccagagcacaaccaacaggacaggccgtgtcaggggcccaggtctccagctggagggaacgtcaagaccaccctggggagctgggggtgaaggtcagatgaacaccctgggcacagatggtgacacagtcaccacagacaaactcagctctggtgaccctccctggcttcagtaacaagccaaaatgcagctttctgcagaaggaaaccttccttctgtccttccttcccgaagtgctgactgtgggctgactgccactgggggcagggagtcttccatctgttctgagactgcttcctcctcttggccctgccctacagatcatgaaggagaagggcaagaggtcatctgaacacatccagcagatggacctggacgtaagcgggacattaaggaggcatatattcttcagggatcgatacggaaccaagtaagccacagggtcccagcagagatggggtgaatgagagggatgggggcttccccggagcagaagccagggtcacccaggagggatgacacagctgccaagagctctcctggcccagggagcagccggcaccatgaaccgagcacctccctggttccaagccctgggccagactggaacatgtggggccagaacccaggaggatcctgaggagatggaaggcagcaaacaaaatcatgcacaatggtgaaaggtgctctccctgacccatggggacccatggtaggagccacgggagggtggcaggatagagggcaccaaatgctgggagaattaggggtcctggaaactctcatccaggtctgctgggaacatgacatggcacagccacgttggcagccagttgggcagtggctcacaaagctcgatggacttgaaccacgcatccccaaagtgtcacagagattgaacccactgatttggaaactgacatccacatgaaacctgcatgccaggttcactgcttgactcctcgtcactcacacacggagccttcggggacggccttcaacacgggaatggggagagcaaggctggtcctcccttcaaacggaagacccagtgagaaaagggaacgagccagtgatgcccgcacgaacgtgggtggatcctagatgcattttgctgagggacagaagccagacccaataagctaccacagtaggattcccattcctaggccattctggaaaaggccaaaccacagggactgagaagcagtctgggtggccaggggctgacggatcggggagaggctgggtgcataggggccaccctggagacttggaggatgaaggagtcgccccaggaggggctggagcggtggccgggagactctgcacattggtttggaaccgtggaggaactgtacacccacagactgaactggggtgtgtgcaaactgaaaaaaaaaaaaaaaatcattcagagtgaaaaggatcaggcactgtacaactgggctatttgcatgtcacagatgtggattttactgaaacatttcttcaagagtctcaggccctgaagagctcactgcttatccggtgaatcatctgaacctgaaatgggatttgctgttaggctttgtagacaaagtgaaattaacaacatctgcacaaaacaaaccaaagccccctttctctgtttcctaggcagcgggaactactttacatcctcctggcgtatgaggagtataacccggtgagtattcccggcagtgaggttcccgggccatatttccatattcacaggagtgggtgtctggtgggggtgtcgttgcttcttttaaaattagtatttgtgacccaccaggatataggaagtaggatgtcagctcactgctggcataaacctccaaggaagggggtggtctcaaggggtcaagctgatacacaaaggagtcagggcctggactcctggtgtcacctgggcctgaccaccacttctcagaacaagaaatgacgccgtcctcctggggctgccccaaagcccaggagcttggcagcatcgcacacaggatggtgctatcagcagacattttggacaaggtgctgaagtgcctgatggacttggctcttgtcatgaaatgaatgtgcatcctgaggaagcctctttttcagaggaagcctctccttcagaggaagcctctccagtcacctctgccctctccaatgacatgagtcctcccaggtgagctcagccctcccagctgatgtccttccatggtgactctggctcttgcaggaggtgggctactgcagggacctgagccacatcgccgccttgttcctcctttatcttcctgaggaggatgcattctgggcactggtgcagctgctggccagtgagaggcactccctgcagggtaagtgaacagctgccccggggacctcctgcagccagacctggggatggccaccctggccaggtgatcacagctttcagccaaggcaccctccttgtgtcaccagcttgttgggagactttaggatgtctctgctgagggtcccacaggagtccacggctgacccccaaagcccaaatcagacgcctctcatccccatcagcagagggcatctcatcctccccgtggccaccctctgtgtcctggagccacgccctccggctctgattctgtgcagctgactctccccctccctgagagtcctcctgccctccagctgcccgggctcctgctgccatcggtgcccacgaatgggccgaccaagcccaggtggcagcatctccccatcccctgttccctggcccgaccccactaccaggagatgaccaggaagcccagcacccacccagttccagccgccctgtggtggcctgaaagtcaggcttgccctttttgcaccctggcccaggaggcctccaggggaacctccagccaggctccagggactgttcccgccccacctccccagggtaaaggccgcatgttggggtcaccagatgggagggtgggaggccttggggtttgggggcctctccagctgcccagctcttgcagctgatggctccacatcttgggggaaggctctgatttcacgatgggctgggggcttctcaggatttcacagcccaaatggcgggaccgtccaggggctccaagaccaacaggagcatgtggtagccacgtcactacccaacaccatgtggcatcaggtgagtttatggtcccctcagctcttcccagaggccctgcctcccgtggggctgtaggagcaggggggctggagcccctcgtggggctggtgactggctgagtcccagccagggcctgacctgggacgtcgggttctccatgggctgggagttggtttcctttcctgccctggaggagacagaggcacagggatgggggcccagctcccgcagagcagggcaaagggcagcgtgtccaccgggagtgtgggaaggtgacagtgttgtggggagctctggacaccgcccagtgttctgcactaggggaagggtcttcagaggccctggaagagggaggtttttagggcagcccagtggcctgagcacctctgttgcttccatcaggacaagaaagatctatgtgggcagtgttcgtccttaggctgcctcatccggatattgattgacggggtaaggaggcatagggagaccctggctcagggaccctccttgccctgcagtgccctgcttccccagcccgggggtctggctcactcccagcccacaggaggctcaggcgggtccccaaaggacacacaagcaaaaccctctgcccaagaggggtcatcccagggcaatggctggggctcaggcccagcctcatgggcagactgggccaggacccgacttgagagggctcagggaagcctcaagccctgggcaagcccctctctccaggagccacatccccactcaaatgagtgcctcccatgaggagcttcaagaccttgtctgacccagcgtcctggagggctcaggcgaccctcatggggaaggaaggtcactgactcaggagactgaagccccagtgtgcgcagctcgagccaccagccccagcctggaaggaccaggttctttcacacctgctgtccccacagatctctctcgggctcaccctgcgcctgtgggacgtgtatctggtagaaggcgaacaggcgttgatgccgataacaagaatcgcctttaaggttcagtagagtaagtctacgtgtgcccagcggggcctggggagccctggggtcagaccccgactggcccgagggcagcttcctcacactgtcctcatgatcctctgttctggcccagagggaggtctggccaggtgggctgggcaggacactgtgacaccgagcccattccccacatgacccagatgaaagtcgagagtgtggtgagcacttccctgtccagatcaccccccagccacagtctcctgtgtatatctggacgcctggggtggccacaaaaggatccggcaccgcccagtgggagactgaagtggccacggggtatgagctgtgaccattcccaggtaactcccctggcctgatatccaccctgtccctagagcgcctcacgaagacgtccaggtgtggcccgtgggcacgtttttggaaccggttcgttgatgcctgggccagggatgatgacactgtgctcaagcatcttagggcctctatgaagaaactaacaagaaagcagggggacctgccacccccaggtgggctccagtgccatgtcccctcccatgtcaccctctggggtagtcaatagtaggggagtgcccgggacccgcaaccctactacctgggccttcctcttcaccttttcttcctcctcttcctcctggactctaagaaagtacaggaggcccaccggtcctcagggcaggcgctcagtgcgtgtatactggacatgctgtgcacgcaggagggggatgtgggcgagaccctccaacaagccccctcccactttctgcggtgtctccctctccccctcgcagggccctccaagttactagccgagcccagacccatttgtgggagaccccgcccctccctgcaagcacccacagcctcagagagcagcagaggcccctcactcctgcacgctcctccaagcttgccaggacaacgagcctggagccagggagacaagggaatcggtgtccctgacccacggagctttcagggagagggcgcaggcgggaccccgggcccagggccagagccaagagttcagccagaagtgggaacggtcagtcctggcatggactgggcagcccaggagggcagagggtgacccacgtccgggcccaatcacccactgcggagaggggtccccacctgaggtggcaaggggctgggtgacatccaaggcccctcccacctgagttctgactgggggccgtatcccaggcccaacagccctgggacgaaggtgtgtggcaggaagccgccagccagtctgaaccctgggggcagtcccaggagccacccgccatgccacgacagcttccccacgccaggcagcacgcacccctccctctgggatcagcagactacaggcgtgtcctcagtgtcaggccacgggggccacacagagaccccgaggactccagagacgcaggcaggtggggcccagcccggaaaggcctgcgtgggctcactggagatgctgaccgcgtctgttttcctttcagccaaacccgagcaagggtcgtcggcatccaggcctgtgccagcttcacgtggcgggaagaccctctgcaagggggacaggcaggcccctccaggcccaccagcccggttcccatggcccatttggtcagcttccccgccacgggcacctcgttcttccacaccctgtcctggtggggctgtccgggaagacacctaccctgtgggcactcagggtgtgcccagcccggccctggctcagggaggacctcagggttcctggagattcctgcagtggaactccatgccccgcctcccaacggacctggacgtaggggacccttggttccgccgttatgatttcagacagagctgctgggtccgtgccatatcccaggaggaccagccggccacctgctggcaggctgaacaccctgcggagcgggtgagatcggctttcactgcactgagccacaacgtgggcatggacttcccggccctgcagtgcgcccagcactgattccgaccagggcacccccttcagagctagggacgaacagcagtgtgctcccacctcaggaccttgcctctgcggcctccacttggaaagttctcagttccctccaggcttctagaagcatctgggccagggctcatggctggataatttccctaggcttaacaacccaagcaagcttcgcctcctcgttttattttttgttaaacttatgagaatgtgttaagaaagagtgcagctcgagagacattcagagatggaacacaccagaccccagatcacaaagccaaccatgcccagcccctcccaacacccccagccccacgaccatcgttctgaattctgacgacgccgtgagcctgcctttgtactttaaactcatggaaggataaccaccttcacgttttgaaataaatgtttcctgttgaaatga

SEQ ID NO: 1828 - DNA, 3979 bp, Homo sapiens
cgccgccttgttcctcctctatcttcctgaggaggatgcattctgggcactggtgcagctgctggccagtgagaggcactccctgcagggtaagtgaacagctgccccggggacctcctgcagccagacctggggatggccaccctggccaggtgatcacagctttcagccaaggcaccctccttgtgtcgccagcttgttgggagactttaggatgtctctgctgagggtcccacaggagtccacggctgacccccaaagcccaaatcagacgcctgtcatccccatcagcagagggcatctcatcctccccgtggccaccctctgtgtcctggagccacgccctccggctctgattctgtgcagctgactctcccctccctgagagtcctcctgccctccagctgcccgggcccctgctgccatcggtgcccacgaatgggccgaccaagcccaggtggcagcatctccccatcccctgttccctggcccgaccccactaccaggagatgaccgggaagcccagcgcccacccagttccggccaccctgtcgtggcctgaaagtcaggcttgccctttttgcaccctggcccaggaggcctccaggggaacctccagccaggctccagggaatgttcccgccccacctccccagggtaaaggccgcatgttggggtcaccagatgggagggtgggaggccttggggtttgggggcctctccagctgcccagctcttgcagctgatggctccacatcttgggggaaggctctgatttcatgatgggctgggggcttctcaggatttcacagcccaaatggcgggaccgtccaggggctccaagaccaacaggagcatgtggtagccacgtcacaacccaagaccatggggcatcaggtgagtttatggtcccctcagctcttcccagaggccctgcctcccgtggggctgtaggagcaggggggctggagcccctcgtggggctggtgactggctgagtcccagccagggcctgacctgggacgtcgggttctccatgggctgggagttggtttcctttcctgccctggaggagacagaggcacagggatgggggcccagctcccgcagagcagggcaaagggcagtgtgtccaccgggagtgtgggaaggtgacagtgttgtggggagctctggacaccgcccagtgttctgcactaggggaagggtcttcagaggccctggaagagggaggtttttagggcagcccagtggcctgagcacctctgttgcttccatcaggacaagaaagatctatgtgggcagtgttccccgttaggctgcctcatccggatattgattgacggggtaaggaggcatagggagaccctggctcagggatcttccttgccctgcagtgccctgcttccccagcccgggggtctggctcactcccagcccacaggaggctcaggcgggtccccaaaggacacacaagcaaaaccctctgcccaaggggggtcatcccagggccatggctggggctcaggcccagcctcatgggcagactgggccaggacccgacttgagagggctcagggaagcctcaagccctgggcaagcccctctctccaggagccacatccccactcaaatgagtgccccccatgaggagcttcaagaccttgtctgacccagcgtcctggagggctcaggcgaccctcatggggaaggtcactgactctggagactgaagccccagtgtgcgcagctcgagccaccagccccagcctggaaggaccaggttctttcacacctgctgtccccacagatctctctcgggctcaccctgcgcctgtgggacgtgtatctggtagaaggcgaacaggcgttgatgccgataacaagaatcgcctttaaggttcagcagagtaagtctacgtgtgcccagcggggcctggggagccctggggtcagaccccgactggcccgagggcagcttcctcacactgtcctcatgatcctctgttctggcccagagggaggtctggccaggtgggctgggcaggacactgtgacaccgagcccatcccccacatgacccagatgaaagtcgagagtgtggtgagcacttccctgtccggatcgccccccagccacagtctcctgtgtgtatctggacacctggggtggccacaaaaggatccggcaccgcccagtaggagactgaagtggccacggggtatgagctgtgaccattcccaggtaactcccctggcctgatatccaccctgtccctagagcgcctcacgaagacgtccaggtgtggcccgtgggcacgtttttgcaaccggttcgttgatacctgggccagggatgaggacactgtgctcaagcatcttagggcctctatgaagaaactaacaagaaagcagggggacctgccacccccaggtgggctccagtgccatgtcccctcccatgtcaccctctggggtagtcagtagtaggggagtgcccgggacccgcaaccctactacctgggccttcctcttcaccttttcttcctcctcttcctcctggactctaagaaagtacaggaggcccaccggtcctcagggcaggcgctcagtgcgtgtatactggacatgctgtgcacgcaggagggggatgtgggcaagaccctccaacaagccccctcccactttccacggtgtctccctctccccctcgcagggccctccaagttactagacgagcccagacccatttgtgggagaccccgcccctccctgcaagcacccacagcctcagagagcagcagaggcccctcactcctgcacgctcctccaaggttgccaggacaagaagcctggagccagggagacaagggaatccgtgtccctgacccacagagcattcagggagagggcacaggcgggaccccgggcccagagccagagccaagagttcagccagaagtgggaacggtcagtcctggcatggactgggcagcccaggagggcagagggtgacccacgtccgggcccaatcacccactgcggagacgggtccccacgtgaggtgacaaggggctgggtgacatccaaggcccctcccacctgagttctgactgggggccgtatcccaggcccaacagccctgggacgaaggtgtgtggcaggaagcccccagccagtctgaaccctgggggcagtcccaggagccacccgccatgccacgacagcttccccacgccaggcagcacgcacccctccctctgggatcagcagactacaggcgtgtcctcggtgtcaggccacgggggccacacagagaccccgaggactccagagacgcaggcaggtggggcccagcccggaaaggcctgcgtgggctcactggagatgctgaccgcgtctgttttcctttcagccaaacccgagcaagggtcgtcggcatccaggcctgtgccggcttcacgtggcgggaagaccctctgcaagggggacaggcaggcccctccaggcccaccagcccggttcccgcggcccatttggtcagcttccccgccacgggcacctcgttcttccacaccctgtcctggtggggctgtccgggaagacacctaccctgtgggcactcagggtgtgcccagcccggccctggctcagggaggacctcagggttcctggagattcctgcagtggaactccatgccccgcctcccaacggacctggacgtagagggcccttggttccgccattatgatttcagacagagctgctgggtccgtgccatatcccaggaggaccagctggccccctgctggcaggctgaacaccctgcggagcgggtgagatcggctttcgctgcacccagcactgattccgaccagggcacccccttcagagctagggacgaacagcagtgtgctcccacctcagggccttgcctctgcggcctccacttggaaagttctcagttccctccaggctt

SEQ ID NO: 1829 - DNA, 9804 bp, Homo sapiens
ggagagatcttgttccctgtaggaaactgggcatcgctgaggccctgagcatcccaggaggccgattgcacagagacctctggtcgctgaccccagtctgcctccacatccctggaatagcccatcatgggcccttcacccttggcaggtggaaaccattcaacctgctggggccggtgtgtccccatttcatggcattgggggacaacaggattctctgtctaggtcccactgtactcaagtccttgggaagatgcccacccctgcttgggacttgagactccagagactggagcagctgtgggccactgggtctggcccctttttccctgggggcggcggtggaatgggggttacgcagccagccagcatctgggagcccggcgagagcggttcaggtgttctccgaagccgccgcgtacagtgtgacctttagacaattctgtctcacaggatggacgtggtagaggtcgcgggtagttggtgggcacaagagcgagaggacatcattatgaaatacgaaaaggtacaagtcggtctgcttcttggagggaggcctcttccagtgtgccctggtcaaagggtcctgggctccctaggagcacagggcagggacgggtggccaatgcccccaggcccttgcaaccctttaccttggacccctcaccaaggctccctctgggctacagggacaccgagctgggctgccagaggacaaggggcctaagccttttcgaagctacaacaacaacgtcgatcatttggggattgtacagtgagtcctctgcactcccctcacccctaaagcacctgtctcagctcaggaatgggtttgcttttagaaaggcctttctgacgcaggacatgtctcaccaggtcgggtcaacctcctttccagggacagaactcctccctgactcccctgcaggtccagcccgaggttgttaggccagaggtgtggggcccatctagggagccggtgggaatggagactgggctaggtcaggcccctgggcgctcagcagttctgtcggcaagtgagcacaagaggagcggggcagcctgagggtctggccctgtctacttggagacaaccccggtgagatgcaagggttatggccacagggtgaggggacgcctggcccagcctcagggctgttgtccagcaggtctctgagggcccacctgcccctgttctcccccattcccctagagctacagccctcactgtcccgtgaggggaaaaggcatggtgacaatgggggctgtagccctaggagaacgggggagaagatgggcagggccccgttctgggcatctcacggtgaggccagggaggcagcagggctcgcggctaaagacctgggtctggtgctgggaagggatctggggccgggtaagaggagcccagccaggagcccatccctcagggatcacaggatggagagacagaggatccctggggaggtagggcgggagggagctgacgagccgtgccacttctgaaacgcagggtgtgtggctcgggtgcagggagaggcaggtggatgctgggaggtcagaacctgcaagggccttggggctgtcaagtggggtgggcccctggtgcagccagagtacaccgggcaggtctcagggcaggctcccttgaccctggcggggggatgtggtcactccctgagggactcctgtcagggcccggtcgcccaccctgggcggcccccatcccatctcagggctaacctttctcagctccagcagaaagcaccacctcgagtccaggacgggcagccccactgggcagcctgaccgccccccacgccaggggccccagtaaccccggccaggctgtccctacactccttcttctcccaggtcctgcccctcctgggagtcagccccacaggaaggcccttgtcctcccttccctgtgccttctcctgggctgagccctgagctggaaagggacagagccagtcctttctgggggtcggcacccaggctggggccgctccaggccccgtgcagttcctcagctctgcctgggttgccttacagtgagacggagctgcctcctctgactgcgcgggaggcgaaggtaagagcctgatgcgtggaggggctggtccagggacgtagggactgggcgggtggtcagtgaggcagaggaagcagctggcctgagcggtggcgggtgagggcaacacgctgtcactgggaggggcagcagtccctgctggacctgaccccaggttgctgttcactttggcagtttgataaaattccaaaaggagaaccacagtcctggcttgggggtggctgtgcgcttgtgtcaggaccccacctagaggctgggacctaagactggtgtgtctgtggcctgaggatggtacatcccggggtcccaaagccagcccactggtgctcatttgctcaaaggctctcagcccttgaggtctgcccttccctggctccttccagctggctcccaccagggctccagagcccaagacccagcatccgcgggcggctctgggaagcctggcagctccgctaactccaacatgcctcatttgacagcaaattcggcgggagatcagccgaaagagcaagtgggtggatatgctgggagactgggagaaatacaaaagcagcagaaaggtaacgtgtggagggaggaagcactctctgcagagacaggggacaggcaccaatggctgtggcctggcaccatcagcctctcagagggtgggcggcacactgtcctcgcccagaggactgcaggcctggtcgccagatttcctgcctattcgtgcaagcgtcaccttgcagggagggaatctgaatctagggctgggactacccggagctcaaggctagggatgccctggtgacctgaaggaaggaaaaggttcagatcagagtttcgactctgagtgtccatccactctttcagtcctgggaagggagaccctgtcccagcttgatctcacctctactgaggaatcatggggccaaaaccgacaatttccagaatccccgggctctggtcctcactggggtcaccccgtggcctgtgacaccagattgttttctgcccacagctcatagatcgagcgtacaagggaatgcccatgaacatccggggcccgatgtggtcagtcctcctgaacattgaggaaatgaagttgaaaaaccccggaagataccaggtacgctcagccagagcacaacaaacaggacaggccgtgtcggggcccaggtctccagctggagggaacgtcaagaccaccctggggagctgggggtgaaggtcagatgaacaccctgggcacagatggtgacacagtcaccacagacaaactcagctctggtgaccctccctggcttcagtaacaagccaaaatgcagctttctgcagaaggaaaccttccttctgtccttccttcccgaagtgctgactgtgggctgactgccactgggggcagggagtcttccatctgttctgagactgcttcctccgcttggccctgccctacagatcatgaaggagaagggcaagaggtcatctgagcacatccagcgcatcgaccgggacataagcgggacattaaggaagcatatgttcttcagggatcgatacggaaccaagtaagcctacgggagccacagggtcccagcagagatggggtgaatgagagggatgggggcttccccggagcagaagccagggtcacccaggagggatgacacagctgccaagagctctcccggcccagggagcagccggcaccatgaaccgagcacctccctggttccaagccctgggccagactggaacatgtggggccagaacccaggaggatcctgaggagatggaaggcagcaaacaaaatcatgcacaatggtgaagggtgctctccctgacccatggggacccatggtaggacccacgggagggtggcaggatagagggcccatgagcccccccaggcaacagtgacagcaccaaatgctgggagaattaggggtcctggaaactctcatccaggtccgctgggaacatgacatggcacagccacgttggcagccagttgggcagtggctcacaaagctcgatggacttgaaccacacatccccaaagtgtcacagatattgaacccactgatttggaaactgacatccacatgaaaccagcatgccaggttcactgcttgactcctcgtcactcacacacggagccttcggggacggccttcaacacgggaatggggagagcaaggctggtcctcccttcaaacggaagacccagtgagaaaagggaacgagccggtgatgcccgcacgaacgtgggtggatcctagatgcattttgctgagggacagaagccagacccaataagctaccaccgtaggattcccattcctaggccattctggaaaaggccaaaccacagggactgagaagcagtctgggtggccaggggctgacggatcggggagaggctgggtgcataggggccaccctggagacttggaggatgaaggagtcgccccaggaggggctggagcggtggccgggagactctgcacattggtttggaaccgtggaggaactgtacacacacagactgaactggcgtgtgtgcaaactgaaaaaaaaaaaaaaatcattcagagtgaaaaggatcaggcaagtcactgtacaactgggctatttgcatgtcacagatgtggattttactgaaacatttcttcaagagtctcaggccctgaagagctcactgcttatctggtgaaacatctgaacctgaaatgggatttgctgttaggctttgtagacaaagtgaaattaacaacatctgcacaaaacaaaccaaagccccctttctctgtttcctaggcagcgggaactactccacatcctcctggcatatgaggagtataacccggtgagtattcccggcagtgaggttcccgggccatatttccatattgacaggagtgggtgtctggtgggggtgtcgttgcttcttttaaagttagtatttgtgacccaccaggatataggaggtaggatgtcagctcaccgctggcataaacctccaaggaagggggtggtctcaaggggtcaagctgagacacaaaggagtcagggcccggactcctggtgtcacctgggcctgaccaccacttctcagaacaagaaatgacgccctcctcctggggctgccccaaagcccaggagcttggcagcatcgcacacaggatggtgctatcagcagacattttggacaaggtgctgaagtgcctgatggacttggctcttgtcatgaaatgaatgtgcatcctgaggaagcctctttttcagaggaagcctctccttcagaggaagcctctccagtcacctctgccctctccaatgacatgagtcctcccaggtgacctcagccctcccaggtgatgtccttccatggtgactctggctcttgcaggaggtgggctactgcagggacctgagccacatcgccgccttgttcctcctctattttcctgaggaggatgcattctgggcactggtgcagctgctggccagtgagaggcactccctgcagggtaagtgaacagctgccccggggacctcctgcagccagacctggggatggccaccctggccgggtgatcacagctttcagccaaggcaccctccttgtgtcgccagcttgttgggagactttaggatgtctctgctgagggtcccacaggagtccacggctgacccccaaagcccaaatcagacgcctctcatccccatcagcagagggcatctcatcctccccgtggccaccctctgtgtcctggagccacgccctccggctctgattctgtgcagctgactctcccctccctgagagtcctcctgccctccagctgcccgggctcctgctgccatcggtgcccacgaatgggccgaccaagcccaggtggcagcatctccccatcccctgttcccctggcccgaccccactaccaggagatgaccgggaagcccagcgcccacccagttccggccaccctgtcgtggcctgaaagtcaggcttgccctttttgcaccctggcccaggaggcctccaggggaacctccagccaggctccagggaatgttcccgccccacctccccagggtaaaggccgcatgttggggtcaccagatgggagggtgggagtagccttggggtttgggggcctctccagctgcccagctcttgcagctgatggctccacatcttgggggaaggctctgatttcatgatgggctgggggcttctcaggatttcacagcccaaatggcgggaccgtccaggggctccaagaccaacaggagcatgtggtagccacgtcacaatccaagaccatggggcatcaggtgagtttatggtcccctcagctcttcccagaggccctgcctcccgtggggctgtaggagcaggggggctggggcccctcgtggggctggtgactggctgagtcccagccagggcctgacctgggacgtcgggttctccatgggctgggagttggtttcctttcctgccctggaggagacagaggcacagggatgggggcccagctcccgcagagcagggcaaagggcagtgtgtccaccgggagtgtgggaaggtgacagtgttgtggggagctctggacaccgcccagtgttctgcactaggggaagggtcttcagaggccctggaagagggaggtttttagggcagcccagtggcctgagcacctctgttgcttccatcaggacaagaaagatctatgtgggcagtgttccccgttaggctgcctcatccggatattgattgacggggtaaggaggcatagggagaccctggctcagggaccttccttgccctgcagtgccctgcttccccagcccgggggtctggctcactcccagcccacaggaggctcaggcgggtccccaaaggacacacaagcaaaaccctctgcccaagaggggtcatcccagggcaatggctggggctcaggcccagcctcatgggcagactgggccaggacccgacttgagagggctcagggaagcctcaagccctgggcaagcccctctctccaggagccacatccccactcaaatgagtgccccccatgaggagcttcaagaccttgtctgacccagcgtcctggagggctcaggcgaccctcatggggaaggtcactgactctggagactgaagccccagtgtgcgcagctcgagccaccagccccagcctggaaggaccaggttctttcacacctgctgtccccacagatctctctcgggctcaccctgcgcctgtgggacgtgtatctggtagaaggcgaacaggcgttgatgccgataacaagaatcgcctttaaggttcagcagagtaagtctacgtgtgcccagcggggcctggggagccctggggtcagaccccgactggcccgagggcagcttcctcacactgtcctcatgatccgctgttctggcccagagggaggtccggccaggtgggctgggcaggacactgtgacaccgagcccatccctcacatgatccggacagggaagtgctcaccacactctcgactttcatctgggtccccagccacagtctcctgtgtatatctggacacctggggtggccacaaaaggatccggcaccgaccagtaggagactgaagtggccacggggtatgagctgtgaccattcccaggtaactcccctggcctgatatccaccctgtccctagagcgcctcacgaagacgtccaggtgtggcccgtgggcacgtttttgcaaccggttcgttgatacctgggccagggatgaggacactgtgctcaagcatcttagggcctctatgaagaaactaacaagaaagcagggggacctgccacccccaggtgggctccagtgccatgtcccctcccatgtcaccctctggggtagtcagtagtaggggagtgcccaggacccgcaaccctactacctgggccttcctcttcaccttttcttcctcctcttcctcctggactctaagaaagtacaggaggcccaccggtcctcagggcaggcgctcagtgcgtgtatactggacatgctgtgcacgcaggagggggatgtgggcaagaccctccaacaagccccctcccactttccacggtgtctccctctccccctcgcagggccctccaagttactagacgagcccagacccatttgtgggagaccccgcccctccctgcaagcacccacagcctcagagagcagcagaggcccctcactcctgcacgctcctccaaggttgccaggacaagaagcctggagccagggagacaagggaatccgtgtccctgacccacagagcattcagggagagggcccagagccagagccaagagttcagccagaagtgggaacggtcagtcctggcatggactgggcagcccaggagggcagagggtgacccacgtccgggcccaatcacccactgcggagacgggtccccacgtgaggtgacaaggggctgggtgacatccaaggcccctcccacctgagttctgactgggggccgtatcccaggcccaacagccctgggacgaaggtgtgtggcaggaagcccccagccagtctgaaccctgggggcagtcccaggagccacccgccatgccacgacagcttccccacgccaggcagcatgcacccctccctctgggatcagcagactacaggcgtgtcctcggtgtcaggccacgggggccacacagggaccccgaggactccgagatgcaggcaggtggggcccagcccggaaaggcctgcgtgggctcactggagatgctgaccgcgtctgttttcctttcagccaaacccgagcaagggtcgtcggcatccaggcctgtgccggcttcacgtggcgggaagaccctctgcaagggggacaggcaggcccctccaggcccaccagcccggttcccgcggcccatttggtcagcttccccgccacgggcacctcgttcttccacaccctgtcctggtggggctgtccgggaagacacctaccctgtgggcactcagggtgtgcccagcccggccctggctcagggaggacctcagggttcctggagattcctgcagtggaactccatgccccgcctcccaacggacctggacgtagagggcccttggttccgccattatgatttcagacagagctgctgggtccgtgccatatcccaggaggaccagctggccccctgctggcaggctgaacaccctgcggagcgggtgagatcggctttcgctgcacccagcactgattccgaccagggcacccccttcagagctagggacgaacagcagtatgctcccacctcagggccttgcctctgcggcctccacttggaaagttctcagttccctccaggcttctagaagcatctgggccagggctcatggctggataatttccctaggcttaacaacccaagcaagcttcgcgtcctcgttttatttttggttaaacttatgaaaatgtattaagaaagagtgcagctcgagagagattcagagatggaacacaccagaccccagatcacaaagccaaccatgcccagcccctcccagcacccccagccccacgaccatcgttctgaattctgacgacaccgtgagcctgcctttgtactttaaactcatggaaggataactaccttcacgttttgaaataaatgtttcctgttgaaatg

SEQ ID NO: 1830 - DNA, 358 bp, Homo sapiens
aagagcaagtgggtggatatgctgggagactgggagaaatacaaaagcagcagaaaggtaacgtgtggagggaggaagcactctctgcagagacaggggacaggcacccatggctgtggcctggcaccatcagcctctcagagggtgggcggcacactgtcctcgcccagaggactgcaggcctggtcgccagatttcctgcctattcgtgcaagcgtcaccttgcagggagggaatctgaatctagggctgggactacccggagctcaaggctagggatgccctggggacctgaaggaaggaaaaggttcagatcagagtttcgactctgagtgtccatccactctttcagtcctgg

SEQ ID NO: 1831 - DNA, 886 bp, Homo sapiens
cagccaaacccgagcaagggtcgtcggcatccaggcctgtgccggcttcacgtggcgggaagaccctctgcaagggggacaggcaggcccctccaggcccaccagcccggttcccgcggcccatttggtcagcttccccgccacgggcacctcgttcttccacaccctgtcctggtggggctgtccgggaagacacctaccctgtgggcactcagggtgtgcccagcccggccctggctcagggaggacctcagggttcctggagattcctgcagtggaactccatgccccgcctcccaacggacctggacgtagagggcccttggttccgccattatgatttcagacagagctgctgggtccgtgccatatcccaggaggaccagctggccccctgctggcaggctgaacaccctgcggagcgggtgagatcggctttcgctgcacccagcactgattccgaccagggcacccccttcagagctagggacgaacagcagtgtgctcccacctcagggccttgcctctgcggcctccacttggaaagttctcagttccctccaggcttctagaagcatctgggccagggctcatggctggataatttccctaggcttaacaacccaagcaagcttcgcatcctcgttttatttttggttaaacttatgaaaatgtattaagaaagagtgcagctcgagagagattcagagatggaacacaccagaccccagatcacaaagccaaccatgcccggcccctcccagcacccccagccccacgaccatcgttctgaattctgacgacaccgtgagcctgcctttgtacttcaaactcatggaaggataaccaccttcatgttttgaaataaatgtttcctgttgaaatg

SEQ ID NO: 1832 - DNA, 886 bp, Homo sapiens
cagccaaacccgagcaagggtcgtcggcatccaggcctgtgccggcttcacgtggcgggaagaccctctgcaagggggacaggcaggcccctccaggcccaccagcccggttcccgcggcccatttggtcagcttccccgccacgggcacctcgttcttccacaccctgtcctggtggggctgtccgggaagacacctaccctgtgggcactcagggtgtgcccagcccggccctggctcagggaggacctcagggttcctggagattcctgcagtggaactccatgccccgcctcccaacggacctggacgtagagggcccttggttccgccattatgatttcagacagagctgctgggtccgtgccatatcccaggaggaccagctggccccctgctggcaggctgaacaccctgcggagcgggtgagatcggctttcgctgcacccagcactgattccgaccagggcacccccttcagagctagggacgaacagcagtgtgctcccacctcagggccttgcctctgcggcctccacttggaaagttctcagttccctccaggcttctagaagcatctgggccagggctcatggctggataatttccctaggcttaacaacccaagcaagcttcgcatcctcgttttatttttggttaaacttatgaaaatgtattaagaaagagtgcagctcgagagagattcagagatggaacacaccagaccccagatcacaaagccaaccatgcccagcccctcccagcacccccagccccacgaccatcgttctgaattctgacgacaccgtgagcctgcctttgtacttcaaactcatggaaggataaccaccttcatgttttgaaataaatgtttcctgttgaaatg

SEQ ID NO: 1833 - DNA, 371 bp, Homo sapiens
ctattatctaaggttatgaaggctagaattatcccatttttgcctaacttctcgtacctgtcccaagatcccaccttggactcaccctctgccttcagctcacgtctcttcagcttcctccacatggtccagcaaacacacacctgggctgaatggtagagctgattgctcatacacaaaggtagaccggtgggcagggattttcagacttacacagtcaatgagttttccttggtgttctggagagcaccgtttgagaaacactttgacagtgaatctaggcctcaagatccatcagctgctctagcttgaattttgctcaagctcagtgaacacctgctctgccgggtgcacgtgaaaggggcaaggat

SEQ ID NO: 1834 - DNA, 371 bp, Homo sapiens; identical to SEQ ID NO: 1833

SEQ ID NO: 1835 - DNA, 243 bp, Homo sapiens
tagagccactggtacagatccactgacggtcctcagaacacctctgtgccctaagctgggtcctgatggtcgctgtgggccccactgaacacacatggtcccttgtccgggggagcctgctgcccttgggcagctgtggaaaatgaaggagccctggagggctggctgaggggagactatcttcccttgtgttcaaaggggtccgggcactagggttctccccaggtatttcttgctctgcgt

SEQ ID NO: 1836 - DNA, 243 bp, Homo sapiens; identical to SEQ ID NO: 1835

SEQ ID NO: 1837 - DNA, 371 bp, Homo sapiens
ctattatctaaggttatgaaggctagaattatcccatttttgcctaacttctcgtacctgtcccaagatcccaccttggactcaccctctgccttcagctcatgtctcttcagcttcctccacatggtccagcaaacacacacctgggctgaatggtagagctgattgctcatacacaaaggtagaccggtgggcagggattttcagacttatagagtaaatgagttttccttggtgttctggagagcaccgtttgagaaacactttgacagtgaatctaggcctcaagatccatcagctgctctagcttgaattttgctcaagctcagtgaacacctgctctgccgggtgcacgtgaaagggacaaggat

SEQ ID NO: 1838 - DNA, 371 bp, Homo sapiens
ctattatctaaggttatgaaggctagaattatcccatttttgcctaacttctcgtacctgtcccaagatcccaccttggactcaccctctgccttcagctcacgtctcttcagcttcctccacatggtccagcaaacacacacctgggctgaatggtagagctgatcgctcatacacaaaggtagaccggtgggcagggattttcagacttacacagtcaatgagttttccttggtgttctggagagcaccgtttgagaaacactttgacagtgaatctaggcctcaagatccatcagctgctctagcttgaattttgctcaagctcagtgaacacctgctctgccgggtgcacgtgaaaggggcaaggat

SEQ ID NO: 1839 - DNA, 242 bp, Homo sapiens
agatccactggtatagatccactgacggtcctcagaacacctctgtgccctaagctgggtcccgatggtcgctgtgggccccactgaacacacatggtcccttgtccgggggagcctgctgcccttgggcagctgtggaaaatgaaggagccctggagggctggctgaggggagactatcttcccttctgttcaaaggggtccgggcactagggttctccccaggcatttcttgctctgtgt

SEQ ID NO: 1840 - DNA, 400 bp, Homo sapiens
aaagcagacgtcaacgccattgttaatgcacagaggaggaacctgactgttagacctgggttttccagggttgcacggcttctgggagacggatgtgaccctgaggatagggcacaggccagtgtaatgccaggatggaatgagctgtgatctgtgctgcacagaggcctaggccaaggtgggactgacggatgaccaggtcagccgggtcactgaaaacactcttgggtcctcacctgctggttcccaggagtccggaactgccaggagagtggtggcaggtcccccatcctcagctgggtgggcctggatagaacagcaaggcgagggcacatttccctggccgttccctccaggcacagctgtgacctgctcattccaattttggggaaatatttcc

SEQ ID NO: 1841 - DNA, 125 bp, Homo sapiens
gagatggagtcttgctctgttgcccatgctggagtgcagtggcacgatctcggctcactgcaagctccgcctcccgagttcacgccattttcctgcctcagcctcctgggtagctgggactacag

SEQ ID NO: 1842 - DNA, 87 bp, Homo sapiens
tcagtatacatgtgccatgttggtttgctgcacccattaactcgtcatttacattaggtatttctcctaatgctatccctcccccag

SEQ ID NO: 1843 - DNA, 371 bp, Homo sapiens; identical to SEQ ID NO: 1837

SEQ ID NO: 1844 - DNA, 243 bp, Homo sapiens; identical to SEQ ID NO: 1835

SEQ ID NO: 1845 - DNA, 292 bp, Homo sapiens
atgttagatcaggcagcaagattccttgcattcgaaaaatctcgggcagttctccctcaaccctaatcgagtaacgcaaggcaagcaagagtccagggtgttggttggactccccacgtagtttacccatgcagtctgttattagagtatgaattccagccgttggtttttgttaagttggtgtcaagctttttgtcagacgcctagctacaaagaagcttcttatattttaaaaagcccgctctataatctgattggccagtttttgttccatcatctgtatgtggttttt

SEQ ID NO: 1846 - DNA, 320 bp, Homo sapiens
aaaaaacatcaaaagatctggctagtccagacttgtatttcagacatgcagtaattcctttgagctaaaaggcagctgccgcctgaggcaggaggcacacgctccagtttgccaccaaccccacctctcccggttgccttgagagcgctttactcatgtgaagctacctgtatgggcactgggtgagtaggtgagcttctcactcctggcccagctcccagtctgaccacagagagtcccacctttgaggccagtggaactaggctcctgttagaggactgaccaaaggtcattagcatcttcatcaaaactcacattat

SEQ ID NO: 1847 - DNA, 116 bp, Homo sapiens
cagctactcaggaggctgaggcaggagaatggcatgaacccgggaggcggagcttgcagtgagccaagattgcaccactgcactccagcctggtggactgagtgagactccgtctc

SEQ ID NO: 1848 - DNA, 111 bp, Homo sapiens
cctgtaatcccagcactttgggaggccgagtcgggtggatcacgaggtcaggagatcgagaccatcctgactaacatggtgaaacctcatctctactaaaaatataaaaaa

SEQ ID NO: 1849 - DNA, 32203 bp, Homo sapiens
gttggcagaaggggccgtctggccaatcttgctgcaactatttgctcctgggaagatgatgtaaatcactcatttgcaaaacaaaacagtgtacaagaacagcctggtaccgcttgtttatccaaattttcctctgcaagtggagcatctgctaggatcaatagcagcagtgttaagcaggaagctacattctgttcccaaagggatggcgatgcctctttgaataaagccctatcctcaagtgctgatgatgcgtctttggttaatgcctcaatttccagctctgtggtaagtcagtatcattttggtctttggaagccttttcttttttcgttatgagtggtataatacatctgtgtgtatgtgcaggtggatgggtggatatatgttttataatagatgcatagtgagtttatatgtatttgtaagatatcggtttcttagaaagtgaaaatcgttaagttgggtacccatcccaagatcaattagcagttgacagctgaagttatactaatttgatgcaaatccagagtctataatggaatgatagagcctcttcttagtcattaaggagagcactgaaaattaagtcctctgttataatgctttaaatatatatatgagaaatttatataaatttatcaaatatttctgaaaagatatataacaaaatagtagctatagttgcctccaggaaggcaaattgccaaacagggtgtgatactttcactgtatatccttttgaaatgtttgaaacttttactttgtgcatgtgttacctcaacagttttcaaaaaacaatcttaaataaaaaggaaaaataatttcgtgtttctgaccattgtcttttagtgtagagctaggctttagaattagacctgcattgaatcccagctgtactacataattagaagtttggctttggacaaggtgcttaatattgcagggctttatttttctatgtgtaaaataggaaaaaaaggttatttggagggctaaataagagtcataaagcacttagcatagtacctggctatgtataagtagttaatctattaactatgaagtacatgatactattttgttaaatttttattgacttaattaaaatgtaatttggtctaatatagttaaaaatttgataaaggtactagtgcaataatatgaataaaactttttttttaaataaagagtgatcatactgctaatacttcattacccatgagtatattatgcagactaacccacatattatgatttaaatcatagcattttttaagttggttttttttcccaaatctttcaaatttgtttgatctattagagagcaaaatcatttcattttcataaatcttacataaaggctatcaagtaaataggacttgaattgttttgttataggactatttttagatattgtgaatgttgtttaccctaagtgttttcatgtttcagaaagctacttctccagtgaaatctactacatctatcactgatgctaaaagttgtgagggacaaaatcctgagctacttccaaaaactcctattagtcctctgaaaacgggggtatcgaaaccaattgtgaagtcaactttatcccagacagttccatccaagggagaattaagtagagaaatttgtctgcaatctcaatctaaagacaaatctacgacaccaggttacgtatttataaaaaatttagttattgctgattatattcaggatatctattctcagcattttaaatattcaattgtgaatggtacagcaatgatttgccagggccaatgcctgaatgttccaaatgagacctcagctttagttgattcaatgaatatttattaacgtagactagcctacttactggttaaaggacttaatatgttacattttaacagtttaaacatgctttttccaggatgatcatgctagattttttttctatattttttgattcagacaaagcatgtttaactggaaatcacattttaggggcataatggagaaacattcttgtagccaagtgtgcagagcagtgcttctcaatcttgagtatgaaggcacctctaatagcagagggaagtgaatgtgcatgcaaatgactccacttctaattttatttatttactaaattgataaatgatagaaatttttgaaaaaattgctgtttattgataaataatagatgtatatatttcgggagtacatttgataacttaatacatttatataattcgtaaagatcaaatcagtgtaacgaggatatccatcaccttaaatacttgtctttatgctagaaacatttgaattcttctcttgtagctattttgaagtatacaatagattattgtaaactatagtcaccctactgatctatcaaacactgggtcttttttcttctgccaaactgtatatttgtactcattaatcaacctctcttcatcccccagttatatttatctgtgtgtatattgtgtgtgagcatttacatataaaacaaaatttcttaccatcgtaaactgatactccaggaaatgccatatttatcttgtggtgatttataccttctggcacacttccacgtactgttaattgagaaacacaggactaaaatatatggtaattgagtttattctgaactgtattcattttcattggaaagacttttaattctaaggtttaactttttgaaaatacaacctctgcagaaactatagttcatcataaaggggcagtaaacagaaatgagagtggggaagcggttatggggtaggtagaaatctgcaatttccagttgagccagaatgagaattggaaacaatagcaagatccccagatggaataggactagttagtcccaattttctaaagacttaagcttagataagaggcattctttttaattgttcttggctactggatatacccagaatcacatttccagggtttcagagatatttattttagatacttcattgtattcttaatggactctagtttggaatatggcctgaagtagtaataagtgataggtgaagtcctcaaattatggccgtggctcaaattctgccctttgcttgtttttgcaaataaagttttattggagcacagccacacccatttacttacatattctctgtggttgctttcattctgtaatgcagagcagaatagttgtgacagaggccatatggcccacaaagctcaaaatatttagtgcctggccctttataggaaaatatatgctaatctttgatatagataagcctatttttttataatacaaccttagaatcctcttaatgggagtgatataggcccaatttgccctactttaaatttacttcatactatttcaatgagtgctgtggggttttttgttttgttttgtttgctgttttttgtttttgagacagggtctcactttgtcacccaggatggagtgcagtgagtggcatgatctcagcttactgcagcctcgacctcccagattcaagagatcctcctgcctcagcccaccaagtagctgggactataggcatgccactacaagtggttaattttagtattttttatagagatgggattcctccatgttgcccgggctggtctcgaactcctgagctcaagagatccacccgcctcggccacccagagtactagggttacaggtgtgagccactgcaccccgctgaatactattttaagacactgtaaagtcaaggtgtccttttgataaaatgaataattcctaattttccttctgaaggaaaaaaaggcaaaattcctttattttcacgttaggcttcctaaaagcagggtaaaataaattgactatagatatatgtaagttgttggaagttaccatggccagcacacttcgtgatgaaggtagatttattaatatacatacagtcaatttctaattatttaaattctggttgttcagtttgagagttttctaagccctactgccctctcctcattctaccttttcaaaatttttttttttttttaaataactaaattctatgagtaggttttagggcatgtacttaaatagaatagtaaactttttaaaattttgaagtatttttatagtctactttgtgaatgaatattcctgatagaatcaaagcattttgaagctgtaatgtagtttagaactttttccatagaaatcgtaataattttttattttgaatagcctccaaaaatgtgtgtgttttctgtaggaggaacaggaattaagcctttcctggaacgctttggagagcgttgtcaagaacatagcaaagaaagtccagctcgtagcacaccccacagaacccccattattactccaaatacaaaggccatccaagaaagattattcaagcaagacacatcttcatctactacccatttagcacaacagctcaagcaggtatggtgtactgcatttaacattattcatcacatggtctctgcatagaacctagaaatcaaaatgggttctgatgccagtctttttgactgagataagtagcatcttggttttctgtatcactaatttcagacaagattgggcacattcagggtggtatggccgtagacagtatcactcatctcaaattagaaatattgtcctgaattccatgtgtattatgaactttttaaactgaaaactgtttaaactttttaaacagtttaaaactgcaaacaaggaaaattttagtagtgtttggatgttaaacatgctaccggctcttgtgtaaaatacagcttttgatgggtttaggaacgtcaaaaagaactagcatgtcttcgtggccgatttgacaagggcaatatatggagtgcagaaaaaggcggaaactcaaaaagcaaacaactagaaaccaaacaggtaatgtaaacaagaaatataaaaacgaacttggtccccaaatagttgggatctaatttgtagttctgtattggcaaataattctttacacatttttcttttccaattaactctgtcacttttcgtttataaatcccttaaatgtgtgtaccaactcttgcttttcttgtgatatttttctatttcagtggaactcttcaccatattcattgatgaccttaaaatcaaattttacaaaaattattttcatcattcatttgatttcagagtctacttaatattccacttagatggtggttctaaaatatttcgagagtctacttttctcaatgatgactgtatacctttccccagataccatgtctttagactatctgggatcctttcagtcaccacatacctcccacattgctctttattccggtcaaagttcattaatcagccttcaacaaaatctctacaatgtaagctgtgttctgtttaatttacatgtctacaaagtactgtgttaggatatgtttttaagctaatagaattatatttacagtggggactaatagaaagtaaaataacagtaaatttaatcagtattctttgagaaagatctacttgattgatttgttttttatcagttcacttgcttaacaaatcacatttcccagagttctgatctcaacctttttttctcagttgctctggaacatctcttccctgtccacatacctagattccgataatcactgaaatgctgatgatgctcagctccgttgtgctgatatctctcctgagctctaggtgtggttggctagcaaagcctgctatgctttgctgtagtatcttccccttgtagtctctgtcttctcttgttggtttgctctataccttgtcatctaaaacaatctggaagttcttccttgacttcttcctcttgtttactgtgtcttcccttctgcttgcccctagcacacatatgcataaacacacacgtgcagtgataagttttctaaatctgtcacccacctgcctcgtcttccatattttcctctgctattaccgaagttactgctgtagctttgtactgaacatcctgcttctagtctcgctaccctccagtccaccttatcagttgctgccagagaaatatatatatatatatatatattttttttttttttttttgacatggagtttcactcttattgcccaggctggagtgcaatggcacgatcttggcttactgcaacctccacctcccggcttcaagcgattctcctgcctcagcctcctaagtagctgggattacaggcatgcgccaccacacttggctaattttgtatttttagtagagatggagtttctccatgttggtcaggctggtctcgaactcgtgacctcaggtgatccgcccgcctcagcctctcaaagtgcagggattacaggtgtgagccaccacacccagccgagaaatatttttaaaagacgcatattcatgtattcacttgcttaaaatcttgaagtgctcctcatagtcatcatcagaaaaaatgcgtaaactgcttggcttgacatatagaatgattcctcacctggctcctccccactgctcctccacaggtatgcttcagtcctgccatgcaggctatttgcagtttctcaaatatacccatgtttttatatctctctgcctttgccttctgttctctgccaggaatatttccctggtgagctcctacttcattaagaataggtcaaactttaatcccctctaggaattcttccttttctcaaagtgtcccactttttttcacccatgtcatcctgtgtatacctcaactagaatatttatcttcctgtgaatgttgtaagtttgcattccaccactgcctatgggagtcttctccacctctgtgtccttagtgcctggctcagactaggggctcaacaaacttgtatttgaaggaagaaatgcgtttgctgatccttcccatcagcatataacaagctattatctgccatctgaaaaaaaaaacaactcttgcaacccattcccctccttttctttgcctccatgtcatgcagactcttctacaagttattcctacttgctgctttcaggtttcccccttctctttagaattctatctgcttaagctttgccaccactccttccacgactcagtatcctaatcacgtttgtcagtgatcttcacctactaatcaattttcagttgattagtagcatttgacattgtcgatcactcttctgttgggagcgccttctttacttggttgccagtgtatcatattctcatggctttctgccagtgtctctagaaagtatagagcagggttcttaaactattttgtactaaataattcccaataaacctgtgaaattcctcccagaaagttgcacatatgcatgtaaacaaaattctgaacacagtaacagtgcagagcactcatctgtggtctccacagactaagcagccaaagagctaggaggaaaatgtagttgaaggcagtgtctttaaagtcaaggggctcggcgtggtggctcccgcctgtaatcccagcactttaggagactgaggcaggtggatcacttgaagtcaggagtttgagaccaacctggccaacatggtgaaaccctatctgtactaaaaatacaaaaaaaattagccaggcctggtggcgggtgcctgtaatctcagctactcaggaggctgaggcgggagaatctcttgaacctgggagtcggaggttgcagtgagccgagatcgcaccactgcactccagtctgggcaatggagtgagactccgtctcaaaaaaaaaaaaggaaataaagtcaagggaagaaagaaaactttcgagaaggaaggcatggttggtattgttacgtttcaaatgtgggttaagccaaatctactgggttttgaagcaagaagtttgctgtaacgtggcaagagcagtgttagtgaagaggtgagggtggcgtgcaggtggtgctgtgtcgaggagggaacgggcaagaggagcagagccagtgagtgcaggcatttcttagtttggtcctaatggaggtgataaaggaggtagtggctagaagagatgaagaaaagtatgatttgtatgtgttttgtcctttctgagacctaagtcaatttgtgtgatgggataaggggtgataattgatgggatgaggtgagaatggatgaactccgcacagtgaagggaacagaactgatgaggacaatctcctgtgtgacgaaaaggaaggaggaaagtagcatgtaggggtgatggtagtcttagagttaggatagcaaaaactgatggactttcttctgaaagctcctgttttattcatccttaggaaagggaaggtgacaggggaaatactgtatggaggaaagaagagagagctgactcagacataggaagaatagggggtagtattgaggcttagatgagatatgagaccgtagattttatagtggaaccatttgatcgtttactttgctttttgtgtttttaaaaaatttttatgtattttttaatccactcatctgcatgctaattacattgtttttacacaaccaaagctgcttctaacttgagagacaataaagtctggaactagacctggaacaagagtacctgggtttgtatactggctctgccagtcactaactgtgtgcaagatacttaacttttttgtgtctcagttctctcatctgtaaaatggagatactagtacctaacatagagggttattgagaagattaggtgaggcaatagatataaggtgcttagaaaggtggctggcacatattgagctctgtataagtattagctgcctttattttactcttatttgattatttctactatgacttcattcataaagtcttcttttatttctttgctgaaataatctgtacaacaatataaagtctttaaacatacaaaatagtgaatgttcctcttaaataaccttgctaatgaataaaaagactcagacgagggaatgttttcttctcttctcttctttccttaccttctgatctgttttgtccttgttttctcttgctcttaccctccgggtaactgataattaaatggaatcctgatgtgtaggagctgtcaccagatgttataggtgtgggttgagataagtgacataggggtgggtgtttttccctttgtgtggctttcactttgtttttttattgttattttattttattttattttattttattctaccaaatacccagacttcaaggagaggctttcactttgattggcttatctaaaactgagccctgatatgaattttcattctttcttgccacctcctctccaaaaaaatttttacatactgagaattaccaagaatgtgaactagcactgagggtttgtcgtgttctgaacaaggctgggcctattcacatacactatctctttggttctaaggaaacttatacagaataatatttaataataatcttgtttcatttaataacatagaaagataaaatatatagttttgagaaataaaatttacttttcattcgctttttgcaggaaactcactgtcagagcactcccctcaaaaaacaccaaggtgtttcaaaaactcagtcacttccagtaacagaaaaggtgaccgaaaaccagataccagccaaaaattctagtacagaacctaaaggtcagtgtttccagattgttcatggttagtatgtagaaactcaaatgatgtttgtgtgttgattttgtattctgtaactttgctggatttgtttgttctaacgttttttggggggaatctttagggttttctttcttttttcacttttctttgagatggattcttgccctgttgcccatgctggagtgcaatggtgtgatctcttggctcactgcaaccctcacctcccgggttcaaacgattttcctgcctcagcctcccgagtagctgggattacaggcgcctgccaccatgcccagctaatttttgtatttttagtagagatggggtttcaccatgttggccaagctgttctcaaactcctgacctcgtgatctgcttgccttggcctcccaaagtactgggattacaggggtcagccactgcgcccagcccagggttttctacatgtaagatcctgtgatctgtgaatagagataattttactccttttctaattcaggtgccttttattttcttatataattgctctggctaggactttcaatgctgtgttgaatagaagtcattaaaacaggcatctttgtcttgttcctcatcttaaaggaaaagcttttaatccttcactgttgagtgtaatgttagctgagggcttttcatatatggcctttgttacgttgtgtaccttccttctattcctagtttttgagtaattttattggcactttgtttttaaagtaaaaaacaaattgcagagtagtggtatgtatggtatgatcacaaaacaaaacaaaatgatatgtaaatatgcacaccttgggggaaactggaaaaacaaacaataacctggtaatattgctgtcccatttctctctcggtgggggaaaagttaatgcatttatgcctagtgttccattattggaacgctaagcttatgggagttacttatgtcctcctgctcaaggttgtcaccaagaactgatttttcacaaaataaatttgcaacctccagcataaatgggttaagagaggacaggtgttcagggaggggtgtttctatacatttctgggtttggatattttaaaacgaatacatagttttataatcagaaaaaaaaaacacacacaagattccataattagaaaattataggttcttatatatattaatatggtctttcttaaacatttttaggtttcactgaatgcgaaatgacgaaatctagccctttgaaaataacattgtttttagaagaggacaaatccttaaaagtaacatcagacccaaaggttgagcagaaaattggttggtttttattctttatttattattaactttgcacatactataggaaataatatattgatagaagcacatattcaaattgagagtatctctgctttttaaattaaatcagaatacactgtagcttctaccaagatgtggtactgttaacagttactgctagctcacaggcacctgtgaaagtgtggttaagaccctcactgactttgacagggataggaaagttgctgccctcccacgctctgtactggtagaggggtgtttcagggaaaaactctctgggattatgttttcctctgttttcataccaccacaacaatcatcaacacagaagacttttgtgaccagttcaattcaattcaattctgacactagctacatggaagtagtgtcagatcccacaggttggggactcagtccccaagactgcctcctctccttcagataccagttgcaagtgcaagtccaggcctctcaaacttcctttttttttttttttttttttttgagacagtctcactctgtcgcccagactagagtgcagtggcacgatcttggctcactgcaacctccacctcccaggttcaagcgattcttctgcctcagcctcctgagtagctgggactacaggcgctgcccccacacccagctaatttttgtatttttagtagagagggggtttcaccatattggccaggctggtctggaactcctgacctcgtgatctgcctgccttggcctcccaaagtgctgggattacaggcgtgagccaccatacctggcccagggctctcaaacttctaaccgaccagcttcaagctgaggtttctgtgaccccctctttagcttggattaattggctcacagaactctgggaaatacttacgtttactgctttattttaaaggatatgggtgaggtatacggaaaggggcatggagcttccattgccttccctggggcgccaccctccaggaacctccacgtgttcagttatccagaagctccctgaacccagttctcttgggtttcagtggaagcttcataaagtcagcattccctcccccagggtatgaggctggatcctctctggtgaggggtgaggtgggtgtgggggtcgtcttaagaaccacaatgagaaagataggagaagattagagtcctgccgtggggcaggtgaaaggatggcaggagagttctgtttcctgtgaggcctaatgcacccaacattataacgaaagacagtaactagggatacagcagttatgagctaggaactgtggacgaaaaccagtatatatcataataccacaaggtgttagcagcccctgaaggttattatcgaaccctgccctaagtgacattaatattttcctattattgactgctgtgtgaaagggtagctctcaacgatagaaaaagtcatttgagagaatattttttgaaagtctgaagtctttggctattattctacatttgagttcttaatgcttttacttaaacccaaggtattgaatcagttttgatagacccaatattcatttctttttctttttcttttttcttttttttttttgtctcagacagagtttcactcttgtcccccaggctagagcgcaatggcacaatctgggctcactgcaacctctgcctcctgggttcaagtgattctcctgcctcagcctcctgagtagctgggattacaggcacctatcaccacgcctggctaattttttttgtatttttagtagagactgggctttgccatgttggccagacttgtcttgaactcctgacctcagttgatctgcccaccttggcctcccaaagtgctgggattaccaatattcatttcttagaaagtgttattgaagctgaagattttcttggtttcatttattagtagtattttcttatttttctttttaggaggtgcttttttttaaggcattttttcctatttagtaagaatatgaatattaaattttctttgttatgcctttaattcttaaatatctgagtcacagtgtccacctattgaaatatttttcagaagtgatacgtgaaattgagatgagtgtggatgatgatgatatcaatagttcgaaagtaattaatgacctcttcagtgatgtcctagaggaaggtgaactagatatggagaagagccaagaggagatggatcaagcattagcagaaagcagcgaagaacaggaagatgcactgaatatctcctcaatgtctttacttgcaccattggcacaaacagttggtgtggtaagtccagaggtaagaaaaggctaactaaacaggcccaggacataagtaaactaagtagtattcgtatctcccctttcttttgttgacagatggacatttggctcagtagccaagggaattttgcagacctgttgtctgttctcttaaaagaaaccttaaaactcttgagtggtttccttttgaccttagatgaaatccaaagagtaacatggcttaaaaggccaggcatttgggctcagcttttgactctgccatttgctgactgtttattggtcaggttatttaagctctctatgccaccatttcctcttatgttaaacgaggttattaataatacctatatagtggagttgatgtgaacattgttgtattagtatatcggtagttagctccaaacacatgtaactaacatttagttacagctaactgctgttattagctttcaccctcaattgaataactgcagctctggggattgattcaactagaattttttttttgaagtataagtttcagctgtctttgtagttttatttattcttttatgtgttaggaacttagtttgctttgtttttatgatgaatcaatcagcttactggatttttttcttaatattaatggagaattcattgattttcacagaataaaatgaattatcatttaggatcaatgttaatatctgatgcgttttcccacagagtttagtgtccacacctagactggaattgaaagacaccagcagaagtgatgaaagtccaaaaccaggaaaattccaaagaactcgtgtccctcgagctgaatctggtgatagccttggttctgaagatcgtgatcttctttacaggtaagaacatttctggaaggcattcactcactaagggtcatggtttagattgacataagtcgtgttataatttgtaattataatgttattaataactcatctgtataaaagtttggaataacttttgttagcctctctttcaccaaatgagagttccattctgttgtgaaatgttctgctgacatgttcaatatcagtgtcaaattctgctgatatgttcaataaaggatagtgctcagtgtgttgctggatttctaatagagtgtaacttacctcttgaagcattgatgcatatagatctcaaagattcaaagaaacagaacgtccatcaataaagcaggtgattgttcggaaggaagatgttacttcaaaactggatgaaaaaaataatgcctttccttgtcaagttaatatcaaacagaaaatgcaggtatgtacttttgtggaaaggggctttggaatgtttcttgcactaggctgtgagctctgtgaggacaaagggcccagccttacttatctctgaaccctgagtggccagaatagtgtctgatgcatagaagctcagtaaatcacatttgaattcagtttatttttggaaaggtactctttttgaaaacttggaaactcatttgatattgctgaaatatttatttttaaacaagtttttcataaatatccttaaagtataactattaattggataatgatgtagtgggaaatttgttatgctcttcaaggttttttcatgctaaggaagctttttttttttgagacagcattttgctctttgttgcccaagttagattgtaatggcgcaatcttggctgactgcaacctctgcctcccgggttcaagcaattctcctgcctcagcctcccaagtagctgagattacaggcatgcaccaccacacctggctaatttttatatttttagtagagatggggtttcactatgttggtcaggctagtctcaaactcttgaactcaggtgacccacccacctcagcctcccaaagtgctaggattacaggcatgagccaccatgcctggcttttaaaaaaaatattttaattataaaaaaaaatagagatggagtctcactatgttttctaggctgatctcacactcctgggctcaaatgattcttgtgccttggactcccaaagtgctgggattacgggtgtgagccaccatgcctggccctaaggaagcatattaaaaaaaaacagtgtaattgtaatttaaataaaatgaatcagatactttctaaatttctacgttgttggatgtaaccccaattttaactttaataagtatgaattggaagttttttcataaggaataatatttatagcttaattattgtaacatgctaaatgtttttggtgcatagtcgagaaacttgagcagtgaaactaacattttgactttcatctggaaattctagaaactatccaatcaagttagttagaattaaaatttaaagtgaaaatgatgatttaaaatgtgtatattttttctcctctcattggttttcctaggaactcaataacgaaataaatatgcaacagacagtgatctatcaagctagccaggctcttaactgctgtgttgatgaagaacatggaaaagggtccctagaagaagctgaagcagaaagacttcttctaattgcaagtaagtgtgatgcacctgaaagagttccaacaaatttctaaccagggaaaactcattttgatatttagaaatctttaagtttagagaaagggcttttcctagtcatctgttccagtggatctattttttgttcttgtttttataaggtttaagaactctatgtaaaacaaattgtagtttgcatgaaaggtagaagcaaccgaaaggcatttgaagaaatgcagttgtgcagattgaatgaatgaatggatgaatgaatgaatctctatatatacacatgtacacatacattctctctctctctctctctctctcccttccttcccttatcaataaatagctaaaacaacttctgtgaattttgctgtgtgcgtatatgtggtgatgatggggcattttggggtggacagatgataccacacatgaaaactagccgaaagttgatgtattaaattataaggacttggtaaatgagcaaccaaggttttccccaaccacctaccatgttttataaagatagtgttactgatttcgtcttcgctgttacgtacagtttccatatcagtacacttttttgaatttgctctcattagaaacagttacgattttaatatttggaatattgcgttgttttacatagctgggaagagaacacttttgattgatgaattgaataaattgaagaacgaaggacctcagaggaagaataaggctagtccccaaagtgaatttatgccatccaaaggatcagttactttgtcagaaatccgcttgcctctaaaagcagattttgtctgcagtacggttcagaaaccaggtatggtggtgatttttctagattgtgtgttaaattatgaacctcacctagattgaattgtacagaatagaaacaagtaaatcatgcataacaatgcaaagtttgtatctttggcctttaggtccttttattgagatataataaaaataagaaaacttcagatatatatagggataccaatctacacaataatggacattgctcttactgaaagtttgaatataaagttttattaaatgttggatatggtttttaaagttccttttaaaattttatttgtgtggaacacaaatttttttgtgtgtgttctggaataccaaagaaataaaggaatactgaactgatttatacacaatttattttaaaaaatttctttttgaggggaaggagggctagacataggtgagaagcaaatttcaggcatagggaaagtaaatggaggttgtgaaaggtttgagcacttttgtaggaataaggtaatttaggttctaattcttgatgttatctgattttgatggggtgtgggcagaaatttattggtaatttagtatgcgtctggaggtacgtggttattaatgacaaatggtgaagaaatagtttatgtttttattatcatttatctctgagtaacttttatagaaatacagtattttaatttcagttttgaaataacaaaccataatttacccttttgagatatgtactattagttaagaattaagggtcactaggtaaaattcaaaatcagcagaaattgagaaatgtggagtgaaattatttcaatttacataacagggagagaccttgatgatgcttatttcaggattatactgcctacttaagtcttatttagctttttgtgtctggaaagttgattttagtaattttaaaaataaattgtatataaatcagttcaatattcctttatttctttggtattccagaatgctgattagctaaatctgattttgcttgtgcttactatgtaatatgattacttcttacagatgcagcaaattactattacttaattatactaaaagcaggagctgaaaatatggtagccacaccattagcaagtacttcaaactctcttaacggtgatgctctgacattcactactacatttactctgtaagtaaatcaggcttttgatgattcgaatgcatttttctttttgtagagttgatacagtctaaagcattcaggtggcatttataatctttgaaacgccttatgcacattctttttatattgacaaataacccatctttcaatttgttgctttaactcatatgtttctatccttccttttgttgaatagcaccttttttccacatgactgtaggtattacatattttgaaatgatatatacattaaacctggaccatagatttttaacatatgccttaaatctcataatgtacttaacattcagtcttaatgaaaatacgtttatatttagtgaaacatttatttttaaataagagtcaaagtgcagtttgaaaaataattactacttttattattgaagattgtgagttgtaaaacacggaggaaaatattttggacttgcattatagggaaaaaatagacttcttaacaatttttattgactttaaagtcatagtggattcctttacttagagtcttgtaagagtatttgtagcatcatttttaatggtgtgattgaggttttctctcaaggttttacttaatgctttatttttccaggcaagatgtatccaatgactttgaaataaatattgaagtttacagcttggtaagctgataaagccttctaaaataatgaagagtatatttttcttaacaatatcagattataaattaattatgctttgggtttgtgcgtaggtgcaaaagaaagatccctcaggccttgataagaagaaaaaaacatccaagtccaaggtgagaattaaagaaacccagtaaaaatattttcatcagaagtaatagatatcatcataccagttttaatttatgtacaacttttaatgattaggaagtttttggatcagtttcatgttccaatttgtagttactatgttaaataggtatgaatactgaaaataaactgtgagtgatcatgattgtcagtataagttcctgatacactcgggctagataattctattttctctacatttacttggcaacttttataactgcttaaaacttttctcaagacttttccctgagccctcttctctctgtgttctctataccagtacttaataattatgtggtcactttgcaggcataaggttgctttccagccttcccagtctgtgttcttttcttaagtcatcattttaaaaactttttttttttagctctaacaaaaaaggactaacagtataagaaagccttaatcagggactcaagtgtaatgttttcatatttaagaattaattactcaaggactcatgtgtaatgtattcatatttaagaactcattctttttttttttttttttttgagacggagtctcgctctgttgcccagactggagtgcagtggcgtgatctcagcccactgcaacctccacctcccaggttcaagcgattctcctgcctcagcctcctgtgaagctgggactacaggtgtgtgccaccacatctgactaattttttgtatttttagcagagagggggtttcaccatgttagcaagggtggtctcaatctcttgacctcatgatccgcccgcctcagcctcccaaagtgatgggattacaggcgtgagccactgctcccggctaagaattaattattttctatgtaggaatttctcaaggttggatagttttactttctgagacataatgtttaataagaaatatatatagtaagctatcttttcttttaggctattactccaaagcgactcctcacatctataaccacagtaagtagaatttttgagaaattgagcttccttgagaaatcttcatcttacccatacagttttaaattggttaaccatttctgaaccttgagcactgtggaaaattttaacatgtactaatggggggatatccctgtaatttatgtaggaaaagtgttttctgaaatgtatttcttattgtgttaaaagagatgagtgattcatatttaaatctttgtattaaataagggaaataacttatgtttcttcttcacacctttttttttttttttagaaaagcaacattcattcttcaggtgagtgtatcttgaactatttgaaactttagaataaggtaaggaattaagcacttgcatatttacatatatataggccatcttgatttgtgaatgtttaccttgatctcctttggaataatattttctatgtgagtttcttagtaacaggattactggccagagtaggatgcagtttggttgcacctttgttaggtaccaccatagaggcaccagtcatcatgttattcagctctagcagcaggtggcattactctttacttcaacttctattgttctatagatttgttttgtgctttccatactgcagattttacttcttttagctttactgatcataactggcgttgtatcatgtcagaaatgcatctttctagttcactgggaactggaatgctgttaagccaggaaaggccttctttagaatgactttaggcctatctttttccaaaaggaattaggatggagctggtttcactcacttcctttaggctattggtctctttcttctctgtggtgcaagagagttactaagagacctgtacagagatagtttctgctgctgattttgtcaccctgcattataactagcactgaagtcttttccatgttttttatcgggaagttgctttttatgcatacatttttaggtctatatctttaaaaacacatccatcccaattattaaggagtgcttgtacctctttcattaggaaataagttgatttttccccccacatttaaagatgaaggaaaatgaggcagtttttttttctctgtggcagcttaattttcttctactgggatggggtgaggaattgttacttatacttaacaaaagtcattctgaactaaacttaatttcctcgttcttcacagtcatggccagtccaggaggtcttagtgctgtgcgaaccagcaacttcgcccttgttggatcttacacattatcattgtcttcagtaggaaatactaagtttgttctggacaaggtaatccaactttatttctaagggtgtggtgttttttttttaatcttagaaaaattagctcaatggaaatgccacaatgcttttaggtatttgaaatcttcgactgaaaacatatgttcttagaattgcacatttttgctaggtatgagtgtacctaaatgtttttttttttttttgtcttggaagtatgtctcccttttaatagttagaacttcagtggatgcttgcttattctaagtatcacttctgactaaagaagtattacttcctgcatttagatgttaagtttataattttaaaacataatatcttgcctatttccatttctttgtggttttttttgtttttttgtttttttgtttttgagacagggtctcactctgtcacctaggttggagtgcatggctcactgaagcctcagcctcgcgggctcccaccttagccttccaagtagctgggactacaggcacgtgatgccacgcctggctaatttttactattgttttgtagagatggggtttcatcgtgttggctaggctggtctcgaactcctgggctctggccatctgtctgccttggcctcccaaagtgctgggattataggtgtgagccaccttgcccggccagcctatttgaacctatattttgaaatgaacaatattttatgaatttagttttgacaagacagtgaaaggtagattaacctcttagaaaagtacttacgaatctaagagatttccttctcatacttccctttcatattagaagcttcaaaaatcagatctgtgttaacatcactattgagtctttttttcaccaagactattttaaggagtaagacaactagaggcaaattttatttcttgggttgacttctatataatacagtgataatttatattatcatgtgagatttctgtagtgcgaatatagagatgaagaagtgtaaaaattagaagccctggtttctagtatttacccttagtgatttactctttaacattgagcaaagtcacctcatctctctagggtcttgttttccagtacagaaatattagtttagcctgaaacaatctaaaattctatgaaatgctttcttttagttgatggacaaaaagcagactgtatttgaagttttgattactattaatgcatgaatgtgttttaacaagttaattttaaaaatttttgtaactttttatttagtaattcagctactttaaccagttgagtgatcctgggtctttttttctctgtctcttattttgtctgttttagataaattatgatgtaagagagcgagagctactgggctatttgttccaggaaaaggttgccattattttctttgcttgaaattaatgagcttaaaaatcaatccttaatttttgatctacatatatttgttttactaactatctttttgtttactttgaataattaaggacattatgtacattattctatcatgagactcttatagatgggtgtctttttctccactctcaatactttaaaaccttctttgaaagttttctattttttcaatgcatgtttggtgtttgggtctttttccatattctttcttctctcttatagttcattataatcctatattcacatcaatattgatttttctaggtacaattagaataccaattagtaactatatttaaaactaaaaattattcaatatttttgacctgtatactggaagagctattggtgatgttttaaataaaagcagattttttttttttttttttttgagacggagttttgctctgtcacccaggctggagtgcagtggcgtgatcgtggctcactgcaacctctgcctcctgggttcaagcgattctcctgcctcagcgtcccaagtagctgggactacaggtgcatgcaaccacatctggctagtttttgtatttttagtagaggcagggtttcaccatattggccaggctggtctcgtgctcctgacctcaagtgatcagccctccttggcctcccaaagtgctgggattacaggtgtgaacactgtgcctggccaaaagtagaaaatttttatggtcttaattggctaataggtatattgctagatagatgaccctttgcttgttaattttgaaattataatacatttagcactgaaattatactgaatataataatatattttggaagactttttaaagttttttttttgttttgagatagagtctcactctgtcacccaagctggagtgcagtggcacgatctcggctcactacagcctccatctcccaggttcaagcaattctcatgcctcagcctcctgagtagctgggattacaggcgtgcaccaccatgcccagataatttttgtatttttagtagagacagggtttcaccatgttacccaggctagtcttgaactcccaacctcaggcgatctgctcgccttggtctcacaaagtgctgggattacaggagtgagccactgcgcccatctaaagatttttaatatttttgtaaaggtcagttacaaacattctcttggttaaagagatgctaattaacaaaatgctggatggtattttttattttattttaaattcttaaaataggatttgcaaattagataaccataagaattgggattttacgaactgtgttttttactcagtattgtcacatagccagtttctacatatgtaagagatttcattaatctctaaaatgaaagagatttcaatgacatatcttaaatatagactgttcttttaaaaactttttttggctgccattttgaatcaaaatgtcacatttacaaattaaaattaaattatattcccattcacttaactcctttgaatttataacttaaatagccaaccacatgattgagtgcaaaatcaaaccactcagtttaatttgttgtgtcttttactcttgagactccttctcagtcagatacagtacgatttagaagtaaaatctggaacaaattttgtgcttttctgagtgaggaggggaagcaaatatttgttccaattgcctgggtttgatgtaggagaatatctaaaatagttaagtttgaatggtcttgaagttggtgggaaaaatttaaggccttctacactcatgtaataatcctatttaattgtcactgaaagagtatacatgtctttcctgccttgtcagatactgtcagtacaacgcagtcttggtttattttactggtgccttgaccagtaatacaacaatcacagaggttatctgtgaggtccttccagagtggaatttctgttgaggttaatccagttggtttgctctgcggatttaggacaccactgtcagtggatttccattttatttgaggctattcagatctgatttaaagcctggcatcctggaatttaaattacaaatcttagtgagtcagactttcaaaccctttctttgaatagggaatccaaaacagtcatagttttattatactattatagataaagggagaaggatgtcccaaagttcctcttctgacttaaaggaacctcataggtatttataccttttaggaaatagaaatgtcaatttaaatattattagagcaaacaattttgaagtaaaacaaccaattaggattatacagttttgggattgaagaaaatggttaggcattctggtatgccctgaactatccagtttatacctgttggccttgtgtaattattaatggtgcccctttcaccctcaaaaatatcccagcatataacacattacacagtctccctggttgtaggttatattttacagctcttaacataatctttgaagtgtggatgtcttaaaagactcctttgttaaacacaaaacagaataggatcatacattttcacacaagtctccctccacactcaactagggggaggggtagtaaacttgacgtttttgtgaatattttcaatttacttctttatcaggacaagcttctaaccaaaaatattgtctacttttcctcagctacagagtaagagggcacattttcttctcattgttctgatttttgttatcagtagcatgctctgtgctaaacaatggaattctgttaaataccattgagaggaaagagcctaaggaacttaaaactcactgtaaggaaaagcaaaaagggaatttttacaaaataggatgatgaggcatatgatgttttggttctgcattgtggatcggtttcaaatttgggcagttggaggttcatctcatgaaattagtctactgaaatttatactttttgtcttagaattccccctttaagttatctttgctatgttagagggtcaaatcattggaaactaattatactaaaaactcaaatttagacttaactaagattaatccagttgggatgccattctttttccctgggcaatagaaatgacagacacttccatcttcctttctatcttgactcagaagtcaatgttactttagatatctgtctatctatctatctatcatatatatatgtgtgtatatatgtgtgtgtttgtgtgtgtgtgtgtgtgtgtgtgtgtgtgtgtgtgtatatatatatatatatataatatatatatatatattaccattttattcttgatttcagggacaaatcattgatggaaccaatccaggccttgtataaccaaaagactagcagttggcgtttatcttttcccttcaaggcttgggtgttagcagctttatagataagggcagttctgatcataaacccacttacctttacacaaaacaggagttagcctatcccttctgccttaaattctggttctcacttccttgctaataaatgtcccttgtggctttcttttttcccccccagaatagggcacttttatctgaattaaaaatttgttcaggttgggcactgtagctcatacctacaatcccaacactttgggaggccaaagtgggaggatcgtttaaagccagaagttcaataccagcctgagcaacatagatgatgaaaacagttttttttcatcaaagaataaaaaaatattagctgggtgtggtggtacacacctgtagccctagctattcagaaggctgagatgggggaattgcttgagcccagaagttcagaagttcaaggctgcagtgagctatgatcacgccactgcacttcagcctgagtgacagagtgagaccttgttttggaaaacaataacaaaaaacaaacttgttcaggcagatatcctttttcttcactgattttcttaatggtgtctgggaactcatctcctgtctcatttggtagaagctgcttcttctgttgtatcttgacatttttaaagcctctttctaaaattatcaaaccatcctttgctggcattaaatattcaagttgaagatccttcaccttcctttaatcctatattagagtctataggtgtgtctttcttatagcaatcctgcactcacataaaaactgtattttcaatataagatcaaaatgtatttcacaaaaaatgcatctttatatttgtttacatttctcctgactgaatggtgccatgtacagtctgtgtaagttatagaaaacgtttgccaactcgtagtctaccattttgttatttgttttctatttgtttcgtctgttctttactgctttgttttccctttcctgccttcttctggattaattgagtattttggtaatcctttttaatctcctcttttggattttttagctatacttacctgtttttgtttttgttttttaaggcgttggtaggaaataatgtatgcatccttaccttattaaagtctattttgaaatactgttacactgcttcatgtaacttacaatatgaacctcacaacagtatagttcattttcccatcccagtatattttacttctttgttataaaccacacaatgcactgttgttactttttctttaatcagtttttttcttttttaagagatggggtcttgctatgttttccaggctggccgtgaactcctgggctcaagccatccacctgccttgcctcccaaaatgctggggttacagttgtgaactactgtgcccagcctcttgaatcaatttttaaaagaaacttttatatttttataaactggtccttatatttaccatttctggtgttcttccttcttgtagattgagaattccatctgaagtcattgtcctgtcaagaagaactgtctttattatttcttgtaatatagttctgctggaaatgaaatctctaggttttgtttgtccagaaatatttttatattgccttaatttctgaaggatattgtcactgggactgctaaattgacaggtttttatcttttcaattctttaaagttgttaatttattgtttatggctttaattgtttctaataagaagtcagccagccatcattcttttctgtttttttattttgcatttttaacggtttgattttaatgtgcctacgtgtagttttctttgtatttatcctgtttggtttcactgagctttatgatctgtaattagttgttttataagtcttagcaaatactcagccattgtctcttaaagttatttcttctgccctgctctctcctttctgaaactccagttaatgtagactattgactatttttctacaggtctgtgacattctttttggttttcatttaattctttttttctttgtgcttcatttttgatggtttctatttatcagttcttcaagttcacctgtttttttcttgatgtgatctaggctttgaagcctagccaatgcatttttaaattcagacttttttttagttctgaaattttcatttggattttttttatggtttcaatttctctgctgaagttctccattttctcactaatttttctccatcttttcatctaaatattttaatgttgtataaatgtttttgttttctaattctaacgtttagatcatctgtggatctgctattgacaggatttttttccccttgataagctccgtgttttcctactttttcacatgtcttgtaattttttaactgtaggccagatattatattataaaagaacagtagagactgaaataggtaataccttgttcttttgtctttcagacagtatagattagggactggtctcttatgtaatcagaaacagctgaaattaggctatggatagatttggttcaagttttgttttaaatgctttgagaatggtttcaggccccacttttgagcagaactttgagatctaagtactgcacgtctacaagatttctctctgctttttagacatgtcttcaaccatcacttctcagcaaaattcctgttggggagaattggcaggtagggagagctagctctgcctctgcttcttgagatgcctgtctacctcagcctgggctcaaccattgaaggctcaactggtttctccttttccctgcaaaatttgttgcttatggcaaggttgctcctctgctaagttgctaagaatattttcttacatgtttaggttccttttctttaaaaatacttctttttggccaggcacagtggctcatgcctgtaatcccagcactttgggaggccgaggcggctggatcacttgaggtcaggagctcaagacctgcctggtcaacatgatgaaaccccatctctattaaaaatacaaaaattagccaggtgtagtggtgcatgcctgtaaccccaggattacaggagaggctgaggcacgagaattgcttgaacctgggaggcggaggttgcagtgagccaagattgtgccactgcagcctgggtaacagaatgagactctgtctcaaaaacaaaacaaaacaaaacacttgtttttgttgtgtaaatggacatgcatgaaaaatcacctatagcaacagaaagcgtatcattggtttcctggagatgggaatacatggaggcaggattatgggagggagctttagagggtgatggaaatgttcattattatgattgtggtcaaggtttcatgggttataatatacatatatcaaaattcatcaaaccctacactttaaatatgttcaatttattgtactcaatatagttgtaaaaagattatgttcagttaattatagacaccttaagtgtagcattcagtgagttttaacaaatgaatacacctatataaccaaaacctagtcaagataagggacatttccatcactcccatctagtcaatcccagccactacaggcaaccattcttctcatctctgttttcaccctagattcgttttgcttgttcttgagcttcatttattgtttttattttttatttttatcttttaaaaaagaaaatagagatggtggggggggggtctcagtatgttgcccaggctggtcttgaactcctgggctcaagcgatcctcttgcctcagcctctcaaagttcagggattacacatgtgagccgccatacctgggcttgaacttcatttaagtggaatcaaagaatgtgtactcttttgaatctaatttcttttgctcagcgtgatgtttttaagatttatccatggccgggcgcggtggctcacgcctgtaatcccagcactttgggaggccgaggcgggcggatcacgaggtcaggagatcgagaccatcctggctaacacggtgaaaccccgtctctactaaaaatacaaaaaattagccgggcgtggtagcgggcgcctgtagtcccagctactcgggaggctgaggcaggagaatggcgtgaacctgggaggcggagcttgcagtgagccgagatcgcgccactgcactccagcctgggcgacagagcgagactccgtctcaaaaaaaaaaaaaaaaaaaaaaaaaaaaaagatttatccatgctgctgtttatgttagtagttcattgttttcaaaaaataatgtattgaaatgaaattcatgtaaccaaagtaacaattttaaggtaaactattcagtggcatttagtacattcacaatgttgttcaaaatacctctgtctaattcgaaatatttttatgtctctaaaagtaaaaagtcttactcattaagcagtctttgcccatcttccctcccccgagcccctgacaaccatcaatctgcatttggtttctatggacatatctattctgtatatttcatataaatgggatcatcatacaatatgtaactttttatgtctggcttatttcccttagtgtaatgtttcggaagtacatccatgatgtagcatgtattagaacttcatttctttttatggctgaataatattctattatatgtatatacagcatttcatttatctgttcattcattgatagatatttgggctgtttccgcattttgcctattgtgaatagagctgctttgaacatgtgtgtgcatgatttgagtacctgttttcagttcttttgtacgtatacataggatatacataggagcagaattgtgggatcatgtgataattatttttaggaactgctaaactctttttcaaagcatctagaccatttgatatttctaccattaatgtgggttcccattttcctacatcttttccattgtttattttctgttcgttttatttttaaattataaccatcctagtgggtgtgaagtggttcctcattgtaggtttgatttgaacttccctaatgactgttgatgttaaatgtcttttcatgtgctcattggaagacaaaatgtgtatctttgaagaaatgtctattcaagtcctttgccaaattttcagtttggtttgtctgagttgttttagttgggttgtctttttgttactgagttgtaagagttttctttgtatattctggatattatcagatatataattgacaaatatttcaaaccattccatagactgtcttttcactttcttgataaagtgctttgatgtgcaaaggtctataattttttttattatggtaaataatacatggtatttatcttttgaagaaatttttaagtatacagtgaattattgtgaactataagcattatgttatatagcagatctatagaattttcttcattttgcatgactgaaattctgtactcgtggaactgcagctcctcatattctcctccccactccctggcagccaccactgtagtttctgcttctatgaggttggctactttaaagatttcatatgttgcttttcagccttttggataaggtcaaatgtagatacttcatgataagtggagtcgtgtagtgtttgtctttctctgactagcttatttcatttagcataatgtcctcaaagtttgttcatgttgtagcatatgacaggatctcctttttctatgctaaagaatttttcattgtatgtatgtaccgcatttttttggcctcttcatttattgatgggcacttagattatttccatctcttagctattgtgaataatgctgcaatgaacgtgagagtgcagatagcacttcaagaacccatttcaatccttttgataaatacctggaagtgggattgctgggttatatggtagttttattttttcattttttttttgtggaacctctgtagtaatgaaaggtttttaattctggtgaagtctaatttatctattttttcctcatgttgcttgtgcctttggtatcatatctgaaaatccattgctaaatccatgatcacaaagctttacctctatgttttctttctaagagttttattttattttattttattttaaaaatttttttttgagagtttcactcttgctgcccaggctggagtgcaatggcacaatcttggcacactgcaacctctgcctctgtgttcaagtgattctcctgcctcagcctcccgagtagctgggattacaggcatgtgccaccatgctggctaatttttgtatttttagtacagatgggatttcaccatgttgaaggtgaaatcccttcaaggccaggctgatcttgaactcctaacctcaggtgattcacccgcctcagcctcccaaagtgctgggattacaggcgtgagccaccgcgcccagcctttctaagagttttataattttagctctcatacttaggatattatccatttgggtttaatttttataaatggtatgaggtgaaggtccaccatcactcttggtgggtgtggatatctaattttctctgcaccattttttgaaaaggctgctcttccgctttaaatggtcttggcatccttggcaaaaatcagttggccataagatgtatggctttatgtctggtctctcaattccatttcttttgtccatatgtctgttcttatgccagcaccacactggtgtttttgattttgtttctttgagacaaggttttggtcttttgcccaggccagagtgcagtggcatgatcatagctcactgcaaccttaaacttttggactcaagtgatcctc

SEQ ID NO: 1850 - DNA, 13069 bp, Homo sapiens
gttggcagaaggggccgtctggccaatcttgctgcaactatttgctcctgggaagatgatgtaaatcactcatttgcaaaacaaaacagtgtacaagaacagcctggtaccgcttgtttatccaaattttcctctgcaagtggagcatctgctaggatcaatagcagcagtgttaagcaggaagctacattctgttcccaaagggatggcgatgcctctttgaataaagccctatcctcaagtgctgatgatgcgtctttggttaatgcctcaatttccagctctgtggtaagtcagtatcattttggtctttggaagccttttcttttttcgttatgagtggtataatacatctgtgtgtatgtgcaggtggatgggtggatatatgttttataatagatgcatagtgagtttatatgtatttgtaagatatcggtttcttagaaagtgaaaatcgttaagttgggtacccatcccaagatcaattagcagttgacagctgaagttatactaatttgatgcaaatccagagtctataatggaatgatagagcctcttcttagtcattaaggagagcactgaaaattaagtcctctgttataatgctttaaatatatatatgagaaatttatataaatttatcaaatatttctgaaaagatatataacaaaatagtagctatagttgcctccaggaaggcaaattgccaaacagggtgtgatactttcactgtatatccttttgaaatgtttgaaacttttactttgtgcatgtgttacctcaacagttttcaaaaaacaatcttaaataaaaaggaaaaataatttcgtgtttctgaccattgtcttttagtgtagagctaggctttagaattagacctgcattgaatcccagctgtactacataattagaagtttggctttggacaaggtgcttaatattgcagggctttatttttctatgtgtaaaataggaaaaaaaggttatttggagggctaaataagagtcataaagcacttagcatagtacctggctatgtataagtagttaatctattaactatgaagtacatgatactattttgttaaatttttattgacttaattaaaatgtaatttggtctaatatagttaaaaatttgataaaggtactagtgcaataatatgaataaaactttttttttaaataaagagtgatcatactgctaatacttcattacccatgagtatattatgcagactaacccacatattatgatttaaatcatagcattttttaagttggttttttttcccaaatctttcaaatttgtttgatctattagagagcaaaatcatttcattttcataaatcttacataaaggctatcaagtaaataggacttgaattgttttgttataggactatttttagatattgtgaatgttgtttaccctaagtgttttcatgtttcagaaagctacttctccagtgaaatctactacatctatcactgatgctaaaagttgtgagggacaaaatcctgagctacttccaaaaactcctattagtcctctgaaaacgggggtatcgaaaccaattgtgaagtcaactttatcccagacagttccatccaagggagaattaagtagagaaatttgtctgcaatctcaatctaaagacaaatctacgacaccaggttacgtatttataaaaaatttagttattgctgattatattcaggatatctattctcagcattttaaatattcaattgtgaatggtacagcaatgatttgccagggccaatgcctgaatgttccaaatgagacctcagctttagttgattcaatgaatatttattaacgtagactagcctacttactggttaaaggacttaatatgttacattttaacagtttaaacatgctttttccaggatgatcatgctagattttttttctatattttttgattcagacaaagcatgtttaactggaaatcacattttaggggcataatggagaaacattcttgtagccaagtgtgcagagcagtgcttctcaatcttgagtatgaaggcacctctaatagcagagggaagtgaatgtgcatgcaaatgactccacttctaattttatttatttactaaattgataaatgatagaaatttttgaaaaaattgctgtttattgataaataatagatgtatatatttcgggagtacatttgataacttaatacatttatataattcgtaaagatcaaatcagtgtaacgaggatatccatcaccttaaatacttgtctttatgctagaaacatttgaattcttctcttgtagctattttgaagtatacaatagattattgtaaactatagtcaccctactgatctatcaaacactgggtcttttttcttctgccaaactgtatatttgtactcattaatcaacctctcttcatcccccagttatatttatctgtgtgtatattgtgtgtgagcatttacatataaaacaaaatttcttaccatcgtaaactgatactccaggaaatgccatatttatcttgtggtgatttataccttctggcacacttccacgtactgttaattgagaaacacaggactaaaatatatggtaattgagtttattctgaactgtattcattttcattggaaagacttttaattctaaggtttaactttttgaaaatacaacctctgcagaaactatagttcatcataaaggggcagtaaacagaaatgagagtggggaagcggttatggggtaggtagaaatctgcaatttccagttgagccagaatgagaattggaaacaatagcaagatccccagatggaataggactagttagtcccaattttctaaagacttaagcttagataagaggcattctttttaattgttcttggctactggatatacccagaatcacatttccagggtttcagagatatttattttagatacttcattgtattcttaatggactctagtttggaatatggcctgaagtagtaataagtgataggtgaagtcctcaaattatggccgtggctcaaattctgccctttgcttgtttttgcaaataaagttttattggagcacagccacacccatttacttacatattctctgtggttgctttcattctgtaatgcagagcagaatagttgtgacagaggccatatggcccacaaagctcaaaatatttagtgcctggccctttataggaaaatatatgctaatctttgatatagataagcctatttttttataatacaaccttagaatcctcttaatgggagtgatataggcccaatttgccctactttaaatttacttcatactatttcaatgagtgctgtggggttttttgttttgttttgtttgctgttttttgtttttgagacagggtctcactttgtcacccaggatggagtgcagtgagtggcatgatctcagcttactgcagcctcgacctcccagattcaagagatcctcctgcctcagcccaccaagtagctgggactataggcatgccactacaagtggttaattttagtattttttatagagatgggattcctccatgttgcccgggctggtctcgaactcctgagctcaagagatccacccgcctcggccacccagagtactagggttacaggtgtgagccactgcaccccgctgaatactattttaagacactgtaaagtcaaggtgtccttttgataaaatgaataatccctaattttccttctgaaggaaaaaaaggcaaaattcctttattttcacgttaggcttcctaaaagcagggtaaaataaattgactatagatatatgtaagttgttggaagttaccatggccagcacacttcgtgatgaaggtagatttattaatatacatacagtcaatttctaattatttaaattctggttgttcagtttgagagttttctaagccctactgccctctcctcattctaccttttcaaaatttttttttttttttaaataactaaattctatgagtaggttttagggcatgtacttaaatagaatagtaaactttttaaaattttgaagtatttttatagtctactttgtgaatgaatattcctgatagaatcaaagcattttgaagctgtaatgtagtttagaactttttccatagaaatcgtaataattttttattttgaatagcctccaaaaatgtgtgtgttttctgtaggaggaacaggaattaagcctttcctggaacgctttggagagcgttgtcaagaacatagcaaagaaagtccagctcgtagcacaccccacagaacccccattattactccaaatacaaaggccatccaagaaagattattcaagcaagacacatcttcatctactacccatttagcacaacagctcaagcaggtatggtgtactgcatttaacattattcatcacatggtctctgcatagaacctagaaatcaaaatgggttctgatgccagtctttttgactgagataagtagcatcttggttttctgtatcactaatttcagacaagattgggcacattcagggtggtatggccgtagacagtatcactcatctcaaattagaaatattgtcctgaattccatgtgtattatgaactttttaaactgaaaactgtttaaactttttaaacagtttaaaactgcaaacaaggaaaattttagtagtgtttggatgttaaacatgctaccggctcttgtgtaaaatacagcttttgatgggtttaggaacgtcaaaaagaactagcatgtcttcgtggccgatttgacaagggcaatatatggagtgcagaaaaaggcggaaactcaaaaagcaaacaactagaaaccaaacaggtaatgtaaacaagaaatataaaaacgaacttggtccccaaatagttgggatctaatttgtagttctgtattggcaaataattctttacacatttttcttttccaattaactctgtcacttttcgtttataaatcccttaaatgtgtgtaccaactcttgcttttcttgtgatatttttctatttcagtggaactcttcaccatattcattgatgaccttaaaatcaaattttacaaaaattattttcatcattcatttgatttcagagtctacttaatattccacttagatggtggttctaaaatatttcgagagtctacttttctcaatgatgactgtatacctttccccagataccatgtctttagactatctgggatcctttcagtcaccacatacctcccacattgctctttattccggtcaaagttcattaatcagccttcaacaaaatctctacaatgtaagctgtgttctgtttaatttacatgtctacaaagtactgtgttaggatatgtttttaagctaatagaattatatttacagtggggactaatagaaagtaaaataacagtaaatttaatcagtattctttgagaaagatctacttgattgatttgttttttatcagttcacttgcttaacaaatcacatttcccagagttctgatctcaacctttttttctcagttgctctggaacatctcttccctgtccacatacctagattccgataatcactgaaatgctgatgatgctcagctccgttgtgctgatatctctcctgagctctaggtgtggttggctagcaaagcctgctatgctttgctgtagtatcttccccttgtagtctctgtcttctcttgttggtttgctctataccttgtcatctaaaacaatctggaagttcttccttgacttcttcctcttgtttactgtgtcttcccttctgcttgcccctagcacacatatgcataaacacacacgtgcagtgataagttttctaaatctgtcacccacctgcctcgtcttccatattttcctctgctattaccgaagttactgctgtagctttgtactgaacatcctgcttctagtctcgctaccctccagtccaccttatcagttgctgccagagaaatatatatatatatatatatatatatattttttttttttttttttgacatggagtttcactcttattgcccaggctggagtgcaatggcacgatcttggcttactgcaacctccacctcccggcttcaagcgattctcctgcctcagcctcctaagtagctgggattacaggcatgcgccaccacacttggctaattttgtatttttagtagagatggagtttctccatgttggtcaggctggtctcgaactcgtgacctcaggtgatccgcccgcctcagcctctcaaagtgcagggattacaggtgtgagccaccacacccagccgagaaatatttttaaaagacgcatattcatgtattcacttgcttaaaatcttgaagtgctcctcatagtcatcatcagaaaaaatgcgtaaactgcttggcttgacatatagaatgattcctcacctggctcctccccactgctcctccacaggtatgcttcagtcctgccatgcaggctatttgcagtttctcaaatatacccatgtttttatatctctctgcctttgccttctgttctctgccaggaatatttccctggtgagctcctacttcattaagaataggtcaaactttaatcccctctaggaattcttccttttctcaaagtgtcccactttttttcacccatgtcatcctgtgtatacctcaactagaatatttatcttcctgtgaatgttgtaagtttgcattccaccactgcctatgggagtcttctccacctctgtgtccttagtgcctggctcagactaggggctcaacaaacttgtatttgaaggaaggaagaaatgcgtttgctgatccttcccatcagcatataacaagctattatctgccatctgaaaaaaaaaacaactcttgcaacccattcccctccttttctttgcctccatgtcatgcagactcttctacaagttattcctacttgctgctttcaggtttcccccttctctttagaattctatctgcttaagctttgccaccactccttccacgactcagtatcctaatcacgtttgtcagtgatcttcacctactaatcaattttcagttgattagtagcatttgacattgtcgatcactcttctgttgggagcgccttctttacttggttgccagtgtatcatattctcatggctttctgccagtgtctctagaaagtatagagcagggttcttaaactattttgtactaaataattcccaataaacctgtgaaattcctcccagaaagttgcacatatgcatgtaaacaaaattctgaacacagtaacagtgcagagcactcatctgtggtctccacagactaagcagccaaagagctaggaggaaaatgtagttgaaggcagtgtctttaaagtcaaggggctcggcgtggtggctcccgcctgtaatcccagcactttaggagactgaggcaggtggatcacttgaagtcaggagtttgagaccaacctggccaacatggtgaaaccctatctgtactaaaaatacaaaaaaaattagccaggcctggtggcgggtgcctgtaatctcagctactcaggaggctgaggcgggagaatctcttgaacctgggagtcggaggttgcagtgagccgagatcgcaccactgcactccagtctgggcaatggagtgagactccgtctcaaaaaaaaaaaggaaataaagtcaagggaagaaagaaaactttcgagaaggaaggcatggttggtattgttacgtttcaaatgtgggttaagccaaatctactgggttttgaagcaagaagtttgctgtaacgtggcaagagcagtgttagtgaagaggtgaaggtggcgtgcaggtggtgctgtgtcgaggagggaacgggcaagaggagcagagccagtgagtgcaggcatttcttagtttggtcctaatggaggtgataaaggaggtagtggctagaagacatgaagaaaagtatgatttgtatgtgttttgtcctttctgagacctaagtcaatttgtgtgatgggataaggggtgataattgatgggatgaggtgagaatggatgaactccgcacagtgaagggaacagaactgatgaggacaatctcctgtgtgacgaaaaggaaggaggaaagtagcatgtaggggtgatggtagtcttagagttaggatagcaaaaactgatggactttcttctgaaagctcctgttttattcatccttaggaaagggaaggtgacaggggaaatactgtatggaggaaagaagagagagctgactcagacataggaagaatagggggtagtattgaggcttagatgagatatgagaccgtagattttatagtggaaccatttgatcgtttactttgctttttgtgtttttaaaaaatttttatgtattttttaatccactcatctgcatgctaattacattgtttttacacaaccaaagctgcttctaacttgagagacaataaagtctggaactagacctggaacaagagtacctgggtttgtatactggctctgccagtcactaactgtgtgcaagatacttaacttttttgtgtctcagttctctcatctgtaaaatggagatactagtacctaacatagagggttattgagaagattaggtgaggcaatagatataaggtgcttagaaaggtggctggcacatattgagctctgtataagtattagctgcctttattttactcttatttgattatttctactatgacttcattcataaagtcttcttttatttctttgctgaaataatctgtacaacaatataaagtctttaaacatacaaaatagtgaatgttcctcttaaataaccttgctaatgaataaaaagactcagacgagggaatgttttcttctcttctcttctttccttaccttctgatctgttttgtccttgttttctcttgctcttaccctccgggtaactgataattaaatggaatcctgatgtgtaggagctgtcaccagatgttataggtgtgggttgagataagtgacataggggtgggtgtttttccctttgtgtggctttcactttgtttttttattgttattttattttattttattttattctaccaaatacccagacttcaaggagaggctttcactttgattggcttatctaaaactgagccctgatatgaattttcattctttcttgccacctcctctccaaaaaaatttttacatactgagaattaccaagaatgtgaactagcactgagggtttgtcgtgttctgaacaaggctgggcctattcacatacactatctctttggttctaaggaaacttatacagaataatatttaataataatcttgtttcatttaataacatagaaagataaaatatatagttttgagaaataaaatttacttttcattcgctttttgcaggaaactcactgtcagagcactcccctcaaaaaacaccaaggtgtttcaaaaactcagtcacttccagtaacagaaaaggtgaccgaaaaccagataccagccaaaaattctagtacagaacctaaaggtcagtgtttccagattgttcatggttagtatgtagaaactcaaatgatgtttgtgtgttgattttgtattctgtaactttgctggatttgtttgttctaacgttttttggggggaatctttagggttttctttcttttttcacttttctttgagatggattcttgccctgttgcccatgctggagtgcaatggtgtgatctcttggctcactgcaaccctcacctcccgggttcaaacgattttcctgcctcagcctcccgagtagctgggattacaggcgcctgccaccatgcccagctaatttttgtatttttagtagagatggggtttcaccatgttggccaagctgttctcaaactcctgacctcgtgatctgcttgccttggcctcccaaagtactgggattacaggggtcagccactgcgcccagcccagggttttctacatgtaagatcctgtgatctgtgaatagagataattttactccttttctaattcaggtgccttttattttcttatataattgctctggctaggactttcaatgctgtgttgaatagaagtcattaaaacaggcatctttgtcttgttcctcatcttaaaggaaaagcttttaatccttcactgttgagtgtaatgttagctgagggcttttcatatatggcctttgttacgttgtgtaccttccttctattcctagtttttgagtaattttattggcactttgtttttaaagtaaaaaacaaattgcagagtagtggtatgtatggtatgatcacaaaacaaaacaaaatgatatgtaaatatgcacaccttgggggaaactggaaaaacaaacaataacctggtaatattgctgtcccatttctctctcggtgggggaaaagttaatgcatttatgcctagtgttccattattggaacgctaagcttatgggagttacttatgtcctcctgctcaaggttgtcaccaagaactgatttttcacaaaataaatttgcaacctccagcataaatgggttaagagaggacaggtgttcagggaggggtgtttctatacatttctgggtttggatattttaaaacgaatacatagttttataatcagaaaaaaaaaacacacacaagattccataattagaaaattataggttcttatatatattaatatggtctttcttaaacatttttaggtttcactgaatgcgaaatgacgaaatctagccctttgaaaataacattgtttttagaagaggacaaatccttaaaagtaacatcagacccaaaggttgagcagaaaattggttggtttttattctttatttattattaactttgcacatactataggaaataatatattgatagaagcacatattcaaattgagagtatctctgctttttaaattaaatcagaatacactgtagcttctaccaagatgtggtactgttaacagttactgctagctcacaggcacctgtgaaagtgtggttaagaccctcactgactttgacagggataggaaagttgctgccctcccacgctctgtactggtagaggggtgtttcagggaaaaactctctgggattatgttttcctctgttttcataccaccacaacaatcatcaacacagaagacttttgtgaccagttcaattcaattcaattctgacactagctacatggaagtagtgtcagatcccacaggttggggactcagtccccaagactgcctcctctccttcagataccagttgcaagtgcaagtccaggcctctcaaacttcctttttttttttttttttttttttgagacagtctcactctgtcgcccagactagagtgcagtggcacgatcttggctcactgcaacctccacctcccaggttcaagcgattcttctgcctcagcctcctgagtagctgggactacaggcgctgcccccacacccagctaatttttgtatttttagtagagagggggtttcaccatattggccaggctggtctggaactcctgacctcgtgatctgcctgccttggcctcccaaagtgctgggattacaggcgtgagccaccatacctggcccagggctctcaaacttctaaccgaccagcttcaagctgaggtttctgtgaccccctctttagcttggattaattggctcacagaactctgggaaatacttacgtttactgctttattttaaaggatatgggtgaggtatacggaaaggggcatggagcttccattgccttccctggggcgccaccctccaggaacctccacgtgttcagttatccagaagctccctgaacccagttctcttgggtttcagtggaagcttcataaagtcagcattccctcccccagggtatgaggctggatcctctctggtgaggggtgaggtgggtgtgggggtcgtcttaagaaccacaatgagaaagataggagaagattagagtcctgccgtggggcaggtgaaaggatggcaggagagttctgtttcctgtgaggcctaatgcacccaacattataacgaaagacagtaactagggatacagcagttatgagctaggaactgtggacgaaaaccagtatatatcataataccacaaggtgttagcagcccctgaaggttattatcgaaccctgccctaagtgacattaatattttcctattattgactgctgtgtgaaagggtagctctcaacgatagaaaaagtcatttgagagaatattttttgaaagtctgaagtctttggctattattctacatttgagttcttaatgcttttacttaaacccaaggtattgaatcagttttgatagacccaatattcatttctttttctttttcttttttcttttttttttttgtctcagacagagtttcactcttgtcccccaggctagagcgcaatggcacaatctgggctcactgcaacctctgcctcctgggttcaagtgattctcctgcctcagcctcctgagtagctgggattacaggcacctatcaccacgcctggctaattttttttgtatttttagtagagactgggctttgccatgttggccagacttgtcttgaactcctgacctcagttgatctgcccaccttggcctcccaaagtgctgggattaccaatattcatttcttagaaagtgttattgaagctgaagattttcttggtttcatttattagtagtattttcttatttttctttttaggaggtgcttttttttaaggcattttttcctatttagtaagaatatgaatattaaattttctttgttatgcctttaattcttaaatatctgagtcacagtgtccacctattgaaatatttttcagaagtgatacgtgaaattgagatgagtgtggatgatgatgatatcaatagttcgaaagtaattaatgacctcttcagtgatgtcctagaggaaggtgaact

SEQ ID NO: 1851 - DNA, 317 bp, Homo sapiens
agagttccagttgctgcacattcacatcaatacttggtattattggtctttttaattttagccattctagtgggtagatagtgttaagcaacttttcatgtttttactgaccatttatatatcttttttatgaagtgtttgtttaaatctttggcccatttttattggatcatttgccttattattgaattgtaagatttctttgtatatactttagatctaagtcttttttgtcagccatatgtttctcaatatttcccctagtctatgccttgccttttaattttcttttttttttctttttttttgagatagag

SEQ ID NO: 1852 - DNA, 317 bp, Homo sapiens; identical to SEQ ID NO: 1851

SEQ ID NO: 1853 - DNA, 303 bp, Homo sapiens
gccaggcgcagtggctcacacctgtaatcccagcactttgggaggccgaggcgggcggatcacgagctcagaagatcgagaccatcctggctaacacagtgaaaccccttctctattaaaaatacaaaaaattagccaggcgtggtggcgggcacctgtagtcccagctactcgggaggctgaggcaggaaaatggtgtgaacctgggaggcggagcttgcagtgagccgagattgtgccactgcactccagcctgtgcgacagagcgagactccgtctcaaaaaaaagaaaagaaaaaacat

SEQ ID NO: 1854 - DNA, 303 bp, Homo sapiens; identical to SEQ ID NO: 1853

SEQ ID NO: 1855 - DNA, 316 bp, Homo sapiens
caaaaaaggaaacagattttgtgtaaaggtgggtgggccaagttcagcttcagaggtattgagctagaagtgtctgcaggttatctgtctagaaatgtacagtggacaatgaaatatttaggtttaaagttcaggagggattatgtttctgaagccaagatcctgactctttcactagctgctgactctggctccagcatcctgtgctggattttcaaaagaaaaacatggaagaggaaacagcacatggcgaagtgatcctggccagcgatggtttcgatatactttatcatctttctgggttttttccactaaa

SEQ ID NO: 1856 - DNA, 106 bp, Homo sapiens
ggagaatggtgtgaatctgggaggtggagcttgcagtgagctaagatcacaccactgcactccagcctgggcgacagagcgagactctgtctcaaaaaaaaaaaaa

SEQ ID NO: 1857 - DNA, 331 bp, Homo sapiens
tgaagccaggcagataactgttcctcagatttcagtacaactaatttagtattatattacaattcaaagactgctatttccattataattattataagagaatgaaccaattatatttttcttgttaagcaaactacatggtatgttagtgtaatgtgaaaaatagataactgaaagttttcaaatcttaattcttactgactttttgtttccagaaaagctttgacctggaaatactacgcaaaaaaaattctttactacctgcggcaacagaagatcttaaataatcttaaggcctttcttcagcagccagatgactatgagtcgtatc

SEQ ID NO: 1858 - DNA, 536 bp, Homo sapiens
attaattggtcacctttgaaggataaatagaagcccatatcattgttttgaaaaattgtaaatagaagatatgagcatttatcctgccttttccatgtactgtatcatgggggatcaaataatagacggggaggtttttccttatagaagtatcccagctaatgaattaagaagggttgattgaattttaatatcaccacttcgtaacctcaaatgaatgaacagatcaagacattgagtagcagtgctgctgacatcacaaaagaaacacccaggcattattgcctcctgatgggagaatgcactaccttctatgaaattatcttgctaaattaatggaatctgtatctcatgtagcctctacatccaatttacaggagatcagaagacagaagaacatgttaaactacatcatgtgggtacagtcagcaaatttcagacgatgggaaactgcaggtcaaacaacccaggttcttcaacaaataaaatgcaagggaaaaaaaaaagatggaggaggatcctgtagattaagagat

SEQ ID NO: 1859 - DNA, 325 bp, Homo sapiens
agtcaagactgatctaatctgccccaggatgtaggagaaccacttaatattcatagatgctgtctctttctacaaaacctcagtataatcctgtctctcaaactttgtgctggccaattccaactgaataaacccaaacactttgccaactacccatctaccctcccctcacttatccatttatccctgtttgtatcttgtctgcttcaaccaggcccatctccacaatctacacattctttcctcttggctcttgttcatgctgttccatccatttagaaatggcatctttcatctctactctgcaaacacaattcaactcaat

SEQ ID NO: 1860 - DNA, 127 bp, Homo sapiens
ccatgcctggctaatttgttgtatttttagtagagacggggtttcaccatgttggccaggctggtctcgaactcctgaccccaagtgatcctcccgcctcggcctcccaaagtgctgggattacagg

SEQ ID NO: 1861 - DNA, 451 bp, Homo sapiens
gatgggtgaagactgatgaagggagaagaatgaagaggaagttcatctcatgaaatttcagcatgagaaagagaaaatcctgccaaacagagatgggaaatcaggcccccacagaagaatgacaatcatattagcatcatgtctgtcactggcaacactgggtgctgagatgatagaacacactatagatagttctgaaataaataccatttttaagccgggtgcggtggctcatccctgtaatcccaacaggcattgggaggctgaggtgggctgatcgcttgaggtcaggagtttgagaccagcctggccaacatggtgaaaccccgtctctactaaaaatacaaaaatttagctgtgtgtggtggtgcacatttgtaattccagctactcaggaggcctaggcatgagaattgcttgaacctgggaggcagaggttgcagtgagtcga

SEQ ID NO: 1862 - DNA, 451 bp, Homo sapiens; identical to SEQ ID NO: 1861

SEQ ID NO: 1863 - DNA, 173 bp, Homo sapiens
aattagccaggcgtggtggcgggtgcctgtagtccccagtactcgggaggctgaggcaggaggatggtgtgaacccaggaggtggagcttgcagtgagccgagatcgcgccactgcactccagcctgggcaacagagcaagattctgtctcaaaaaaaaaaaaaaaaaaaaaa

SEQ ID NO: 1864 - DNA, 173 bp, Homo sapiens; identical to SEQ ID NO: 1863

SEQ ID NO: 1865 - DNA, 2593 bp, Homo sapiens
aagatagtattgtgaccaagaacactcttcctggagtaggtccatatgaaagccgtatgagtggagaagtcatcatgggtcattcatcccttaattgttacatcagagttggtgctgggcacaaaccatatgagtatcatgaatgtggagagaagccagatacgcataaacaacgtgggaaagccttcagttaccacaactcacttcaaacacatgagaggcttcacactggaaagaaaccatataattgtaaagaatgtgggaagtccttcagttctttgggaaaccttcaaagacacatggcagtgcagcgtggagatggaccttataaatgtaagttgtgtgggaaagcgtttttttggcccagtttattacatatgcatgagagaacgcacactggagagaaaccatatgaatgtaagcagtgttctaaagccttttctttttacagttcctatctaagacatgaaagaacacatactggggagaaactgtatgaatgtaaacagtgttctaaagccttccctgattacagttcttgtctaagacatgaaagaactcacactggaaagaaaccctatacatgtaaacaatgtgggaaagccttcagtgcttccacttcccttcgaagacacgaaacaactcacactgatgagaaaccctatgcatgtcagcaatgtgggaaagcgtttcatcatctgggaagctttcaaagacacatggtaatgcacacgagagatggacctcataagtgtaagatatgtggaaaaggctttgattgtcctagttcactgaaaagtcatgaaagaactcacactggagagaaactctatgaatgcaagcagtgtgggaaagcgttatctcatagctcaagctttcgaagacacatgacaatgcacactggagatggacctcacaaatgcaagatatgtgggaaagcctttgtttatcccagtgtatttcaaaggcatgaaaagactcacactgcagagaaaccctataaatgtaaacaatgtggcaaagcctaccgtatttccagttctcttcgaaggcatgaaacaactcatactggagagaaaccctataaatgcaaatgtgggaaagcctttattgatttctattcctttcaaaatcacaaaacaactcatgctggagagaagccatatgagtgtaaggaatgtgggaaagcattcagttgtttccaatacctttctcaacatagaaggactcacacaggagagaaaccttatgagtgtaacacatgtaagaaagccttcagtcattttggtaacttaaaagtacatgaaagaattcactctggagagaagccgtatgaatgtaaggaatgtgggaaagcattctcttggctcacttgctttctacgacatgaaagaattcacatgagagagaaatcctatgaatgtcaacaatgtggtaaagccttcactcattcccgttttcttcaaggacatgaaaaaactcatactggagagaacccgtatgaatgtaaggaatgtgggaaagcatttgcttctctcagttccttgcatagacataaaaagactcactggaaaaaaactcacactggagagaacccatatgaatgtaaggaatgtgggaaagcatttgcttctctcagttccttgcatagacataaaaagactcactagcattctctctagaatgtatggaatgtgggaaagcatttattaattgtatttcatttcagatacttgtacgaaacacattggagatagaccctgtgaatgtaagcacttggtaaagccttaagtagtttcagtttctttccagtacagtcatcccttgatacctgctgggtattggttccagcactccgtgagccatgtccagtcccttttataaaatgacatgtttgtatgtaacttacccacatcctcttgtatagtctcaattatgtctagattacttaaaatacctcatgcattataaaagctatgcaaatagttgttctattgtattgtttagggaatcatgataaggaaaagagtctatgtattttcagtatagatgcagtaattgtgagcctatcaacatagtgtagtcagccagaacattaaagtttctttgtttcaactctcacctatttcttctgtttaatgtgttaacacttaccaaaaccctgggtcttctctcttgataacccaagtatagtgattataacaatgatgatgattctgtggtgcccagtgttttgatgtgttgagatgactagatgtatggcattgtgggtaagtagtgagacatcaggttaacttgaatcttgacaggccatcaggactatcatctatgttggaagaaccaacttgtgattatagatgtggactcatttgaggaggctatgtaatactaatgttaggatctgtttggcttgagggctgaagatctgtaaccattgaatgttccatcttctttgcagatgcttagttatacggaagctagttcttcttttcctttgcttcattaaaaaaaaaatcttgtggtgcttataggcatgttgttgtttctcgggtggagtgaaagctttgttccattgtaggatctttgaggatcg

SEQ ID NO: 1866 - DNA, 87 bp, Homo sapiens
caccatgttggtcaggctgatctcgaactcctgacctcgtgatccacccgccttggcctcccaaagtgctgggattacaggagtgag

SEQ ID NO: 1867 - DNA, 259 bp, Homo sapiens
agaactcaaaggcagtatatctctatagctgatgagatttcactggggccgacaccacctgttctgtgcacactcacttctcggttagacctggctaggttttctgctgtgcttgtttttagctttgtaaccagcagtaatcacattggtctttgggattttcatgtttcaggttttacagatgatgcaaaagcattagttttcaaagtcactgcaaatgctatgtatatgtatttctcaacatgcagcccctgcacta

SEQ ID NO: 1868 - DNA, 259 bp, Homo sapiens; identical to SEQ ID NO: 1867

SEQ ID NO: 1869 - DNA, 362 bp, Homo sapiens
agccaaagacagcagggctcctgcgtgccctgccttgtgaaggcattggagaaggtttggcctctattttcaaccaccactgttgactttgcccctacctcttgattgtcacattgcagtgttttaaaaagaattccacaaaatcctgtggaatctaggggataactggcaaatagaattgggtggaattctcaggctgaatatggactttgttcattttcccagctgaaactacctagtagctgcagagtagagtagagatgcctctgtgctagtaggtctgggtttgcaatcccagtgctgccattttcaagctgtgtgacctgaggcagtctgatgctcctctctgaacctgcatttcc

SEQ ID NO: 1870 - DNA, 362 bp, Homo sapiens
agccaaagacagcagggctcctgcgtgccctgccttgtgaaggcattggagaaggtttggcctctattttcaaccaccactgttgactttgtccctacctcttgattgtcacattgcagtgttttaaaaagaattccacaaaatcctgtggaatctaggggataactggcaaatagaattgggtggaattctcaggctgaatatggactttgttcattttcccagctgaaactacctagtagctgcagagtagagtagagatgcctctgtgctagtaggtctgggtttgcaatcccagtgctgccattttcaagctgtgtgacctgaggcagtctgatgctcctctctgaacctgcatttcc

SEQ ID NO: 1871 - DNA, 362 bp, Homo sapiens
agccaaagacagcagggctcctgcgtgccctgccttgtgaaggcattggagaaggtttggcctctattatcaaccaccactgttgactttgcccctacctcttgattgtcacattgcagtgttttaaaaagaattccacaaaatcctgtggaatctaggggataactggcaaatagaattgggtggaattctcaggctgaatatggactttgttcattttcccagctgaaactacctagtagctgcagagtagagtagagatgcctctgtgctagtaggtctgggtttgcaatcccagtgctgccattttcaagctgtgtgacctgaggcagtctgatgctcctctctgaacctgcatttcc

SEQ ID NO: 1872 - DNA, 114 bp, Homo sapiens
gtggggatcagggtctgcctccctaagaaggtacgatctgagcaaacacttgggtgtctggggaatgcatcatccaggctaagggaatagctagagcaaaggccctggggaatg

SEQ ID NO: 1873 - DNA, 761 bp, Homo sapiens
taaagaggtaatccaagtaaaatgaggtccttagagcaggccctgatccaataggactgtccttattagaagaggaaacttggacacagatacacacagagggagcaccgtgtgaagacacagagaggagatggccagctaccagccaagcagagagcccttactgtaaaccaaccctgccgcatcctgatctcagaattttggcttccagaactgtaaggaaacacatttctactgtttaagccacttggctgggagtacttggttatggcagcctgagcagactaaaccagcacctcaaagagttgttatagggtatgcttagtggtaactggttcctaaaggccttgctttctaaggctgactcctcaccctgcaaggatgcattctccccactggcagatatgcaaccaggaacaggcattaacacgctttattcccagagttttaatattttccattgcataaaatatttgttcatgaaaatgacaaaattgctattagattctatcaccacatctctgttgattttactttctgcaaacacatacaagtaatgtaggcatacagttaaaaatgaaaccttatcctgtagttccagctactagggaggctgaagcaagagaatggcatgaacctgggaggcggagcttgtcgtgagcccagatcaggccactacactccagccggggcaacagagcgcaactccgtctcaaaacaaacaaacaaaacaaaacaaaaaaaacttatagacaagtaca

SEQ ID NO: 1874 - DNA, 761 bp, Homo sapiens
taaagaggtaatccaagtaaaatgaggtccttagagcaggccctgatccaataggactgtccttattagaagaggaaacttggacacagatacacacagagggagcaccgtgtgaagacacagagaggagatggccagctaccagccaagcagagagcccttactgtaaaccaaccctgccgcatcctgatctcagaattttggcttccagaactgtaaggaaacacatttctactgtttaagccacttggctgggagtacttggttatggcagcctgagcagactaaaccagcacctcaaagagttgttatagggtatgcttagtggtaactggttcctaaaggccttgctttctaaggctgactcctcaccctgcaaggatgcattctccccactggcagatatgcaaccaggaacaggcattaacacgctttattcccagagttttaatattttccattgcataaaatatttgttcatgaaaatgacaaaattgctattagattctatcaccacatctctgttgattttactttctgcaaacacataaaagtaatgtaggcatacagttaaaaatgaaaccttatcctgtagttccagctactagggaggctgaagcaagagaatggcatgaacctgggaggcggagcttgtcgtgagcccagatcaggccactacactccagccggggcaacagagcgcaactccgtctcaaaacaaacaaacaaaacaaaacaaaaaaaacttatagacaagtaca

SEQ ID NO: 1875 - DNA, 761 bp, Homo sapiens
taaagaggtaatccaagtaaaatgaggtccttagagcaggccctgatccaataggactgtccttattagaagaggaaacttggacacagatacacacagagggagcaccgtgtgaagacacagagaggagatggccagctaccagccaagcagagagcccttactgtaaaccaaccctgccgcatcctgatctcagaattttggcttccagaactgtaaggaaacacatttctactgtttaagccacttggctgggagtacttggttatggcagcctgagcagactaaaccagcacctcaaagagttgttatagggtatgcttagtggtaactggttcctaaaggccttgctttctaaggctgactcctcaccctgcaaggatgcattctccccactggcagatatgcaaccaggaacaggcattaacacgctttattcccagagttttaatattttccattgcataaaatatttgttcatgaaaatgacaaaattgctattagattctatcaccacatctctgttgattttactttctgcaaacacataaaagtaatgtaggcatacagttaaaaatgaaaccttatcctgtagttccagctactagggaggctgaagcaagagaatggcatgaacctgggaggcggagcttgtcgtgagcccagatcaggccactgcactccagccggggcaacagagcgcaactccgtctcaaaacaaacaaacaaaacaaaacaaaaaaaacttatagacaagtaca

SEQ ID NO: 1876 - DNA, 114 bp, Homo sapiens; identical to SEQ ID NO: 1872

SEQ ID NO: 1877 - DNA, 114 bp, Homo sapiens
gtggggatcaaggtctgcctccctaagaaggtacgatctgagcaaacacttgggtgtctggggaatgcatcatccaggctaagggaatagctagagcaaaggccctggggaatg

SEQ ID NO: 1878 - DNA, 5690 bp, Homo sapiens
ttgtgttcaacattagctcttgttattacatattaaaggcccttagaaggaaaagagattttgcgttatattttttaaatgaagcaatacaatcattttttatgtatatatctagttgaggagaaaaaattacagattttttcccccttactccaagataatctaaacagattttactctggatggcttaattataacataatccatgaagttatagccagggggttaaataagaagttgatgacaaacttggtttctctaacaagcatgcaagaaaactcaagtgccacaatgaacacccataaactgctgtcaggaggcaaagtccctatgaggtaataataaacccacgaggttaaggcaaaaccctacggttgtttctgcaaacaaatgtccaggaaactcaagtttgtgatgaaagaacagtcttgaattcaacttcagcagaacctttccctccctgggctccaaagcactatgtcacctacctctccactcaaatgccccattaagtaccatcctgttggagcttcctaacgcccctgctccctggtttcatttggaaccaactgagagacacaagtccctcttcgttgatcagggtcagttgaaagatgtagctgtcggcctggtagccaggtgggcttgctaatcctgcacctctaccttaagcttacccagcgtgaggccaggttagaaagtcacaggccttggcagcaggcagagagcctttactgtcatagtgaagagcttgccaaggacaggactgattcttcctccagcctcacctatcggggcagtcattgttccgctgtcaggaggagaggggccagaagggtcacactgaagaaatgtgacatgagggtggaggttcctgtccagcattcttcactctctatttaaccgaggctgactcattgcagttggcactaattttccattgccacagccctctccagccaggagggcctggagtacctgaggtgctgtttgccgggttcccttggtcctcagactgctcccttcagagaaagcacagaaagccttctctgtcccaaggagccccccttcccctcccccactccagctctgcatctggacacactgtcagccatcagatcctgaccaggtgctcagcctctttagggatatgtcacaatttgccgtgcccggtggctctgggcagcctttggacatgtagtggttgtgtcttggaatacaagagttgtgcctgaatctgggactctctgtgaccctgggaaaatcacatcagctctctgaaccccaattgtctctgatctataaaatgaagacagtatctacttcataggattgatttgatggacatatgtataagcagtgccagggacaactagtaggtggtcattggagtgtggctacagttattatacagttacacatggattccttgattccccattaagccctggtggatgaatgaggaaaatgcagcagggggtccatcctagaaaacccaacccactccagataatcgcgccagcctcacacctgagaagctgcttctacgacctgctgaggacataatgataaacacacacaagaggctactgtgtcccaggcacttgtcttaactcatttaacttttctaacaaccctaaacctagggttctcattttccagatgagaaaactgaggcatgtaaggttaagtaacttgcctgagggtcgccgattagcatcagagccggcatttcaaatagacaggccagctctagaggccagggtgtttggacagcctccaaattgtcaccctagccttcagggcaaggctgcacacacggcctctagtctcctacccctcttcctggcaggaggctggctctgacaggaggttgtttgtgccacaatttaaggaccaagctattctgggaagcccagaacagtctttcctttattattcatctcaattaaccattgtgttggtctggacttgggggtgcaggcattcccatctccctttcaaaaaagtttctaaaaaatgcagagcagcctttattcttgttttcccaggtaaatgtggtcctatgtacttgcagagtaagaatttaaaaaaataaacctgagaggtagtttagtggaatagggagtacagaggcctggaagatgagggagctgggtttaagccccatcaaccggcatcaactagccatgctaccttgggcaaaataaccgtagctaacacttagtgaccacttactgttgtgcgttctcatgttatcctgacagtaacacttatagggtaggtctgtcagaattttctgtccacaagcaacagaagcttacactgagaatttattggagggctttgagacagctcatgtaatggaaagctcttaagaactaggtttagaaggtgcagagaccagggcaacttcagggatccaggtagcaggaaggaatcggtagcctctttggtatggccactgtggtggtagacactgtctaccttgtttgctgagtcttctggctttcttccactcttcctgctcttggacatcagactccaggttcttcagcctttggaatctaggacttgcaccagtgggttggttgccaggggctcttgggcctttggccacagactgaaggctggctgcactgtcagcttccccagttttgaggtttttgaactcaggctgagccactactggcttctctctaacccagcttgcagacggcctattgtgcgacttcgccttctaactgtgggagccagttctccctaataacctccctttcatatatacatatatcctactaattctgtccctctggagaaccctaatacatgaattataactctaagtttcagttctggccatagcattatgtcacaccaacaccagcatcaatattttaggttgcctaattaatgtatctgtaaacctatagccagcttgggtggggctattgagagtcagcaccagcactgatcatatataggatcagcctactggggttggccacgttgtatgtagctgcgaatagcaaggaggggaacagcaacatccctagggaaaccgatcacagaaaggcagctcactaccccacagtaaaaagaaccttgagtttcccagttcagtcccctgctgggtgcatgctacccccctcctctcccagaggctctggacctacacagctgctgaaaaagagaaaatgtccttacctacaatgaaccatcacaggcacccacctagaaattaaggtactgtggtcatttatcttatcccagaataacaggagtgtgtataaacaggaagctttagtttagataaataagattatccattacaaaaattttatattgaataacctgtaagtaatttgaaaaagagacttctggctagttttcacttatgtccaagtcagtgggggtaaatgcattgtgattcactgtaggttttagactcttacagccttaacaaccttgtaaatccataactagcatcttcctatctggcagaccctttacaaatgcattatctcaagcctcacaacaattctttgaggtagacatagaaagtgaaagttcagaaagggtttaaaaaaaaaaaaaaaaaaaaaacttgtccagagacatagccaattagtggaagagggtttgaacccaggttcctaactacaaaatccacgggtttaactgctgctctcctgaaatgaaatatctacaaaaagtagcaggcattgaaaaacagatgggaagatagtgttttgatatgattttctgtttacaggaaggcctaactacgtcctgttcacctcatgctattgggtaactttccagtaaaaaacaattgcactttgttttcttttccaaaaagaggcagaaactgatttcttcaaagtaaaaaggcaccagggacccattctagactttccaaagctaggcacatattaaagagagtatacaaaataggcagagaagtagacttgctgacctgaggagctgagtgggaagcatggacttgccaacttacctaagtgaccttgagcgatccagctaactttgcatagtttcctcttgtgtaaagtgaggtgcaagtacagatgaaaatgtatagaaaacatagagcttagaatcctgtaccagaaagctgccctcatcacaatgaatgtcagtcagtactagctccagccagctgctcagcccatcaagaatccctcagggggatctgttagcattagttcagatctgttggcagcaacagaaactaatgcgagctagtagactttgaacactgctaaagaacttaccaagagaactcagatgtataaaagtggttaattctgtcaagaggcccaaagtcttgggcaggctcttattttttcaggacacacataagacatgggggctaactgcaaggacacaagaaaaatatacccataccttgaagcccccagtacattcaagaccaagtttggcaaatagattagcatctttcaggaaataccatgagctccacttatctactcatcaggtgttccttgcacccctagctcatccccccaaggggacaatccaatgggcttatcaccacccaatactgaacactatgacagttcctgtaaatccagatgagtggagggcacagggtattggctctcgagcagagagccagtaggcatgactggtgttcgattcctaactcccctgctccctggtttcatttggaaccaactgagacagacacatgaatccctcttcgttgatcagggtcagttggaggatgtagctgtcggcctggtagccaggtgggcttgctaatcctgcacctctaccttaagcttacccagcgtgaggccaggttagaaagtcacaggccttggcagcaggcagagagcctttactgtcatagtgaagagcttgccaaggacaggactgattcttcctccagcctcacctatcggggcagtcattgttccgctgtcaggaggagaggggccagaagggtcacattgaagaaatgtgacatgagggtggaggttcctgtccagcactcttacactctctatttaacctaggctgactcactgcagttggcactaattttctattgccacagccctctccagccaggagggcctggagtacctggggtgctgtttgcctagtactataaatgtctttacattacagtattgcctttgggtccaggcactcaaccttgtctatggcatgagtcacagcaactttttgcagaaagcaaccccaaagtttaaggccatttatatgacccttgttgatttggacagcttaacagccccatctccccatttagtggcactcagattttgctttagaggactaccttcttcccagtgtagtctggccaaaaagtgggtacatgacacaagatagcagtaagccaatctcatcctagaatctcaatcctgagagaggcttccaaaactgtcgactcctggctttctggagtgtggctgaattccccacccccccgcccccaaaaaagttcccagaaattcattttctgcttaaattcatcaaaattgtttctcattccttagaactcacatgaaatgagcttctttgctcagccggtggctgtgggcatggtcagtacttcctcaggccaaaaaaaaaaaaaaaaacctattgatgtaaggaaagacactgagctaacagagaac

SEQ ID NO: 1879 - DNA, 5689 bp, Homo sapiens
ttgtgttcaacattagctcttgttattacatattaaaggcccttagaaggaaaagagattttgcgttatattttttaaatgaagcaatacaatcattttttatgtatatatctagttgaggagaaaaaattacagattttttcccccttactccaagataatctaaacagattttactctggatggcttaattataacataatccatgaagttatagccagggggttaaataagaagttgatgacaaacttggtttctctaacaagtatgcaagaaaactcaagtgccacaatgaacacccataaactgctgtcaggaggcaaagtccctatgaggtaataataaacccacgaggttaaggcaaaaccctacggttgtttctgcaaacaaatgtccaggaaactcaagtttgtgatgaaagaacagtcttgaattcaacttcagcagaacctttccctccctgggctccaaagcactatgtcacctacctctccactcaaatgccccattaagtaccatcctgttggagcttcctaacgcccctgctccctggtttcatttggaaccaactgagagacacaagtccctcttcgttgatcagggtcagttgaaagatgtagctgtcggcctggtagccaggtgggcttgctaatcctgcacctctaccttaagcttacccagcgtgaggccaggttagaaagtcacaggccttggcagcaggcagagagcctttactgtcatagtgaagagcttgccaaggacaggactgattcttcctccagcctcacctatcggggcagtcattgttccgctgtcaggaggagaggggccagaagggtcacactgaagaaatgtgacatgagggtggaggttcctgtccagcattcttcactctctatttaaccgaggctgactcattgcagttggcactaattttccattgccacagccctctccagccaggagggcctggagtacctgaggtgctgtttgccgggttcccttggtcctcagactgctcccttcagagaaagcacagaaagccttctctgtcccaaggagccccccttcccctcccccactccagctctgcatctggacacactgtcagccatcagatcctgaccaggtgctcagcctctttagggatatgtcacaatttgccgtgcccggtggctctgggcagcctttggacatgtagtggttgtgtcttggaatacaagagttgtgcctgaatctgggactctctgtgaccctgggaaaatcacatcagctctctgaaccccaattgtctctgatctataaaatgaagacagtatctacttcataggattgatttgatggacatatgtataagcagtgccagggacaactagtaggtggtcattggagtgtggctacagttattatacagttacacatggattccttgattccccattaagccctggtggatgaatgaggaaaatgcagcagggggtccatcctagaaaacccaacccactccagataatcgcgccacgctcacacctgagaagctgcttctacgacctgctgaggacataatgataaacacacacaagaggctactgtgtcccaggcacttgtcttaactcatttaacttttctaacaaccctaaacctagggttctcattttccagatgagaaaactgaggcatgtaaggttaagtaacttgcctgagggtcgccgattagcatcagagccggcatttcaaatagacaggccagctctagaggccagggtgtttggacagcctccaaattgtcaccctagccttcagggcaaggctgcacacacggcctctagtctcctacccctcttcctggcaggaggctggctctgacaggaggttgtttgtgccacaatttaaggaccaagctattctgggaagcccagaacagtctttcctttattattcatctcaattaaccattgtgttggtctggacttgggggtgcaggcattcccatctccctttcaaaaaagtttctaaaaaatgcagagcagcctttattcttgttttcccaggtaaatgtggtcctatgtacttgcagagtaagaatttaaaaaaataaacctgagaggtagtttagtggaatagggagtacagaggcctggaagatgagggagctgggtttaagccccatcaaccggcatcaactagccatgctaccttgggcaaaataaccgtagctaacacttagtgaccacttactgttgtgcgttctcatgttatcctgacagtaacacttatagggtaggtctgtcagaattttctgtccacaagcaacagaagcttacactgagaatttattggagggctttgagacagctcatgtaatggaaagctcttaagaactaggtttagaaggtgcagagaccagggcaacttcagggatccaggtagcaggaaggaatcggtagcctctttggtatggacactatggtggtagacactgtctaccttgtttgctgagtcttctggctttcttccactcttcctgctcttggacatcagactccaggttcttcagcctttggaatctaggacttgcaccagtgggttggttgccaggggctcttgggcctttggccacagactgaaggctggctgcactgtcagcttccccagttttgaggtttttgaactcaggctgagccactactggcttctctctaacccagcttgcagacggcctattgtgcgacttcgccttctaactgtgggagccagttctccctaataacctccctttcatatatacatatatcctactaattctgtccctctggagaaccctaatacatgaattataactctaagtttcagttctggccatagcattatgtcacaccaacaccagcatcaatattttaggttgcctaattaatgtatctgtaaacctatagccagcttgggtggggctattgagagtcagcaccagcactgatcatatataggatcagcctactggggttggccacgttgtatgtagctgcgaatagcaaggaggggaacagcaacatccctagggaaaccgatcacagaaaggcagctcactaccccacagtaaaaagaaccttgagtttcccagttcagtcccctgctgggtgcatgctacccccctcctctcccagaggctctggacctacacagctgctgaaaaagagaaaatgtccttacctacaatgaaccatcacaggcacccacctagaaattaaggtactgtggtcatttatcttatcccagaataacaggagtgtgtataaacaggaagctttagtttagataaataagattatccattacaaaaattttatattgaataacctgtaagtaatttgaaaaagagacttctggctagttttcacttatgtccaagtcagtgggggtaaatgcattgtgattcactgtaggttttagactcttacagccttaacaaccttgtaaatccataactagcatcttcctatctggcagaccctttacaaatgcattatctcaagcctcacaacaattctttgaggtagacatagaaagtgaaagttcagaaagggtttaaaaaaaaaaaaaaaaaaaaacttgtccagagacatagccaattagtggaagagggtttgaacccaggttcctaactacaaaatccacgggtttaactgctgctctcctgaaatgaaatatctacaagaagtagcaggcattgagaaacagatgggaagatagtgttttgatatgattttctgtttacaggaaggcctaactacgtcctgttcacctcatgctattgggtaactttccagtaaaaaacaattgcactttgttttcttttccaaaaagaggcagaaactgatttcttcaaagtaaaaaggcaccagggacccattctagactttccaaagctaggcacatattaaagagagtatacaaaataggcagagaagtagacttgctgacctgaggagctgagtgggaagcatggacttgccaacttacctaagtgaccttgagcgatccagctaactttgcatagtttcctcttgtgtaaagtgaggtgcaagtacagatgaaaatgtatataaaacatagagcttagaatcctgtaccagaaagctgccctcatcacaatgaatgtcagtcagtactagctccagccagctgctcagcccatcaagaatccctcagggggatctgttagcattagttcagatctgttggcagcaacagaaactaatgcgagctagtagactttgaacactgctaaagaacttaccaagagaactcagatgtataaaagtggttaattctgtcaagaggcccaaagtcttgggcaggctcttattttttcaggacacacataagacatgggggctaactgcaaggacacaagaaaaatatacccataccttgaagcccccagtacattcaagaccaagtttggcaaatagattagcatctttcaggaaataccatgagctccacttatctactcatcaggtgttccttgcacccctagctcatccccccaaggggacaatccaatgggcttatcaccacccaatactgaacactatgacagttcctgtaaatccagatgagtggagggcacagggtattggctctcgagcagagagccagtaggcatgactggtgttcgattcctaactcccctgctccctggtttcatttggaaccaactgagacagacacatgaatccctcttcgttgatcagggtcagttggaggatgtagctgtcggcctggtagccaggtgggcttgctaatcctgcacctctaccttaagcttacccagcgtgaggccaggttagaaagtcacaggccttggcagcaggcagagagcctttactgtcatagtgaagagcttgccaaggacaggactgattcttcctccagcctcacctatcggggcagtcattgttccgctgtcaggaggagaggggccagaagggtcacattgaagaaatgtgacatgagggtggaggttcctgtccagcactcttacactctctatttaacctaggctgactcactgcagttggcactaattttctattgccacagccctctccagccaggagggcctggagtacctggggtgctgtttgcctagtactataaatgtctttacattacagtattgcctttgggtccaggcactcaaccttgtctatggcatgagtcacagcaactttttgcagaaagcaaccccaaagtttaaggccatttatatgacccttgttgatttggacagcttaacagccccatctccccatttagtggcactcagattttgctttagaggactaccttcttcccagtgtagtctggccaaaaagtgggtacatgacacaagatagcagtaagccaatctcatcctagaatctcaatcctgagagaggcttccaaaactgtcgactcctggctttctggagtgtggctgaattccccacccccccgcccccaaaaaagttcccagaaattcattttctgcttaaattcatcaaaattgtttctcattccttagaactcacatgaaatgagcttctttgctcagccggtggctgtgggcatggtcagtacttcctcaggccaaaaaaaaaaaaaaaaacctattgatgtaaggaaagacactgagctaacagagaac

SEQ ID NO: 1880 - DNA, 2271 bp, Homo sapiens
taatgctaagttttgataagcaagtttctattttcctatgttcagggaacggcatcaacagaagaaagctggcactgctcaggatgtcttctttcagttgctaccattaagcatactgcatatccttttcggccataaccacattcacccacttgttatatttcattttcagaaaagcatcattcattgcactcggtttgtccaacagagtataatcaagggttttttttcaacattaatcaagaaattcctccatctgcaaaagtcagcctatgccattaaatacagccaagatcataaaatacaaatgtcattaggtctactgaatcttgagattcattcactagaatacacagggaaaaggaaaaagtttgcccttgtgaaaggtgtgtatcattttttagaagagcttctgaaagcctcaaacatctgtgagtgtgctaagagccgttacaaaggtattttatacaatctatgctgagtcagctaggagttagcaggaggctggatgcagatggtaaaacatacccctgcagatctgttgttattaaggatgacctttggaagtctcaaactgtaaccacaaagggtgtccccactgcattcatactatatacacacatacctgaactgcctttctaccagtaacatttaaaataagcacacttaatactgccagtcacatgtagtagagtgttcactctgtaactgtgtgtggcaaagccaagatatcctaccattccaataaaaaaaaggcaaggaaatagctttaacacaccattgatgtatgctattacacttttccagtggaagataacaaagcccatataaaatttaaagacagaggaaaaactcgattttcagccacttgtacctctctaagttttcatgccctgctatctggaacacttccccacttccctgccagaagtcctctagctctgcattaaggatcttgttgtccctgactgacacccacatatggaacatttggcatgcctccatggcaacacgggatccctgaagtttatgaaagcgttccatgtgagagaggatgctcatatactcctgccccaccctccaaagatgtactaatgatgctaactgactacatccaaggagccagaggaaaaataatctgagggctgcagagaacccactcaagctgtcactgcaaagctggtcttcccaagagcaaaggaggaagcatgcaatctagttcaagtcacacctacttcactcttagacttcttccttcaagtggggcttccctgcaaacaggactggtcttcaaagtctcccagagcccctctatcttagccaggttgctcaagctaattttattctttcccaacaggatccatttggaaaatatcaagcctttagaatgtggcagcaagagaaagcggactacgcaggaacggggagtttgggagaagctctcctggtgttgacttagggatgaaggctccaggctgctgccagaaatggagtcaccagcagaagaactgttttctctgataaggatgtcccaccattttcaagctgttcgttaaagttacacaggtccttcttgcagcagtagtacgttagctcattttccctcaagcgggttgtgacgtcgttgaaattgcaatgctcaaacttccaacacttgttatacacttgtaaccctgtggggagacacacacaagggtaagaaagtaagtgggaagagttctgtatctgcttttgaatcctcaattctatttcgtatgtatcctgtgcaagtagagacttctaggcaagatgctcatcccaggtgggttgtaaaggagaacaattaagtaaataatgatacacctctaaatagagcttttacagaaaaccaaggtctcatcagagccagtatagttatgggggtgggacggaggaggaacaggcatttatactgttaagagggaaatttggtaatatctgccaagattttaaacacatgccccctttgatccagcaattccacttttagaatttacgctatgaagttacttggggattttttccttttcttttcttttttttttttagagagataaggtctcactttcttgcccggtcatctggtcttgaactcctgggctcaagtggtcctcctgcttcagcctcccaaagtgatagaattataggggtgagccaccatgcccagccaaagctatgtataagatatatgctcaagaatggtcagaaaaaaacctgaaaaacccagtccattaatttttaaaaagtgttaaa

SEQ ID NO: 1881 - DNA, 14024 bp, Homo sapiens
taatgctaagttttgataagcaagtttctattttcctatgttcagggaacggcatcaacagaagaaagctggcactgctcaggatgtcttctttcagttgctaccattaagcatactgcatatccttttcggccataaccacattcacccacttgttatatttcattttcagaaaagcatcattcattgcactcggtttgtccaacagagtataatcaagggttttttttcaacattaatcaagaaattcctccatctgcaaaagtcagcctatgccattaaatacagccaagatcataaaatacaaatgtcattaggtctactgaatcttgagattcattcactagaatacacagggaaaaggaaaaagtttgcccttgtgaaaggtgtgtatcattttttagaagagcttctgaaagcctcaaacatctgtgagtgtgctaagagccgttacaaaggtattttatacaatctatgctgagtcagctaggagttagcaggaggctggatgcagatggtaaaacatacccctgcagatctgttgttattaaggatgacctttggaagtctcaaactgtaaccacaaagggtgtccccactgcattcatactatatacacacatacctgaactgcctttctaccagtaacatttaaaataagcacacttaatactgccagtcacatgtagtagagtgttcactctgtaactgtgtgtggcaaagccaagatatcctaccattccaataaaaaaaaggcaaggaaatagctttaacacaccattgatgtatgctattacacttttccagtggaagataacaaagcccatataaaatttaaagacagaggaaaaactcgattttcagccacttgtacctctctaagttttcatgccctgctatctggaacacttccccacttccctgccagaagtcctctagctctgcattaaggatcttgttgtccctgactgacacccacatatggaacatttggcatgcctccatggcaacacgggatccctgaagtttatgaaagcgttccatgtgagagaggatgctcatatactcctgccccaccctccaaagatgtactaatgatgctaactgactacatccaaggagccagaggaaaaataatctgagggctgcagagaacccactcaagctgtcactgcaaagctggtcttcccaagagcaaaggaggaagcatgcaatctagttcaagtcacacctacttcactcttagacttcttccttcaagtggggcttccctgcaaacaggactggtcttcaaagtctcccagagcccctctatcttagccaggttgctcaagctaattttattctttcccaacaggatccatttggaaaatatcaagcctttagaatgtggcagcaagagaaagcggactacgcaggaacggggagtttgggagaagctctcctggtgttgacttagggatgaaggctccaggctgctgccagaaatggagtcaccagcagaagaactgttttctctgataaggatgtcccaccattttcaagctgttcgttaaagttacacaggtccttcttgcagcagtagtacgttagctcattttccctcaagcgggttgtgacgtcgttgaaattgcaatgctcaaacttccaacacttgttatacacttgtaaccctgtggggagacacacacaagggtaagaaagtaagtgggaagagttctgtatctgcttttgaatcctcaattctatttcgtatgtatcctgtgcaagtagagacttctaggcaagatgctcatcccaggtgggttgtaaaggagaacaattaagtaaataatgatacacctctaaatagagcttttacagaaaaccaaggtctcatcagagccagtatagttatgggggtgggacggaggaggaacaggcatttatactgttaagagggaaatttggtaatatctgccaagattttaaacacatgccccctttgatccagcaattccacttttagaatttacgctatgaagttacttggggattttttccttttcttttcttttttttttttagagagataaggtctcactttcttgcccggtcatctggtcttgaactcctgggctcaagtggtcctcctgcttcagcctcccaaagtgatagaattataggggtgagccaccatgcccagccaaagctatgtataagatatatgctcaagaatggtcagaaaaaaacctgaaaaacccagtccattaatttttaaaaagtgttaaagaaattacaatagaattccttacaatgcaagttccatgcagataagaaatgacgtgggccttcaagtgctaacatggaaggagcttgatttaaaaaaaaaaaaataaaggtggggggggggcagaaaaataggtaaactggactccatcaaaatttaaaacttttgtgcttcaaaggacattatcaaaaaataaaaagataactcacagaaagggagaaaatgtttgcaaatcacatgtaaaccaccaggtgcggtggctcacacctgtaatcccaacactttgggaggctgagatgggagaattgtttgaggcgggaagtttcagaccagcctggtcaacatggcaagaccccctctctatttcttttttaaagtcatatgtaagagcatagtatccaggatatagaaaacattcttaaactctacaataaaaagactaacccaattaaaatatggacaatgaggccagtgtgatggctcacacctgtaatcccagcactttaggaggctgaagtgagaggattgcctgcggccagcctgggcaacatagtgatatcccaactctacaaaaataaaaaataaaaaaattagccaggcagggtgttgcgcctttagtcttagctacttgggaggctgaggcaggaggatcacttggactcaggactttaaggctgcagtgagctatgattgtactgctgcattccagcctaggcaacaaagcaagaccttgcctctttaaaaaaaaatgggcaaaggatttgaataaacatttctccaaagaagattctcaaatggccaataagtacatgaaaagatgcttgatatcattagtcattaggaacatgcaaatgaaaatcacagtgagataccactttatactcactaggatggctaagatcaagaaaatggtaaatagcaaatgttgcaaggaagtggaaaaaattggaaccctcaaacattgctggtgggaatgtaaaatggtgtagatactctggacaaatttggcatttctgcaaaaagttaaagatagagttatccatttgactgagcaattccactcacaagtgtatatacttctgccattctctggaaggattcccaagtaatttaatactgttatcatcatggaagaatacacttcgtttatgtttctattgagtttttcaaatttgccacatggataatttttaaaatatttgaaacttcattttaaaaatcattagattattcagtaatacaggaaaagtttctataagaacatgctatcatggtctcatttttggaaaaatagccttgggcacacaggaaaataaaggccagatgtatacactccaagtatcttatcgtagtttgaattgaaaactacgttcacacacaagtttccacatgaatgttcatggcaccatgattcaaaattgctaaaaagtggaaacaacccatatgtccattactggtgaatggataaacaaaatgtgatatatccacacaatagaatactatgtggccacaacagaatgaagtactgatacatgccacagcatgagtgaaccttggaaacattatgtttagtgaaaaaaaagctagtcgcaaagtgccacaatactgtatgattccttgcatatgaagtgcccaggagagccaaatctatgaagacagaaagtacatcagtcactgctggggcatgcaggagggaggaatgaggactgactgctaacaggtttcttttcaaggtgacagaaagatcctggaattagacagttgcgataagtcatacaaccttgtaaatatactaagagccactgaattatacactttaaaatgtaaacgttctggtctgtgaattatatctcaataaaaaccctagatgcagaacagtgtatagaatgtgacccatttgtggaaataaagcacatatacattgaggtaagtgcatttatttttctctggaaggattcccaagtaatttaatagtgttatcatcatggaagaatacacttcgtttatgtttctattgagtttttttaatttgccacatggatgatttatttttaaaatatttgaaacttcattttaaaaatcattagattattcagtaatactggaaaagtttctacaaaaaacacgccatcatggtcccatttttggaaaaatagccttgggcacacaggaaaataaaggccagaagtatatactccaagtatcttatcacagtttttttaatattcagaaaaagcatgttaggtgaaaaatgtattagttgagagagtggtattatggtagattttcttctccaaaaataactgagtgcctgtgtgctagatactggggtataagaaggtatttgtccttgccctgaaagtggtttcttatcttctgtgctggaaagaaaaaaacgcagatgcatacttccttatttcaggcttgtagctaatttacccaattccatgcagagcttggaacacaacacttctcagtttataactgcaggcataactgtcctgtcctcctcctctgaggggatgggtatctggattggaatttaatgaagtttagtcaagtggcagagtccacatagagtattccagaaatggctctagttgctgaagtcttaactaaataactggaagcttctaatattgtactagaggctgctggtgattcagacaagttactgctttgtaacagtaattacgcattggaacttgaaaagctttaaagctatcagaattttaattagggaagcctagaagcttggggagaacagacagtaatttatgaataattgctaccaattaatcatttactatgtgtcgtgcagcgtaccaaagtgctttacttgaattatcatattcaaacaacagccttaacgatggtaataatctcaccaaagccagccttggaattatccacataaaagtggcttatatcagaatccctggagtgttacaggttttctcctcctcactctttttgaagacttcggctcaagtctatctaaagtcaacagtcttcagctgtcctaggcacccttaaatgtggcccttgttcagaacgtcattacagcagtgaccacttgacactgtcatcagaggctccttcaagactaagtacatttaaccttgcttacacttccatggtttatactgctaggatgccagtaaatattggttgaattagcagccaacctgtctctcttctagacttactttgtatagcaccatcatatctgtctctgtgcaaacgtcatagcgtgtagttacacaaacttacatggaatagcctagtacacactcaggctatgtggtatgtcctattgctcttaggctacaaacctgtacagcaagttactatactgaatactgtaggcaactgtaatgcagtggtaaatatttgtgtatctgaccatatctaaacatagaaaaatacagtaaaaatatgacacaaaagattttaaaaatggtacacctgtacagggcacttactgtgaatggagcttgtgagattggaagtcagtgaatgagtggtgggcgaatgtgaaggcctaggacattgctgtacactactgtagatgttttaaatattgtacatttagtccacactaagcttattttaaaaaatcaaccctagtttactgccactttactttagaaattttttaattgtaaatgtttttacctttgtaataaaacagggtaaaacacaaacatgttatacagtggcacaaaaatattttctttctattcttattttataagcttttttatttaaaaaaatttttaaaaacttttcttgtttttgttaaaaatgaagacacaagcacacacattagcctagtcctacatagggtctggatcatcagtatcactgttttccacctcttcatcttgtcccactggaaggtcttaggggtaagaatactcatggggctgtcctgtcctaggagagcaatgccttcttctggaatacctcctgaaggacctgcctgctgaggctgtttttttttttttttttcttttgtagagacggagtcttgttctgtcacccaggctagagtacaatggcacgaccttggctcactgcaacctctgcctcctgggttcaagcaattcttctgcctcagcctcccgagaggctgttttatagttaatttttttagtaagtagaaggactacatgctaacatgataaaaaatatagtaaatacacaaaccagtaacacatttattataaaatattatatactgtatataattatcaaaatatcaagtattatatattgtgttatattttagttttgtaataaactaccaaactgtcatccacagtagctatactggtttgcattcccactaggaatgaatcaaagttcccactgctgctgggcgtggtagctcacgcctgtaatcccagcactttgggaggccgaggcaggcagatcacttgaggccaggagtttgagatgagcctgggcaaaatagtgaaaccccgtctctactaaaaatacaaaaattagctgggcatggtggcttatgcctgtaatcccaattactcaggaggctgaggcatgagaatcacttgaaccctggaggcagaggttgcagtgagccaagattgcaccactgccctctagcctaggtgacagagcaagaccttgtctcaaaaaagaaaaaaaaaaccagaaaaacaaagttcccattgttccacatcctcaccagcatctggagttgtcagagttttggagtttggccattttaataggtgtgtctcatttttgtttacattaaccatttataagaaattctgggatttaagagctggaaaaagatcttggctttgacctcctttcctctcctccctacctctgctgtccaacacatacatttcataaatgaaaaacagaggtggagagagctagctggtggcaggacagaagtcagagctctaattgctgctgtaatattcattcaacacatagtaattgcccttatcgtctcatttggaaactatacttagtttaattatacttagtagtgaggagtccaagagacacagttgatcaagctaaagagccaagtcttctgtgctcgtacataatgaccatgttctcgctaggggccttactacgcttcctacattaacagtgaatgaatatggtcttccagtgggggcagagggactggtgccctacagaatcaagagctctgaatggaaggtttggagttttagctgcaatccagctaaactatatcaaatttatcaaatccagctaaatatatcaaaattatcagatgcccctgtttttttagacagggtaactataatttgtctttagttattgagggatttctcctttctggggaagttaatcatctttatctcaggtttttctgaacatgtgggtgtcccaaggcttttctgagtttacctgacatgttcaccatttcttgatgttgacactggggggagctggtgtagaaggtctaagagtacaaataaccttgtggagtgtttttattattaatctcttagaaatctaagcctgagggttttaccttggacactaagaacattctgaaactgccattcctcgctggcatcatttgcacacatcgattctatccagaaccacaccccagcaagaacagagggcatgtctttgctggtttctttcctctgtctaccacttcctaaactctattttaacagggtgatggaggtgaatattctgtagtctaacaaatttggaaaatgcagactggacaggacttgtgcatgttagcattgcccatccccaaattcatgagcaccttgctctgaggctaccgagccctggcacctgctgttgcccctcccaggcacacccttcccttcttagccctcttacctcctacgtgtcctttgagctcagcttgagtctcctcaggactctgaatataccagataccccatggaatgagacagaggcatatataatgacatttaggacagccaaacaggcctttgtcataattttaattgtatgtgtcctttctttatctttgcatccctagctcctaaccctctgctgggcacacagtaggttctccaaggtctgggaggcagcacagggctgctgtaaaagagcacaagctttggaatcagatggacttccatgttcaattcctgagtcggttacttaaccataatttcttgcttaatctgaacctccatttccacatttatcaaatggaaataaaagatcacccttagaagtgcaaaacattaaatttaaaatgtatgaagaaagtgcttagcccaatacacacctgacgctaataaatggtagctattacttgatgcaagcctaatgaggattacagtggcacaatttttttcccaggcacttattaccccattacatttaggagacagacaggggaggctcttaccagctttggtaatgagacacgcatcaaaatcagatgaacaattgacggctgttttgcagtcagcagttgggttaggacagttgtagcactgcaggctatgacctagaatcaggaagaaagtcaggatctcttaaagcagcactgacttgtcccctggcagcccaccatctccattaatatgggcccaaagtcagcaacttgtggtatacttccactcccgcacaaatgtatagcagttatatctttccaaattcaaactacagttccagcaacattttttggaccctgatgcaagcacaaaggaaatatccacatttgaatatccatctaactgtgcaattgagaagcttcctcctaacctgcaactggaaggagattagtctgcaatgtaatgatgtgttaagaagaaattaccgagaaacaaacagaattctataagtgtcttccaagcaatgaatatgcccaattaaatcacatcctcgtgggttgatgatcaatgtctggcaatacctatctgcgtgaaaatacattttcaaaatgaaatatgtaaaatgtcatcacagattagtattaatagatgaacatctgcaattgatttgatgcgagggaacactaattttgaaccccaattaagcaaatggttatccccctaaaaagaattctattcccctcattagtagatgtgtattattatgctggactcaataattatgttatgaattttgtcaataaaaaaatctgtgaaaattttgtttcttattattgaggtaagtctcataatacccttgattttgcctcttggtctgcaaagcttaaaatatttactatctgggccaggcgcagtggctcacgcctgtaatcccagcacttagggaagccgaggagggtggatcacctgaggtcaggagtttgacaccagcctggccaacatagcgaaaccccatctctactaaaaataaaaaaattagccaggcatggtggtgcacacctataatcccagctacttgggaggctgaggcaggagaatcgcttgaacccaggaggcagaggttgcagtgagccacaattgcaccactgcactccagcttgggtgacagagcaaaactctgtttaaaaaaaaaaaaaaattgctatctggtcctgtacagaaaaagtttggtaacctctgggacagggtatcattactgaactactcccttctaagggactgaccgaatgccaggagtacacactgtcaaagacaagacaacagctgtgcactttaaacccatgggcataggacagctgggtaccagcagacacaacgtgagggtcatcttacatcagaagcaaattgcctccagttccctagtttgaaaaacaattattgctcccagtcaattcttaagactcatccttgctagctgtcagtttttgctgggttatttttccttctccatttttgtaacaacagtgacaacaaaaagatgagttacagtccacacgtgtgatggggagagactgaggaagcaagagttggaaggaaatcttcctggtttgtatggatacccccttttccatcatcagagataaactatcttcatgccatatgacttctaccatgtaatcagtatttggaagtacctacctctgtgaaaagacattttcaaagatgaaacacgtaaaatctcacaaaagaatgtcatggttaaaccaagtgtgggttttagagcccaacagctgacttctagttctaaggctgaaggctaggtttatcaccatggaaatagatttttcagtggaaagtccagtggaagcaaggtgggtcctcactttctgagcacacacaggaacccagttctctagagcatctgaaatggccatgtctgccctcacaggtgtgaaatcctacccaatagaggatcctctgacttgtgaaggttacagattaatgccttgaaatattagttttaaaaaacaacaacaaactaggccaggtgtggcggctcacacctacaatcccagcactttgggaggccgaggtgggtggatcacttgtagccaggagtttgagaccaccctggccaacatggtgaaacctcgcctctacaaaatatacaaagattagccgggcatggtggtacatgcctgtaatcccagctattcaggaggctaaggcatgagaatcatttgagcttgggaggtggagggtgcagtgagccaagcttgcaccactgcactccagcctgggagacagagcgagaccatgtctaaaaaataaataaaataaaataaaataaaaaccaacctcctccccaacttttttgcagatgacaagacagatgtctggagaggtgatgtgactcacacaaggacacctggctacaaagcagcagagctggcggcagccctggggcctgtgggcagggccccatccaccaggctttgtttgttctcccccactgtcagcctgtggctgtcatgcccgtgtgagagggaagccacaaggagaaggcgcaaagatgcaatttttctttggtcccttccttgtgccagacatgtattcacacgcatgaaatgaaaagagtctaagatgaagggtgttgttcttgagactggccatgtttgagggccattttaaaaggttacctgtagacatggatttttgtggtggctagatcccgggctcatttggcctcttaagaaagctttagaaggaaaggctaaaacccatggttggaacgtctgtgggcaaaaatattcatggcaaacatgttcattcagtgttcaaatatatgtgcatctatgtgctaagctcttcataggattgttaagagaactaggctcaattatcttcatccccaccttgcaagagaaaactaagactaagatgttaactaaattgttcaaagccacacagctactaagtgaccgagctgagctcaaactcaggctgtcagttctaaaatccaagcttggttaaccatgatgttcttctaattgacctgagtgggaagagaaggaaactctagattatggtggaaactgaggtcaaaaacaagcaacagggccaggtgcaatggctcacgcctgtaatcccaacactttggcaggctgaggtaggtggatcatttgaggtcaggaattccagaccagcctggccaacatggtgaaagcccgcctctactaaaaatacaaaaattaaaaagtaaataaaaaaaaatacaaaaattagccaggcatagtggcatgctcctgtaatcccagctactcagaagactgaggcaggagaatcgctggaacctgggacacggaggttgcagtgagccgagatcgcgccactgcgctccagcctgggcgacagagtgagactccatccccctgaaaaaaacaaacaaaaaaaaacaagcaataggtcagtggacaatggtttgatattttagccactaagccagggtagacgaggtttcccctgggccataagaggcagagctcagaggaaagttcccctgcagggtcctgagacccttttgggcagcagcaaagaaggcctctcatctgtgggcatgtgagcttcacatctcaattctctgagaaagggctgaagtgcaccccaagacttgtcacagagaagctgatggtcccaagcttgctccataaacaaatgcagactgctggaagtaggatgtcactgggctattaaaattctagaaaatattccaacttaagcagcagagacagaaaaaaagaaggaaccaagaaaaatgaataaataaaaaataattatagaaaaaatatagtgttttaacacaggtgaaccacattacagtgcaccctggctagaatcacggaaggtggggaagaaggggtgccatgacttctctttctgctcagaaagggagaacatattaaagtgtgtcctggcgccaagttactactttgccttcatttcctcagctgtaatatgggaggtaacagtaccgacctcccggaatggctggacggatttaaatgagacaggctctggcacagtccccagtaaacaataaacagtgaatatatggttgctgttaatattctaagacatgctacagtggtgtggaaatctttttttaaattgctcactgtattgccactttcttttctgctccccccaccaaccatatttataaaaaacaaaaaaccagcagtggccaagatattataccaacatgacacaggcagacaaccacacttgatctttacaatgaagcatgtgtgtttccactgttatagaagttgactcagaagcacacaatttcctccagcaaccaggggaggggtggctgaggagagggggtggcccagtgacagatggcctggagcaggagggaagagcagggactctgttgccagactgtgtgttcacattcccgtgtaccacttctgtgtgttatttgacaagttattaattttggggaggcctcaatcttgttgcttgtaaaacaaggataaaaataccaccaactccatcaggttggcatgaggattaaataagcaaatacacgtaaaatgcttagagtagtgactggcacataaatgcttcagggttagttagctgctgctgctgtcactatgaccatcatcatcattaaaacacaggaggagcctcagagcagaaggactgagctcagatggctctaagcagagtggaccccaaagggacttgcacagcactctaagaatggtatccattggtgtccccaagcagcttatggtgacaggagtgaaacttcagccgccgattgttgacccacccctgccaaaagccacgctgtaactcaggacgggctgtaactcaggacgatgccccactgaggacaaggtcataacataggaaggagctgtcatacaaccccagacctgtaacactggaaggcaaaagaaccaaagccaggcctggaggagcagctggggctgaaactgaggcttaagaagggagttcatggccaaggcagcctagatccatgtcctgagactggagcactcacctgaatggcagaagacagccaggacgagcagcagcccgaacaggacagaccctccttggattcccattgtgattgtccacagaacctggaaggaagggacaggaaggaatgtcaggaacgaacaaatgactgctggttgtctcaaaaaccaagggctggaaggccaagaaggcttctgagaggaacatttacagggggagtcaaggcacactgaatccctgggccatgccccagctctgacccacagcaccatatacccttgagtaggctcagtccctataagccccagtgtgtactaccacactgtgggaataac

SEQ ID NO: 1882 - DNA, 646 bp, Homo sapiens
gggattacaggcgtgagccaccacacccgacctggagctgacattctatgtagttggaggaaacagaccacaaagaagtcccaaaacagactgtataccaggaggtggtgagaactaagaggataaataagtcatattcagaggatggtgagtcatggaagggggctatacagacagggtaatcagggagggcttctctgagaaggtgaaattcaagtagagatgggaatagagtaggcctgacagacatctgggagaagggcactcctgctagactagaggaaacagcacgtgcaaaagctctgaggcaggaacacgcgtagagcatcctcgattagaatcttacacaggcctggccaggcacggtggctcacgcctgtaatactagttctttgggaggctgaggcaggtggcttacctgaggtcgggagttcgagaccagcctgaccaacatggagaaaccccgtctctactaaaaatacaaaattagccacgcgtggtggcgcatgcctgtaatcccagctactcaggaaggctgaggcaggagaatcgcttgaacccgggaggcagaggttgcagtgagccatgatcgcgccattgcacttcagcctgggcaacaagagcaaaactcagtctcaaaaaaaaa

SEQ ID NO: 1883 - DNA, 126 bp, Homo sapiens
caaacctcagtgtttccatctgtgagatggccccataggaccagagcagagatggccaacttattttttcagaaacttgttaccacttcattcactcgtttagcaaatatatattgagaacctcat

SEQ ID NO: 1884 - DNA, 4206 bp, Homo sapiens
gcactccagcctgggtgacagagcgagactccgtcttaaaaaaaaaaaaaaagaaaagaaaacaagtagggaaactgagatccaaagtttgcaaataaatatgattttaacttttaaacagtggaagccaggcacagaggcatgcctgtaatcccagcactttgggaggctgaggtgggaggattgcttgatcccaggagggcaagaccagcctgggcaacaaagtgagaccccatctctacaaaataatccaaaaattagccaggcatggtggccggcgccttggtcccagctacacatgaggttgaggcatgaggatcccttgaacctgggaggcggaggttgcagtgagccatgatcgcaccactacactccaacctgggcaacacagtgagacccttcctcaaaacaaccaaaaacaaactcttgcaggggcactgctgtgactcctgtgagccttgtgggcatgaaggctgggctactttctgttcctttttactcagtagactggaaaagccacgtttctgcaattcccacgttccttataaggaagatttgtcactcacaccccaggcccacagcccttgcccaaggaatggttaggagcatggactctggcctggtgtggtggctcacacctgtaatcccagcactctgggaggccgaggtacacggatcccttgaggccaggagtttgagaccagcctggccaatgtggtgaaaccttgtctctactaaaaatacaaaaattagccaggcatggtggcatatgcctataattccagctcctcgggaggctgaggcaggagaattgcttgcactgggaggtagaaattgcaggaaactgagattacgccattgcactccagcctgggtgatggagtgagcctctatctcaaaaaaaaaaaaaggccatggactctggccaggagcagtggctcacaccggtaatcccagcactttagaaggccaaggcgggaggatcatttgaggccaggagtttgagaccagcctgggcaatatagcgaggctcccatctctataaaacaaaagaggccgggcgcggtggctcacgcctgtaatcccagcactttgggaggccgaggcgggtggatcatgaggtcaggagatcgagaccatcctggctaacaaggtgaaaccccgtctctactaaaaatacaaaaaattagccgggcgcagtggcgggcgcctgtagtcccagctactcgggaggctgaggcaggagaatggcgtgaacccgggaagcggagcttgcagtgagccgagattgcgccactgcagtccgcagtccggcctgggcgacagagcgagactccgtctcaaaaaaaaaaaaaaaaaagaatggactctggagtcaacctgggttcaaatcccttttctgcatatcactctatgacacctctctctgagcctcaaatcacctcatctataaaatggggcgatgatcatggtagcacctaccccagagaatggctgggaagactaggtggaatcacttaagaggggagcttagcccagggcctggcgggagcaggtgtcctgtcactgtccgctctactcatctgtctcccagcctccctacctcctgctggtggctggcccagggaggctggactcccagcagtcagggtaggaggtggctgatttgtttgcttgcttgtttgtttttgagacaggttcttgctgtcgcccaagctggagtgcagtggtgtgatcttgggtcactgcaacctcggcctccagggttcaagcgattcttgtgcctcagcctcccaagtagctgggatcacaggcgtgcaccaccacacccggctaatttttgtattttgagtagagacaggatttcaccatgttggccaggctggtctcaaactcctgacctcaggtgatccgcctgcctgggcctctcaaagtgctgggattaccggctgagccaccgcacccggcctggatggttggttttttgtttttgttattttttttttctctatcttctctctttctttggctggctgtttttgagagaagagcagggtgatctgatttggccaaggagcaggaggccagcttccccgaggaaggaacatccaaaaaaacatccaagctgatgcaagaggcagtgtgagcctggcccagggaacgacatgtgggaagacaggcggagttgggggcaagtgctgaggccccatagccgtgggaagaggctggactttctcctgtgggtgctgggcactctggggcctgggacccaatcagcgctgagtctctggaagccccagttcttttctcgttaaagaaaaaatgttgtgctggacattgttctaggcgccgggtaaacagaagggagcaatacaaagccctgcctgatggagctgacatcaggaggaggagacagacagcagacacagagccataccgtgccaggtggagataagtgctgggagaggaatcaggtagggttaggggagaaaaaaagaaggagatggggccagcctgagcaacatggcaaaaccctgtctctacaaaaacaaaacaaaaattagccaagcgtggtggtgcacacctgtagtcccagctatagctactcaggaggctgaggtgagagaatcgcttgagcccaggaggcagaggttgtagtgagccgagattgcaccactgcactccagcctgggcgacagaatgagagtccgtctcaaaaaaaagaaaagaagtaggcctgatgtgtttgaggatcagcaaggaggccaccgtggctacagccaggtaacccaagagggagggatgggagctgaggtcaggaaggcaatgggggaagatcgtgcagggccctagaggcctcaaggactttgcttttaccctgagtgaggtgagagccacaggacggtttgagcatagaaacaatatctgacttgtgtttttttaaacaattatattgcaatataaggccgggcgcagtgcttacacctgtaatcccagcactttgggaggctgaggtgggtggatcacgaggtcaagagatcgagaccatctggccaacatggtgaaaccccgtctctactaaaaatacaaaaattagctgggcatggtggtgtgcacctatagtcccagctactcaggaggctgagggtggagaatttcttgaaccctggaggcagaggttgcagtgagccgagatcgcaccactgagctccagcctgggcagctgaatgagactccatctcaaaaaaaaaaaagaaaaaagaaaaaaatgtatatatatatggcgatataatttccacactatacaatcacctcaaagtgtacgatttgcttgagaccaggagtttgaaaccagcctgaggaacatagtgagacctcatctctacaaaaaaataaaattatcctggtgtggggtcgcacctctgtggtcccagaagctcaggaggctgagatgggaggatcgcttaagctggggagattaaggatgcagtgagccgagatctcacctttgcactccagcctgagcgagagagcaagactgtgtctcaaaaaaagatgaaaattaaggccaggcacggtggctcacgcctataatcctagcactttgggaggccaaggcaggtggatcacaaggtcaggagattgagaccatcctggctaacatggtgaaaccccgtctctactaaaaatacaaaaaaattagccgggcgtggtggagggcacctgtagtcccagctgctcgggaggctgaggcaggagaatggtgtgaacccaggagacagagcttgcagtgagccgagatcacaccactgcactccagcctgggcgacagagcgagactccgtctcaaaaaataaaaaataaataaaaattaaaaataaagtgtacaggatcaggcgcggtggctcatgcctgtaatcccagcactttgggaggctgaggtgggcagatcacgaggtcaggagatcgagaccatcctggctaacacagtgaaaccccgtctctactaaaaatacaaaaaattagccgggcgtggtggcgggcgcctgtagtcccagctactcaggaggctgaggcaggaaaatggcgtgaacccaggaggcggagcttgcagtgagctgagatcgcgccactgcactccagcctgggggacagagtgagactcccatttcaaaaaaaaaaaaaaaaagtaaaataaaatacagc

SEQ ID NO: 1885 - DNA, 4966 bp, Homo sapiens
  SITE (2355): n equals a,t,g, or c
  SITE (2360): n equals a,t,g, or c
cggccccaatgcccagtgacttccaggtcctcagggccaagtaccgagagagcccgctggtctccgcctggtcctagtagttgatctctaagctggctaatgacatcgaggccaccgctgtgcgagccgtgcggcgctttggccagttccacctggcactgtcggggggctcgagccccgtggccctgttccagcagctggccacggcgcactatggcttcccctgggcccacacgcacctgtggctggttgacgagcgctgcgtcccactctcagacccggagtccaacttccagggcctgcaggcccacctgctgcagcacgtccggatcccctactacaacatccaccccatgcctgtgcacctgcagcagcggctctgcgccgaggaggaccagggcgcccagatctatgccagggagatctcagccctggtggccaacagcagcttcgacctggtgctgctgggcatgggtgccgacgggcacacagcctccctcttcccacagtcacccactggcctggatggcgagcagctggtcgtgctgaccacgagcccctcccagccacaccgccgcatgagccttagcctgcctctcatcaaccgcgccaagaaggtggcagtcctggtcatgggcaggatgaagcgtgagatcaccacgctggtgagcccgggtgggccatgagccaagaagtggcccatctcgggtgtcctgccgcactccggccagctggtgtggtacatggactacgacgccttcctgggatgagggcgcctgtgccccttgcccgcttcgctcctgtgctttccttcgcccgtgtcttccctcccttctcggccccgccacctgcccagcgtgccctggctctccagaaccttctatcccacagtcaggccccagagagggcaggacaagccttgtccgatgcctttgaccggcagctctgtgtattggtggatagatgcagaaacaaggaagaaatggagtctgctcctgagaagcttcaaattcaggccaggagagaagtcttaagaaaagacctccagcagttacacattcatatcaaccagcacaacacgggatggcgcccaaactccggcgttcacaagaggagacgtgacgtggtgggctgaggttaatcagggaaggtttcctgggggaggtgatccttgaactggctcccggggaacattcagagcatgattggtagacagaagggtgcagaggcgcccaggggagtacattgccccgtgcaaagcaggggcattggggactgtcttgagaccctgagggggtcaagcccctccttccccagctgcccctccttctagaacctctgcacatctagcctctggccctcctcttcactgcctccacctgctcccgcttgccatccctgtctcctccatcctggctgtgcagtaggaattccaggctcctccctgtgtctttgctgttcttcagactccatttatagagaatgagggctgataacaggaatacagtggcaaagattagactgtggaaagggttccagaaatctttttttcttttttaattaaaaaaaatatttgcagagatgagctcttgctatgttgcccaggctggtctcaaactcctgggctcaagcgatcctcccatctcagcctcccagagtgctgggattacaggtgtgagctactgcgcccagccccagaaatctcagtgctgtttggagctccatttctcatttgatgacttgctctgcgtggggaggtggggtctcattcccccaacttcctcagggaggacccctgccctccgctgctcctctgtcctgctagccttcctccaggaagcacactgggtgcagataatcaggacattccagagatccccaatttaagagggtcatttccatctcaggggactcccggatgggtgtttccgctctcaatagcccctcttgttttaccaggaaagatccagttaaatcacccactgaggtgacagctcattagcggggagagagatggagcatcgagtgacactgggccatccaggcggctctgctcccaccagacaggagctaggcctcactggcaggggggctgcccacagccttttcaggggctcgcttggcgggtgacggggccgcagccaggccttctctccctgccccttggtgaccccgtggcttcctgtctgctggcctctcctgctacttatcacttcaccacgaactctctgcctgagactggggaagtaagcgggtatcttctcagtgagcataggttggggactgtgatcttgagaagccatgggccagcaatacctgcttttctgaagcccccaaggagggctctgactttcnttttnattaacaccacaaagcaaaattcccaggacatgtgtagttttgtttgttcagtatcccacaacttaaggctgggagatggaactcttggttaaggtcgatttttctgtctggcttctccgcaccttccacttgctctctggatcaggcagatataaactttctagcgcattttgagagagggctttcttgggtgagggagcatggcaaagtcggtttctctctggactgtttacacttcaaggcggtggatttagaggaatcctggctttcattttcaatgccagtctgagacatgttcccaagccggggctcttgttcacaccacttactctggccaccaacaacaacccaggccagacagagcatctcttttttttttttgagacagagtctctgtcgcccaggctggagcccagtggcgagatcttggctcactacaacctccacctcccgggttcaggcaattctcgtgcctaagcctcccgagtagctgcgactacaggcgccggccagcatgcctgtctaatttttgtattttagtagagacagggtttcaccatgttgcccaggctggtctcgaactcctgagctcaggcagtctacccacctcagcctcccaaagtgctgggattacaggcgtgagccaccgcgcccagccagaacatctgtttttacacccagagagcgcccctcgttaggacagaaccacggtgcccagagccaggaagccgccctcctggcgcccagcatctgagcttctacacgtgatgggcgggctcaggagaggacagggagtcgtggtggaagttccacagctggccgcgtgggggggcccttgcaccgcactgccgcctcctgactgccccgatccccgcagcccctgtgccggatttcatttccctcctctctcccagggtacctggccccagcactctcccatctgttcttcaggaaccgactcctctccagttgcaacaccagggagaaaggggcctccacatgcccaagtacccctgcaggatgaagggcaggccggcccttgatgtgccatttctgaataatagtcactgccgccgagtctaggatgtcctgttctaactcagccctgcctcggatgcaccaccgatctgtgcagagtgggtgtgggagtgtgggtgagggtcgaaatgccaaaggtctactttccagaatcaagtgccttctgcaaatcatgttggaaaagtccaaacctggagatgtccctgtgcctccgcccctacccaccccttttccttcagctgtgttaggaaggagaagttttcagaaccctctaggctggtggctttcaaacttcagaccatgatctgcagcaagaaacgtgccttccatcataaatcagtccatttgtttacaactgtgttccaagcaggtttcataaagaaattcttaaccttagaacctcggatatcctctatgttttagttttcatttttttaaaatgcttcttaaaattcactaaattgggctaggtgtggctcatgcctgtaatcccagcactatgggaggctgaggtgagaggatcacttgagcccagaaggttgaaaccagcctgggcaacatagtgagaccccatctctacaaaaagttttaaaaccaggtatggtggtgccctcctgtggtcccagctactcgggagtctgaggtgggaggatcacctgagcccaggagactgaggctgcagtaaggtgtgattgcactattgctctctagcctggaaaacagagtgagaccctatctcaaaaaaaaaaaaaaaaaaaaggaaagagtgatgacaacagcccagggagcagccccgctcagaacccaagtcccaagttccagcactgtgttcccaggcaggctgtttgcctcttcctggtctggaagcccttgggtcctatggtggcggcagctcccacagtccaggttccctggtggggaccaatgattccatctgcatggaagcccacgtgtgcacttaggggcccataaatggcagaagggcccctcctttgggagaccttgtcagtcagcatctctagggcaaccgtgattgccatttgtagaggggaaggaatcaagggactttaagctagatcaaaatctggggacaaattctcctgctaactgcaagttaaaataggcccttcttactgaatttccctgtttgtttctctgcagacaatgctttagccctactcttgggcccccaagttagcagagtaatcaaagcttcctaccgtttggcctactattccagactagtccctcgaggggttcccttccaaaatatgcagggctcaggctcccaattccgggcctgtctgctttgcttgtgtttctcctgtccctgttctcccggggggccctggtgttactcacgacagggagggagacgcttcccaaaaacctgcagggctatttcccagaatttggttttcaaggacaaaactttttgtcctgtaagatatatgcagcctcacagaagcagcctctgcctccactttaccagctacgtttttatcttatgcacatggggctcccttcgaacttactccactgatttaaaataaattttctgcctggc

SEQ ID NO: 1886 - DNA, 7238 bp, Homo sapiens
cggccccaatgcccagtgacttccaggtcctcagggccaagtaccgagagagcccgctggtctccgcctggtccgaggagctgatctctaagctggctaatgacatcgaggccaccgctgtgcgagccgtgcggcgctttggccagttccacctggcactgtcggggggctcgagccccgtggccctgttccagcagctggccacggcgcactatggcttcccctgggcccacacgcacctgtggctggttgacgagcgctgcgtcccactctcagacccggagtccaacttccagggcctgcaggcccacctgctgcagcacgtccggatcccctactacaacatccaccccatgcctgtgcacctgcagcagcggctctgcgccgaggaggaccagggcgcccagatctatgccagggagatctcagccctggtggccaacagcagcttcgacctggtgctgctgggcatgggtgccgacgggcacacagcctccctcttcccacagtcacccactggcctggatggcgagcagctggtcgtgctgaccacgagcccctcccagccacaccgccgcatgagccttagcctgcctctcatcaaccgcgccaagaaggtggcagtcctggtcatgggcaggatgaagcgtgagatcaccacgctggtgagccgggtgggccatgagcccaagaagtggcccatctcgggtgtcctgccgcactccggccagctggtgtggtacatggactacgacgccttcctgggatgagggcgcctgtgccccttgcccgcttcgctcctgtgctttccttcgcccgtgtcttccctcccttctcggccccgccacctgcccagcgtgccctggctctccagaaccttctatcccacagtcaggccccagagagggcaggacaagccttgtcccgatgcctttgaccggcagctctgtgtattggtggatagatgcagaaacaaggaagaaatggagtctgctcctgagaagcttcaaattcaggccaggagagaagtcttaagaaaagacctccagcagttacacattcatatcaaccagcacaacacgggatggcgcccaaactccggcgttcacaagaggagacgtgacgtggtgggctgaggttaatcagggaaggtttcctgggggaggtgatccttgaactggctcccggggaacattcagagcatgattggtagacagaagggtgcagaggcgcccaggggagtacattgccccgtgcaaagcaggggcattggggactgtcttgagaccctgagggggtcaagcccctccttccccagctgcccctccttctagaacctctgcacatctagcctctggccctcctcttcactgcctccacctgctcccgcttgccatccctgtctcctccatcctggctgtgcagtaggaattccaggctcctccctgtgtctttgctgttcttcagactccatttatagagaatgagggctgataacaggaatacagtggcaaagactagactgtggaaagggttccagaaatcttttttcttttttaattaaaaaaaatatttgcagagatgagctcttgctatgttgcccaggctggtctcaaactcctgggctcaagcgatcctcccatctcagcctcccagagtgctgggattacaggtgtgagctactgcgcccagccccagaaatctcagtgctgtttggagctccatttctcatttgatgacttgctctgcgtggggaggtggggtctcattcccccaacttcctcagggaggacccctgccctccgctgctcctctgtcctgctagccttcctccaggaagcacactgggtgcagataatcaggacattccagagatccccaatttaagagggtcatttccatctcaggggactcccggatgggtgtttccgctctcaatagcccctcttgttttaccaggaaagatccagttaaatcacccactgaggtgacagctcattagcggggagagagatggagcatcgagtgacactgggccatccaggcggctctgctcccaccagacaggagctaggcctcactggcaggggggctgcccacagccttttcaggggctcgcttggcgggtgacggggccgcagccaggccttctctccctgccccttggtgaccccgtggcttcctgtctgctggcctctcctgctacttatcacttcaccacgaactctctgcctgagactggggaagtaagcgggtatcttctcagtgagcataggttggggactgtgatcttgagaagccatgggccagcaatacctgcttttctgaagcccccaaggagggctctgacattctttttaaaaacaccacaaagcaaaattcccaggacatgtgtagttttgtttgttcagtatcccacaacttaaggctgggagatggaactcttggttaaggtcgatttttctgtctggcttctccgcaccttccacttgctctctggatcaggcagatataaactttctagcgcattttgagagagggctttcttgggtgagggagcatggcaaagtcggtttctctctggactgtttacacttcaaggcggtggatttagaggaatcctggctttcattttcaatgccagtctgagacatgttcccaagccggggctcttgttcacaccacttactctggccaccaacaacaacccaggccagacagagcatctcttttttttttttttgagacagagtctctgtcgcccaggctggagcccagtggcgagatcttggctcactacaacctccacctcccgggttcaggcaattctcgtgcctaagcctcccgagtagctgcgactacaggcgccggccagcatgcctgtctaatttttgtattttagtagagacagggtttcaccatgttgcccaggctggtctcgaactcctgagctcaggcagtctacccacctcagcctcccaaagtgctgggattacaggcgtgagccaccgcgcccagccagaacatctgtttttacacccagagagcgcccctcgttaggacagaaccacggtgcccagagccaggaagccgccctcctggcgcccagcatctgagcttctacacgtgatgggcgggctcaggagaggacagggagtcgtggtggaagttccacagctggccgcgtgggggggcccttgcaccgcactgccgcctcctgactgcccctatccccgcagcccctgtgccggatttcatttccctcctctctcccagggtacctggccccagcactctcccatctgttcttcaggaaccgactcctctccagttgcaacaccagggagaaaggggcctccacatgcccaagtacccctgcaggatgaagggcaggccggcccttgatgtgccatttctgaataatagtcactgccgccgagtctaggatgtcctgttctaactcagccctgcctcggatgcaccaccgatctgtgcagagtgggtgtgggagtgtgggtgagggtcgaaatgccaaaggtctactttccagaatcaagtgccttctgcaaatcatgttggaaaagtccaaacctggagatgtccctgtgcctccgcccctacccaccccttttccttcagctgtgttaggaaggagaagttttcagaaccctctaggctggtggctttcaaacttcagaccatgatctgcagcaagaaacgtgccttccatcataaatcagtccatttgtttacaactgtgttccaagcaggtttcataaagaaattcttaaccttagaacctcggatatcctctatgttttagttttcatttttttaaaatgcttcttaaaattcactaaattgggctaggtgtggctcatgcctgtaatcccagcactatgggaggctgaggtgagaggatcacttgagcccagaaggttgaaaccagcctgggcaacatagtgagaccccatctctacaaaaagttttaaaaccaggtatggtggtgccctcctgtggtcccagctactcgggagtctgaggtgggaggatcacctgagcccaggagactgaggctgcagtaaggtgtgattgcactattgctctctagcctggaaaacagagtgagaccctatctcaaaaaaaaaaaaaaaaaaaaaggaaagagtgatgacaacagcccagggagcagccccgctcagaacccaagtcccaagttccagcactgtgttcccaggcaggctgtttgcctcttcctggtctggaagcccttgggtcctatggtggcggcagctcccacagtccaggttccctggtggggaccaatgattccatccgcatggaagcccacgtgtgcacttaggggcccataaatggcagaagggcccctcctttgggagaccttgtcagtcagcatctctagggcaaccgtgattgccatttgtagaggggaaggaatcaagggactttaagctagatcaaaatctggggacaaattctcctgctaactgcaagttaaaataggcccttcttactgaatttccctgtttgtttctctgcagacaatgctttagccctactcttgggcccccaagttagcagagtaatcaaagcttcctaccgtttggcctactattccagactagtccctcgaggggttcccttccaaaatatgcagggctcaggctcccaattccgggcctgtctgctttgcttgtgtttctcctgtccctgttctcccggagggcccaggtggaactcacgacagggagggagacgcttcccaaaaacctgcagggctatttcccagaatttggttttcaagtacaaaactttttgtcctgtaagatatatgcagcctcacagaagcagcctctgcctccactttaccagctacgtttttatcttaagcacatggggctcccttagaacttactccactgatttaaaaaaaaaaaactgcctggcagcatctcagtgtcagagtgagcacggcacaggaaaggcccgtggtgacgagggtgaggtggccacagtgaccggacgacaaatgagactctgcaaatgagactccagagggtgaagatctgcggtctccagacatcataggccatgtgacccactaggggccgcttacccctggccgtccgctggctgaactgaacgcattccctctctccgcaactctcccgtgaggctgcacccgtgtgggtagcactggaagcggcactgtttgcattgtacataggaaggaaggaagttcttccagcctcaccagcacctggcagcgagtcagagcctgtgagggcatccgaagcagtgatgcagtgtcaacctcccagctggtgccactctgccctcgggggctccaagcattgtaactcagtcatgggagctgcctctttggaagtgcagatttattcctgtaataatcctgcctgcttttacctctcgtccactgaccagcaagtgtgagtcccggtgtcagtcggcacagtccagtgtccatctgcatttgctcatgcagagggggtgagttgggcactccctgttgttggttttccttttgcagcacactgggcagtctccctataaaacaaaaaccccaccttctgtgccttctgctttagagcagagctccccctcccatttcctcagtcttccctgcaaaatctgtccaccggggaaggcagcaggaaccctgggcagcgggtgttctgggaaggctagtgacagcagatgtcatccaggaacagccacacacggttctccaggccgccgtcagcagctcaaggtggggtatgagtgagaagctgaggatctcgcagcttgttgctgagcaaggtgcaaccgggctcatgctgtcatcagcacaagacgggatggcaagggctttcagacgcatttccaagagtccagcaagccagggggaagatgatccctttgccgaagtgtaccctctagccaacttttgggagcgcttctgtttgcaaagcgctggggatgtgcctgtctctgtgtgacccacgaacgggaagggagagcactggagtaatgacacttctgctgctgctttgattctcaaggctgatctttaaaaccctcgccttgctgacaggtgctttaaaggcagtctgcatcttttcttcccttggtgtgggagaggtaaacactttgatttgctgaaagctgtatggagtatatttgaacagctagtagttagctttgaaagtggaagtgtgaacagacactacttgtgtcgctttgggtccttcactttacccccacagaagtctagaggcgtctgttataaagcgttacggggcgcctgcatgcaggaggaaggacctgtattagctggaaatcatcaggaacccagcttgcctccatctctctgagatgtgctgggtacagcctgcccctcctagttctgtccaccgggaagagccggctggcggcagatccccaggggcagagcccctgctggatcctgggagctcatctttacctgtgccggagtgggaactgtgattccagccgggcaggtcagagtggagcagtgctaagaggctgttgcaggagaactagacgggcggggcctgctgcatctggatcatgtttctgtgctctgccccgcgctagggactcagggtctgggcttctgccaggtgaggagcagagagactgttcccttgggtggagaggtgtgggcatgagagccacccattgccaagcagcaagaatgttcgtgcttttttccagagaggggaaccccactggtttttgtggaaacaatggaaacttacagatgcctgcctgggatgatgaggcacattcagaacaaatgcttttttttttttgagacagagtctcgctctgacgcccaggctggagtgcagtggcgcgatctcggctcactgcaaactttgcctcccaggttcaagtgattctcctacctcagcctcccgagtagctgggattacaccaccatgcccagcaaatttttgtgtttttagtagagacggagtttcaccatgttggccaggctggtctcgaactcctgacctcaggtgatccatccgccttggcctcccaaagtgctgggattacaggcgggagccaccatgcctggccagaacaaatgcctttttaaaccttttaagaacatttttaaaatgtctttttctatgtcaaatgtaacgtttatttttttaaacaataaaattgatttgccaaaa

SEQ ID NO: 1887 - DNA, 3333 bp, Homo sapiens
tggagttcaaagccatgctgatcgctgtgggcatccacctgctgctgctcatgttcgaagtcctggtctgcgacagggtggagaggggcacccacttctggctgctggtcttcatgcctctcttcttcgtgtcccccgtgtccgtggctgcctgcgtctggggctttcgacacgataggtcgctggagctggagatcctgtgctcggtcaacatcctgcagttcatcttcatcgccctaaagctggacaggattattcactggccgtggctggtggtgtttgtgcccctgtggatcctcatgtcgttcctttgcctggtcgtcctctattacatcgtctggtccctcctgttcctgcggtccctggatgtggttgccgagcagcggagaacacacgtgaccatggctatcagttggataacgattgtcgtgcctctgctcacttttgaggtcctgctggttcacagattggatggccacaatacattctcctacgtctccatatttgtccccctttggctttccttactaactttaatggccacaacatttaggcgaaaggggggcaatcattggtggtttgcattcgcagagacttctgtcagtttctgcttgaaattttcccatttttaagagaatatgggaacatttcatatgatctccatcacgaagatagtgaagatgctgaagaaacatcagttccagaagctccgaaaattgctccaatatttggaaagaaggccagagtagttataacccagagccctgggaaatacgttcccccccctcccaagttaaatattgatatgccagattaaactcctagagaggacccaggcacacacagactccacttggccttcgcctcttgttcattcatcccaaacctggaaatggaaacaggcttcaaacactcgtctcacgccgtgtttgagatcaccgcctcatcagtatgcatcatagatggaggtggtttcagtatgtgggtgtgtgtgatgtgtacctgggtaagagacttgctttccaggttcgcactttcaggtgtagctgggggcagtaagtcgaattgttttagtaggtcctcaaaaggaataaccacacagctgtttgtttaaatgctactgtacctatcaaaactattgtttaaaaagtatttttatacactgctaatctaaaattgtatttcagattgtgcctgtcataacaatagcaaatgtaaaaagttctctttcccaccacttgtttataaacctcatagttgatatttttagtgttcctactgttaaaatactctctccttgggctttgctgatactggtctttaatattctgataggtgaatttttctaatggaatgaacccatgcatatatagtatttatatgaatattttagcagtgtaatatgttgaattctagttctctgcattaccattattacgttaaagtattttttaaagcttaggtgtgaagatatgtgtctattgcagatgtccttgaaaactgcataaaacagtatgtgcctggtgtggatcttaccaaagtactaggcatgaatgtagggactgcaaatcccatgggtcttaatatttaggtgttagtaaccaaggtctctggtagtacccgttagtagaggaagaggccactgcccttgggaacttgtgacaggctctagtgtggtaccaggccataaagtgacactgttatttagcaacttgaatttttccacacaggtagtaactgtgtggaaataagcaacaagtggtttgtccatttctaagaatcttaaactattagttggctgtagtgtgaagcattacttgtcattggaaagatggagagagtggccttaaccggaagtggtcagtagaagcaggtgtcattttaagggccaaactttaatctgtcagcaatagggaaacaactgttcaaattatctttgtagataagaacagtgtttcttttttcttttcttttgtttttttgtttgtttgttttgttttgttttgagacagagtttcactcttgttgcccaggctggagtgcaatggcacaatcttgatctcagctcgccgcagcctccgcctcccggttcaagcgattcttctgcctcagcctcgcgagtagctgggattacaggcatgcaccaccacgcctggctaatttcgtatttttaatagagacagggtttctccatgttggtcaggctggtctcaaactcctgacttgaggtgatctgcccgccttggcctcccaaagtgctgggattacaggcgggaaccactgcacccggcaggtacagtgtttctttaggtgctggtggtacaccagggaatcagggcagaagctggatcctgcaagagtaatgtttgagaacaaataaatactttcgaaaggaggtcgaaacaaaaaggagtgtaggtgttattactgcagagaagactgaatggagtccacttttcttattagtaacttactaaaaatgatctcaaatgggctccacacactttgccctggccatgaggcaaacttgttgggtttggagaaaaacacataaccctaaattcactatttttgccctatataaaacattaaaataacatgctctgtacacatgctgtcaacaaaagccagctctaggaacctgagtgccagaatgcctgagggagctacagctgggcttagttggctgggattgagctcgctgtctgagggagctcgctctgtctctctcacactggcagtttacaccagccggcagccctgagcagcagtgggtgtaactttttataaataaggattcattgattcattcatattctcaatatttcttgaagacctaccccgagccaagcatggtgccaggcagtggggatgcagtggagagcaaacagccctgcccatgcaaagtgtcctgtacggtgagaagtgtgagctgcacccacaaagggaaagagcccagtgcagcttttgcaaaatgcagggaaggatgctgctagcctcagggtgacctagaactttaagctcatctttgttttcaggagcccagtgcctcccctccacccctaaagaatatctcaaagacgtggattttcatttcagtaagatttaggggtgcatgggcaggcagtgctggaggaactgggaggcaggtttggaggctgcagtgggaccactggcccctcctggctacagtttcaggccaggagcttgttggcacctggtgcaaactcccaaacctgaggggtccccacaaccccccagcccatcttaacttcctcttcccccaagctatctggtgttggaaagccagcatctagtgtggaaacaagcttt

SEQ ID NO: 1888 - DNA, 181 bp, Homo sapiens
aaccccaggggcctgttccaggacttcaaccccagtaagtttctcatctacacctgcctgctgctcttctcggtgctgctgcccctccgcctggacggcatcatccaatggagctactgggccgtctttgcccccatatggctgtggaagcttctagtcgtcgcaggcgcctccgtgggcg

SEQ ID NO: 1889 - DNA, 931 bp, Homo sapiens
ttttgatacaattcttcttaatgcatgatcaaatctataatgcctaggagtatttattatctttcccaggaagagaagagtactctagtatttgttttgtgcttctttaaaattttattttatttttttaatttttttcagacaggatcttgctctgttacccaggctggagtgcagtggcacaatcacagctcactgcagccttgacctcccaggctcaggcaattctcctgcctcagcctcctgagtggctgggactacaggtacccaataccacacccagctagttttttaaattatttgtagagatggggtctccctatgttgctcaggctggttttgagcctctgtggccagcctgttttgtgcttttatagcatataaaagactaccacatattatgtttaattggtaacagtatgaaatacatattatactgaccatctatagcctaattttattctcatggcaaccctgtggagggggtattgtgaaagggcagtttgcatagagactaagagttgagttttgaaggtagactgcctctaccgcttactagccacgttattttgggcaagttatttaacacttccaggtctgtttccaaacctacaaaatggggatagtataacaataactcatggggttgttatgaggttttcattggttcatacatcaaatctagaaaagcttttgtcacatatgaagtgtgtagtgagtttcctattattacttccaggttggagatgagattggtcttcataagaattaactgacaatgtttacgaattcacacagctaacatacaatagagtcagaacttgaactctggtttactggctccaactccagtattctttccactactctgcgaaaagtatattatttttaagttggcattagctttttcaaattaccacgtgttatttta

SEQ ID NO: 1890 - DNA, 117 bp, Homo sapiens
tcacgcctgtaatcccagcactttgggaggccgaggtgggcagatcacaacatcaggagatcaagaccatcctggctaacacggtgaaaccccgtctctactaaaaatacaaaaaaa

SEQ ID NO: 1891 - DNA, 339 bp, Homo sapiens
ctcacaatcctggaggctagaagtccaaggcgaaggtgtctgcaggtttagtttcttctgaggcctctccttggcctgcaaatggcacctttttgcatgtcctcatatagtggtacctctgtttctgttgactgtctgctaatgtcttctcataagaacaccagtcatattggcttagggcccgctctaatggccccattttaacttaatcacctctttaaaggccgtatctccacatactgaggtactggggtttagggtttcaacatataaatttggtggggacacaattcatcccctaatacttctatagttttaaacataagccatcatttctta

SEQ ID NO: 1892 - DNA, 23130 bp, Homo sapiens
gttgcagcgctgccactggagtgacatgttcacgggaaggctgcggaccgagatcccaccagccctggtaagcgaactagccgctcttcccctccacgcgcaaggccctctttggcaattcccagggcttttctcatgctttattctttctggagcctaagattagccctgtgggtgactgagctgctggaatggaagcccggcaagtccagcacgtgccctgtgtcctgacaggaggggagggtgggagcacagagactgacaggggaggaaccctaagggtggggacttcagggaggtgggagagctgagaccatgcactcctgggtcctcctgagctgcttggcttggttgactgtggatttcaccccaatatgattgccccgcctttcctggcaaccccttcctgcacctcgcagtcctgctccttcatgacttctctgcacacagcccatgtagccgtccccatctttctctggctcctccctttctccgtaccactgtctgctttggtttgtgcccgtcatgggtggcttcccatttcttcattcccagggctcagactggcttgggtcgagttcccagtctctgagtgcatatgtgtggaaggaaatagaaagaggcaacacagaacacagaaaggcatgcctggccaagggaagagggcagggctggtggtcggcagcctctcagtgtgtcctcctggcacggggctgcacacggcaggccctgagggtgcaggtttctggtcagtgatgagtgtgcacattgatgttactgagcccctcaccctggttgcgcccaacctccttttatttttttttaaagacagggtcttgctctgttgcccaggctggtcttgaactcctgggctcaaacagtcctcccgcatcagcctcccaagtagctgggattacaggtgcgtgccactgcacctggcttgtgaggctaggatttggaatgtaggttaagaaaattcatttctggccaggcgtggtggctcacgcctataatcccagcactttgggaggccgaggcgggcagatcgcttgaggtcaggagttcaagtccagcctggccaacatggcaaaaccccgtcttactaaaaatacaaaaattagctggcatggtggcacctgcctgtagtcccagctacttgggaggctgaggcaggagaattgcgtgaacccaggaggtggaggttgcagtgagccaagatcatgccactgcactccaacctgggtgacaaagcaagactccgtctcaaaaaaaaaaggaaattcatttcagtgattgcatgttaaagaatttcaagttaggccaggcgcagtggctcacgcctgtaatcccagcattttgggaggccaaggtggggggcggtgcacgtggatcacctgaggtcaggagttggagaccagcctggccaacatgctgaaaccctgtgtctacaaaagtacaaaaattagctgggcgtgatggcaggggccttgtaatcccagctactcaggatgctgaggcggaagaatcacttgaacctgggaggtgaaggttgcagtgagctgagattgtgccattgcattgcaaccttgggtgagagaaagcgagactccatctcaaaaaaaaagaatttcaagtcagaaaagatggtgaagagaactctcttttgcatactcactgtggaattctcactgtgcaagttttgcctaaattttagcatttcatttccctgagctttcagaaggtattcttttggtttttgttttcttttacttgactctgtaggaatggggaagagaaagtattcttatctctatgttcccaatcgtgagaataaatcttaagagggggataagagaatttggggttagaagatggcatgtggtggagtaggcacagggtgtttgagcagctagaggtcagttgaggccagatcgccaggggctaggctttttttttttttttgaggcggagtctcactctgtttcccaggctggagtgcagtggcacgatctcggctcactgcaagctccgcctcccgggttcatgccattctcctgcctcagcctcccaagtagctgggactacaggcgcccgccaccatgcccggctaattttttgtatttttagtagagatggggtttcactgtgttagccaggatggtctcgatctcccgacctcgtgatccgcccaccttggcctcccaaagtgctgggattacaggcgtgagccaccgcacccagccaccaggggctaggctttctgtgggtagggcaacgagaggacacattgccttttgcttactgagtggtgggaggatggtagaaactgcctcatctgccatatctgtggccagggtgagggcagaaagtctcccttccacattcctgcccccatggaccacctgctcagccccatttctgacccagtctctggcagagcctcctctctgaccatttctcctggtggggtgagggaatgtagctctccccagcccaggaggtttccaggagagcttcaaatcaccctgtcaaagctgatcctggccgtggcttagagatggccacctccatctgccagtcaccaccagaaaccctggaggcatttgtggttcctccctccctcctcctgcacgaacagggaaccaacagcttctgcatgtcccctgctccatgaacaggcagctcctctcccacacttgtcacaccggctggcaggtcccctctgttgccagtgtcgctgcctcacactcctgggtgggcactccagcccccctttctgtgcatctgctcacctcaggtctggggatattaattccatatccctcagccacctcaaagcccactgctctcaggctgaggctcacagtccttggcctggcattcaaggctcttgcctgatctgacccctcacttcccttccacccaaagcccatgccacggcttcttctggagcctacccacagctttcctccaggctcacagcctgctgcttcatgcttatgtctctctgctcctgttttttcagctgcctggagtcttttcatgttgactagctgattctcatccagactaagtccaaatgccacctcttacaaggagccttcccgggccactccaggcatacgcatcccccactctccagctgttaggagccctttgcagggtttccagtcttaagaatactgaaatggtttgtgtctgtgttggttctgcaccagccggggtgtccttggaaggcagagctgggcctggcacagaagcagcacccagcacagaagctgggtgtctatgaaactgacacgagcttcctctgtgcccagatctcactaggggaaggactcatcacagctggggctcagctggtggagctggacttaagcgacaacgcattcgggcccgacggtgtgcaaggcttcgaggccctgctcaagagctcagcctgcttcaccctgcaggaactcaagctcaacaactgtggcatgggcattggcggcggcaaggtgggtgtggcagccccctccccgcagagtcccctggtccatccacatccgtctgacatatgtgccctggcccttggccaccaccatctgggatggtcagccgttgttttcaaaagagaaaggcctcaaaggcaacagcctgtggccggagggtagaggcgtccatgagggtggggttgccaagcaaccatccccagttcttgggttggcttggcaacgcagagggagtgccactgcatacctgctccagcctgctggctctgcaaaactcagggcttggggcatccctatactcactgtacccgcagagcagctggtagagcctggcacataggcagagggagtctgaaaagaggagcatatgctcagggggggcaccgtcacagctcacctttattcctagacagggccttgcccagggaggtgtcctcaggcaaggtcagtgtagagcttcacgttgggctggtcagtgtagagtggagcttctttgcttcccagaacctgcatcaagggcggcctgccgtattattctcttccaactccatcccagtgcctttagacccagggttggaggacactgagtgccaggctgcaacccctacacacactttctaaccaaagggagaaaagggctggggacacagaagtaacagcagttggggatatcttatttgaatatgcaataccttaacttttcccacccacactgaaaggtggctgatgccatcccagtttttccacatgactcagcataggcttagagagatggggtggagtggatcacatagctagtgctgtgaggcccatggagccccaggctgaggagctggagtggcctcccctgcagagggtgcctgtgtccctcggcctgacgtgagggtgagcaggggcaggctctgtgcctgccttagccagccctcccccaagtccacttgggcaataagctatccctgtgttaagatgtaaaaatgggccgggcacggtggtgcagtggctcatgcctgtaatcccagcactttgggaggccgagtcgggcagatcacctgaggtcaggcgttcgagaccagcctggccaacatggtgaaaccccatctctactaaaaatacaaaaattagctgggtgtggtggcaggtgcctgtagtcccagctattcgggaggctgaggcaggagaattgctcgaacccgggaggtggaggttgcagtgagccgagatggcgccactgcactccagcctgggcaacaagagcaaaactccgtctcaaaaaaacaaacaaacaaacaaacaaacagaaacatataaaaacgtttgcgtcagcacagaaagcaggcgtggcccaacctagagtgagtggcatacgctgggagagccagagactctattctagcaaaatgcttcggttttccttccattacttcccttctcctgcccagcagtgcctggaaactgaggctcagggagctttcctactggccaggagttgtctggcctgtcctatacttgtaatggggtgagttggggaatgagttttggacccaggaccagagggcctcctgggcagacaggcctaccctggagtttgattgatggttctctgtgcctccctgaccactgatttgattaggtctctgggtctcggccttgctgacctatgcctcttgggagctcagacgccatggtctgggtgtctaaccaaggcctgcaggtcctttggaatctttttcttctgggcagtgtgtttagtgtggtttctgtgccatgcaccatgagaatagaagggcccagaggagttggtggggcaagaggcatggccctgtgcttgagaactctccatacccaagttggactcctgcaggagctaaggccatcaccacgtggcctccagggaatctgggagaatgggggtgacctagcagtcggctgctgctgctgagtagcttcctcagaggctggtctttggcagaagtttgatgtctctaccctgagtgtgtgcgtgatcgtgtgtgcgtgatccaccatcaccaccgtggagtcaggcaggtgctggctcttctgttcctcaaggatggctgtgtgcagtctcatgccaggagttaggccaacccacccgccatgtgcggctttgctaaatacttaccgggtgaccttggccaattcactcatctctcagagcctcagcttcctcatctgtaaagtacggccaatcctgcctgcctcccaggctggtgttgaggttgaaacaagaaaatatgccaaggatgcccaggccctagcaggtgctctgcaaacatcaggtgttctgcaaatatcacttctctcggtgcactcgctcgtgattcttttatgtcgcatttaccatgggctctgattcccatcggtcagtctccgtttttcagtgcttttcctaatggtgtaaccagggtagaagctacttcctggcaccacaccagggacagggcaagctgggtgttaggtttttaccaccagcaggcaagctcctgctgtgcctggccagcttttaggcacaggcaggtgtcagacaggttcgtctggaccgtggacttggcagctggctcccttggacattgtggaacgtggaagagaagctggaagatttgggctttggtccagagtccaccacttgtttattgaccataagaaagtttccgttcctcttaccctgagtttcttcagctggaaaatgggagccatgattttcccacctagcagagggccttagacagtgaagtgagctgactaggaagtccttcccctggacctggctaaaagttcatccactccatgtggtctctccctttcctgagtagggcttggtctccccgtctcgaaagtgaagctaaacctctcaggctggtgtgacacagcattagagataaaaaccttgtgtaactgaagtgctggacatatttaaggtgtgactgttgagctgttagcagtcctgcgtcccctgacctgcaccgatgggtggcgtgggatgttgaagagcagttcagcagcagtggccaccccgctgggagaaggggctcctgcccatgaccagggccccttgcctttccccacagatcctggctgcagctctgaccgaatgtcaccggaaatccagtgcccaaggcaagcctctggccctgaaggtctttgtggctggcagaaaccgtctggagaatgatggcgccactgccttggcagaagcttttagggtgagtggtttctgtccatcctgcccctgcagccttgaggtgcactcggcatagtaggctgacagttctggatgctaatcccagggctggcactcaaccaagagacctggggcgtcacgtgccctctccaagcctgttaacccatccgaaaatgagccagaattcctgtcgtgcatttctggaaaggtgtgtgactttccggaaaggtgtgtgactggctcccactggtgagccagcccctatggggcttcaggccaggcaggccactctgaccaaggagtgtcatctgccaggctcagaagtggtgaagtgagatggtgcgagtgctgacagtagcctggcccagccactggtgtggggcacagagaaggaacataccagacctccaagacagggagataggcaggggcagccgcagggctcaggtgccaaatgacgtgctctcaggtgaccttatccccactcctcttccactctcctctccccatccccgcaggacattgctgagtccccgatcgtgagtgccagcagaaggctacacttgcccctaacaggactgaaaactttggggtctgtctccctcctctctttcctgttttttttgaggcagagtctcattctgtcacccatgctggagtgcagtgcgtgatcttggctcactgcagtctccgcctcccaggttcaagcagttctgcctcagcctcccgagtagctggaattacgggcacccgccaccacacccggctaatttttgtatttttattagagacggggttttaccatgttggccaggtggtctcgaactcctgacctcaagtgatctgcccgcctgggcctcccaaagtgctgggattacaggcgtgagccaccacgtccggcccctcttctcttaatttaaatgttttcttcagcaaacagtatcctaggagcattgctcatacgggccggaatgtcctggctgcccatcgaggctgtctgtagataccctttgcctgcttcagtgccaagtgaacatcgcagagatctgccttgtgtctccctgcacccctggctgcaggggagctcctgctgcctcctctggagctggtgggggcctcactgccatccttggatccctccctgccgtcagcctgctgtcctcagtgcactgggaggagggggtgcgctgtggttgtgttgagccttcataggtgtcctctggtgggcttagaatgggggttcttaatcccccccagtatgtggatagaattcaggggtctgtgaacatggatgaggaaaaaataacattattatttattactaatgtagctaaaatatgtagtgtgacctttgattataaatgtagacaataaacctcacagcattagaaaggcctgtgactacccacataacaaacaagcacatgtagtccctgaacccaaaaaaaaaaaaaattttattgaggcagggtctcgctctgttgcccaggctggagtacaacggtgcaatctcagcccactgcagttgaagcttcccaggctcaagtgatcctcccacctcagcctcccgattagctgggactacaggtgtgcaccaccatgcccacccagttaatttttgtattttagtagagatggggtttcaccatgttagccaggctggtctcaaactcctgacctcaggtaatccactcgccttggcctcctaaagtgctgggattataggcataagccactgcgcccagcttaaaatttttaaaaaaataaaaagaaaatcttgtgactttatccccagtggaaatcacaggtatttcatatgaagttatagttactgctgatatatagaaatatttctcactacatcaaaattacagtaatagtggacccacccctagatcttgttatttggtgcattaacaagaagtttgtatatcactacagcatgcgtttggagttttttcctaaatgttttgataactgttccaactgagttgatttcctttgtaattctgtgtaatttatcttaaaattttaaaaaaacattttttgaggaggggacccaggggcttcaccagactgcctgaagggttcatggcacagaaaatactaagaaggcctgacctggagtgtgcccaggttggccttcctgtatttatttgtggaccacccgctccccccattgccctgtgctgcactgagcacctgaagacagcagaagattccttggcacagttaagccaggccaaccctcagtcctgggtcacagtggagactgggacatggccctctcctccaaagctcaggggccgatgggatgcagacggaatataggctttgaatgtaggcaggatgaggaccaccgtgatagaggagggaccaggtgctccgggagcacagaggaacgcacactggatcgtggctgggggaatccaggaagccttcctgggagaggaggtgaccaaaacaagagccctagaactcatatgagttagcctgtcaagaaaatgctgaatggctgggtgtggtatctcacgtctgtaatcccagcactttgagaggccgaggaagctggatcgcctgaggtcaggagttcaagaccagcctggccaacatggtgaaacctccatctctactaaaaatacaaaattagtcgggtgtggtggcgcacgcctgtaatctcagctactcaggaggctgaggcaggagaatcacttgaacctgggaggcagaggttgcgatgagccaagatcatgccatcacactccagcctgggcgacggaacgagactccgtctcaaaaaaggaaaaaaaaagaaaaaagaaaaagaaaataaggaggcagagagaatgggtatcaaaaggccaggctgtgatagggctgcatgggccagggaacaccctcctcatccctagagaaggacgccatgtcgaaggggttatgttgtgtaggtgggtgggctaggagggcccctaagaaagaaaggtcacatggagctatgtcatccagagaaggggcatgagtgcctgcccaccacagccagggtccccactgtgctgaggacaccagactgagaacaagaaatcgacctgctggatctagagctctgtgaccctgggcaagtcacttcgcctctttgatccctagtcttttctctggtggggatcctatcccaggcagtaggcctccctcaggaggttgtggaaagagttagatgcagccatgccccaaaatcccacagacaggcccctgccctgtgctggcggcagcccattcctgtgcctgctgtgtggaattgctctcctgcctgctggatgtcacctggcactcggggccccctccactctctgcctcctcttcacaggtcatcgggaccctggaggaggtccacatgccacagaatgggatcaaccaccctggcatcactgccctggcccaggctttcgctgtcaaccccctgctgcgggtcatcaacctgaatgacaacaccttcactgagaagggcgccgtggccatggccgaggtgaggcgagtgtggcagagccagttgggccccgccagatagaggctggctgctgtctttccagggaagctggggctccgtttagcagggactcctctaccccctgcctgccccctgggtgtgtgccccatggctccagctctttgaacatgtcctgaacagggttgcaggtcccaaggtaacccacgccctcctcgggcagctctgattcttcatgccaccttctcctgagccgcctctgcagcccccagcggctgccgctggtttgttctcaggctgcacaggagcagactgctccccacatctgttttcctggttgatttgttcagcagctgttgtttgttttgttatttattatcactttttgagacggaatcttactgttgcccaagctggtcttgaacttctgggatcaagtgatcctcccacctcagccttctgagtagctgggattacaggtgcaggccactgtgcctggcccagcagctgttttttgagtccccatttagtgcttggctttgtaccaagtgcaggccacatggggttgagccaaagaccccgccttcagggagaccctagctcaaggagggaaggaagctgccagtggtaacagtgctgggctctgaacgcagtggcttcttggctgccagggtcccgtggccccacagaaggctagtccggctgcctgtgtgttagcagagatgtgtgcaggtgttggggaacacgccagaaggaagttcaaatcagacttagggcaggcttcctggaagagatcacattttggctaagttgtatagggcaagtggtctttctctggacagagggtgggggatgggtgtttcaggcagagggatcagcttacgtgtggaagacccggatgctcagcaggaaccttgcttggttggtctcaggaagagttctggccgtaacatggggaggggtggaggaggtttggccaggggcccagaggccaacaagtagaagacggcaaagctggtgacttgcagaggaggacagtgtgtggtggctggcttgggatgtgaccgtgtggggcccccggggcttgctgagggctggggtgtggtctgcaccctcactctggacccttgcttccccctcacagaccttgaagaccttgcggcaggtggaggtgattaattttggggactgcctggtgcgctccaagggtgcagttgccattgcagatgccatccgcggcggcctgcccaagctaaaggtgccagcctggacgcctgacgtcctccctctggggtctgtgggtggtggggcggctgggggcacaggggtctggtctgaaggcaggtgggcctgtgtccatatcccagctcctccacttcgggccctgtgatgctgtgtgagcctccacacccctctgagccatggtttcttcatttctaaagcgggaggcagggagtggtgtacatcactgtcttgtgatttaagtaaacacagtacgtgactcatcgttggctgcagggcattatttttgttgttggtgttattcttcctgcccactttgccccacctggaggacagagcctgccatatcctcacttggggaaactgaggcttagagtagaacctggtgtcctggcccgggtttctgcctgcctccaacccttcctcttattttcaggagctgaacttgtcattctgtgaaatcaagagggatgctgccctggctgttgctgaggccatggcagacaaagctgagctggagaagctggacctgaatggtagtcggatgggggaggcctctgcacaggtctgctaggctggccctggcaccccggctgactgctcttccctccccttgagcaggcaacaccctgggagaagaaggctgtgaacagcttcaggaggtgctggagggcttcaacatggccaaggtgctggcgtccctcaggtagggaactcggggtggccccagaggtcggggtcaggccattcctttctttctttcttttgttcttgagatggagtcttgctctgttccccaggctaaagtacagtggcgtgatctcggctcactgcagcttccacctcctgggttcaagtgattcccctgcctcagcctcccaagtagctgggattacaggcacccaccaccacacctggcccctttatttgtttctacttgtatttattcagaaacgttgggtgcactcctgttacgtactaggtcatacactaggcatcagggctataaggatgggacagtcagggcttctgtctcgtggggtggagacagaatgagttgtccgttcaacagaggagctcgtacgggctgagcggggccaccctgtagagtggtggagttggggaggcctctgaaggggtgaggccagatctcatcctgatgtggtggggcctggggagtgatgggggtgggaggtgggggcagccagaaggggctgcactcgggattgttcttaagacgctgactctagaaaggaagagaccatggggcctggggagtctacctggaggtgaaggtgggtggccggggagtggccatctcctggatccaagtccggttgggccatcagcatcgggctccctgtgcccctcgcatctccaagtcggcctcattcgtgtgtcagatactcagtcgtgtctcctcggtgctaggccctgagctgaggctaggaactggggactccgaggtgggctgaacctcacaggtcccactgtccctgggaaatggtccagccttcctatggggcaaggacacccctactcttcttcctcccccacacctgtagcttcctgaggtcatgtggatgtgggcgcccctgccctggcatctcaacctgggcagtgttcctgccaagccctgggctctaggtgtgacaaagctgtcttcgttttctgtctctccatgaaacctggggctccttgaggacagggacaagatctgatttttttttgttttttttttttgtttttttgtgggggatggagtctcgctctgttgcccaggctagagtgcagtggcacaatttcggctcactgccagctccgcctccagggttcacgccattctcctgcctcagcctcctgagtagctgggaccacaggcgcccgccaccacacccggctaattttttgtatttttagtagagacggggtttcaccacgttagccaggatggtctcgatctcctgacctcatgatccacccacctcggcctcccaaagtgctgggattacaggcatgagccaccgcgccgggccgatcttatttttttgtgtccacagcatggatttccctggtgatccacctgcccctgccctgggagcaggtgctcccaccccaccaggctctctccctcctggctgaggtgaggtctctgggctcatggagccaggccttagagccaacctgggctgctgggtagagaggatctgcttcagccagctctttctgcagtgatgacgaggacgaggaggaggaggaggaaggagaagaggaagaagaggaagcagaagaagaggaggaggaagatgaggaagaggaggaagaagaggaggaggaggaggaagaagagcctcagcagcgagggcagggagagaagtcagccacgccctcacggaagattctggaccctaacactggggtgagtttctatcatctgccacaatcagagccctggtcctgagaacgtgaaatcccgaggcactttcacaatggggtagggggtgtctccttaagcacagtagccacaaacatttttttttgattgcatgatattgagtaaaaaaaggaaaatggtcccagtgtaatgatagttacctatatttcttttttttttttttgagatggagtctcactcttgtcacccaggctggagtgcagtggtgtgatctcggctcactgcaacctctgcctcccgggttcaagtgattcttatgcctcagcctcccaaacagctgggattacagatgcttgccaccacgcctggctaatttttgtatctttagtagagccggggtttcgccatattggccaggctggtcttgaacttctgacctcaggtgatccaccctcctcgacctcccaaagtgctgggattacaggcattgagccaccgggcccagccatagttacctatatttctatttaccccaatataaatgtctatttacaggtagcagtgctgctgcattatgtatattataagatatgcataagggtttctgaaagaataaacaaataagcataaatagaaattctgattttttttttccccacccaccagaggattgtcttggtgacccttaggaaccactcccccattcctgggatggtggctgggccatgacctggcttgggcacttggtgtcccttgtctggcccggggctgcatcagggctgccacacctccagttcattcatttgcattccctgtcaggttcctaagtaaagctcctggagaacttggctctggacaaggactccccatgcttacgctgaattgggctgcttctctggtttatggaatcaattaaacaaatggctaggttcgcctcaattcagtttttcctctgggcacctctggtgctagcagggcttacccaggctggactgtagttctacggggacccactttagcccccatgtgcctccgtagtcatttctggggcactgcatgtcatgacgaggatccacttggccgtagcaggttttttgagtcccagggaggtagcttccccctcaccccaaaggctcctggaccaagagccatccagggccagcatctctgggtgatattgatagatgggaaatgcagctgagtgggaggaagaattctagactttgagcctagatgggctggagtgaagggtggatgtgctgggtgtggggatgggcacagctgtgtcggggagtctggggtccggaattctccagagcctctgtgcccctacttcccaggagccagctcccgtgctgtcctccccacctcctgcagacgtctccaccttcctggcttttccctctccagagaagctgctgcgcctagggcccaagagctccgtgctgatagcccagcaggtaataaccacccctcgacccccacgctgtacgtgctgtggcttctggagctgttagagaaaagggacgaacagctcagagacctgggggtgcgacgctgtcagctgggggcagggaggcttggcctgccactgttacaacacgcgcaaatgtccagggtatttataagcctccaggggttgcaaatgttccctccccactcagcctacagaaagtacagcccgccagttcccatgctgactggggttagggaatttccttaagagccttgcatgtgcccaccccctccttggcttctctctgcgtgttccgtcagcccagctgcttcgagaacaactctgttgcccagggctcctttggaagtgacgtgcctattgcaggatgggtgccctcactccagcctcacttgttggttggctcattcattcattcatagatgatcttcggggcatccattttctgccaggcactgcatttgggcatgattttatttaaccctcttggcaacatgaaatgtagactctgctgcccttactttattttattatttatttatttatttatttttttgagatggagtctcactctgtcgcccaggctggagtgcagtggcacgatctcggctcactgcagactctgcctcctgggttcaagcaattctcctgcctcagcctcccgcgcccagctaatttttgtattttttagtagagacgaggtttcaccacgttggccaggctggtctcaaactcctgacctcatgatccacccacctcggcctcccaaagtgctagggttacaggcatgagccaccgtgcccggccagcccttattttgtagataagaaagcggaggctcggaggttacagagaaataaaatgggcccactctcagagttggcttaacatttcggccaattgctttgttaggttttgcctgtattctttgtttcttttaacatgataaatcagatgttgtaagcctttctgtggcctatcactttggtgtagcaccattcatcactttcttgtgcccataaaactcttctcaggatttttattgcaatgtgtggatgtagcacttaaaagccaggcactgtttctgacgttttttccacttttccctgttgtgaggttgaggtaaacgtttctgcatgtgagtattgtctacatgctagattatttcttcaagttcaattacaagatggggaccactggatccctgaaatgatttttttttttttttttctgagacaatgttttgctttgtgactccggctggagtgcagtggtgcaatcatggctcagtgcaacctcgacctcctgggctcaagcagtcctcctgcctcagcctcccaagtagctgagactataggcacacaccaccaaccttggctaatttttttcctttttgttgacatggggtcttgctatgttgcctaggctggtctcagacttttcgcctcaagccatcctcccacctcagcctcccaaagtgctggggttacaggcatgagccgccacacccggctgggatgatttttcatccttgttcattcactcattcattccctctctatgctgcatatgtgcttgctgcaggccaaatccaagccagactctgaagggacagcatggggtaaggcaggacctgttcttgcccgccaggggcctttgtactgcccaggcctctcctagctagcgtcagagcccaggtacctctccaccacgtgccacaggccaaccattgtctcttttgtcctcagactgacacgtctgaccccgagaaggtggtctctgccttcctaaaggtgtcatctgtgttcaaggacgaagctactgtgaggatggcagtgcaggatgcagtaggtaatgtgggctgggtgagacctgggtgccctctgtcccttgatgctcgtgggccccaggtatccttcgtggttgccgtaactcgtcagccccagcgctctcatgggaactgctctttggccacctgagtttttcctccgtcagggtcctgccgtggagccagctggctgctcttctccctgtttttcaccactgagaaactgaggcctttcccaaatccacacagccatgtacagttagaacccatagcccgctctaggaagtccagatagtcacatctgcaagcccaatggacgcaggtctatcgggaggagggatggtgagagccaagcccttgtccacaccttggagcttctgtgctcacgtccactctacctggaggttccttgcacagaggacacctttccccataacattatgggggcttccttggagcaccagcccatatccctccagccctatcacaaccctctccccaccctgtctgtttcctccattccagcacctgtcaccttccaccctgtttccatgtgcttgactgagcctccacatctaacgaaacctgagccagttccggttaggcagaggggaggaagggccctgaggcgagggggacggttcctggaaaagatagaaaggggtggaaggacatgtggtgcctcttcccggcgtggcgtcgaagcggggagggcggctcagtgggaaatgaggctcggaaggaggtgggggccagacacaagcctgctccctgagggcccgcctgtgggcatttttgggaacaagttgccctagttctgtttcccaggaagcctagcacagtccctgcacatcccctcaccctgccaaaataacctgaatcctccccagtggtagcctgcctcaggaaatctccattcccacggtgtgaggtgggcacagtgggtgtcatccccatgcccattttatacctgaggccaggatgggcaagggccagagtgtcacagctggcagatggactgagcccatcccctgatgccaactgccactccctctggttcctgtgtctctgccgtccctctcgtgttcgcctcttcgtcagggcgaggaggcaggcgagcctgtgtctgcgcggtgttgggggaaccctgggtgccttggcccagccctctgccatagccagcagcctgcccctgctgcttctgccctacagatgccctgatgcagaaggctttcaactcctcgtccttcaactccaacaccttcctcaccaggctgctcgtgcacatgggtctgctcaaggtgaggccggaaggaacagcaggcccgggagggaggtgggtggggtctgcacagaagctgccccagccatgcccgccaacctccctcacctcgagtcctgagccggctcgcccacggggccccgaggcctgggtctgccccagcagccttggtcttcacgatgagattccggctagactcagttgtgggcactatcagcagagtctggatggtggagtccaggggcccccccaggtgactttgaagctcaccccgcttttcgctgtgttcctctcagagtgaagacaaggtcaaggccattgccaacctgtacggccccctgatggcgctgaaccacatggtgcagcaggactatttccccaaggcccttgcacccctgctgctggcgttcgtgaccaagtgagtgtggccttgtccttctgccggtgcctgccctctcgggcttctctggccaggtctgaaggcgcccggttccgggaggcccagccccagcccagccagcctgctggccccactcaggtgcatgagaggccctcatgcctcctgggctctcagcatctgcattggagtctcaccacccttgggaggcccactcccctctgcccagctgaggacagtggggctcagggacagtgagagaggagacatgcggcgcccccattgtgcagatgaggagcactgggttggttaaggagtttcccttggtcacacgctagcaagaggctgggccagtgtccagacccatgtctgctgagcgaggtgctgcggttggtgacatctccggagtggctttttgtccacattcacagcagcgcaggccaaaggggcctggtcacaccaggctctgcagccccgggccctctcctggggacacacattgccacgggagctgccaaatgcccagcaatgtgtgaaccttggccttgttctggagggtcctggggtgtcccggggcattgatggggtgatgggcacagtcaagtaagagaggcaaggccccaccagggaggggtcgggaggcttgccctctgaaggccctgtgtggcccctggccaacctgtggccttcatcaggcctcagtctccccatttgtccaaccggggggttaggtgagattgtctccaagcgccctgaccagccacacttccagtcagtcggcgccatccggggacatggggcaggcagaggagcaaggaagtccctttgctgggggagcccagagcccaccagctgaggcaggatacttggtgcatgtggggaggcggggctggcggagcgtgagcggcccccgctggcctccagcacccagctggtgccgcggcagccctgtccactccagtgtctgcatggcgccgcctccttagccaggccttaccttctggccgcatttcccccacaccagaccaccccttgggctgcagctggactggccttggtgaatggcagatctcactgttcccctcctctgccaggtgctaggtagagcctcactgtgaatctcatggctggccacagcctcaccccgaccccaccccaccccaccccagcacagtgtgctctccctgagcccctttccatagcagtgctgttgctgcagtgccgagctttgcccatgctgtccagagcttgtttggccagtggccccagcccccgtctgcgcctgagccctttgtgtccttcctgccccctggtcagagtagttccctctgtatccctggcagcccctgtgctatcctaagcctgggcatgtgcctcttgcccttgttggtcagagcaaaatgccttttcccagcttgttgcccaacctccagcacaggcctcagtctgccccctgggtcttgtccaaggtgactgattaactatgtagtgacatgcacggaccctcttccctcagctcccagccaaatggtctgggatgcccggcctggcgcagatcctggcctgttcactggcttcaggccagaggtgttgtcaggcctggtcctggctgcgtcccgcacttgcccagtcccccagagtcttgcctcagtttcttcctttgcagtgaaactaatgatattgagggcaacaacagccagctcaggcgcagtggctcccatctgtaatcccagcactttgggaagctgaggcaactggatcacttgagcccgggagttcaaggccagcctgggcaacattcgtgaaaccccatctctacaaaaaatacaaagttagccgggtgtggtggtgtgtacctgtggtcccagctacttgggaggatgaggtaggaggaccacctgagcctgggaagtcgaggatgcagggagccatgattccaggactgtactccagcctgggcaacaaagagaggccctgtctcaagaaaaaaacaaccagcctggcgcggtggctcacgcctataatcccagcactttgggaggccgaggtgggaggatcacgaggtcaggagatcaagaccatcctggctaacatggtgaaaccctgtctctactaaaaatacaaaaaattagctgggcatggtggtgggcgtctgtagtcccagctactcgggaggctgaggcaggagaatggcgtgaactcgggaggcggagcttgcagtgagccgagatcgcaccactgcactccagcctgggtgacagagcgagactccgtctcaaaaaaaaaagaaaaagaaaaagaaaaaaagcaaccaaaaaaacaatggctagccatttacttatgatccagattggactctagtgggccagtcctatgtggccactggcagccagtaaggattccctggcctatgtctgctggaagggcccttggagagcctggctgagggggccttcattctggccagctctgggctgtgtggcgttgggtgcctggctctctgagcctctcgcacctcccatccccacccacggtgtgcagaaggcagagggctaatgtctctcttgctgagtcgttgtgcaaattaacaaaaatgagtctggcaccaaaatggcccccacacttggaaaacaggccaagaggcatccaccgacctgctgacccctctttccccgcaggcccaacagcgccctggaatcctgctccttcgcccgccacagtctgctgcagacgctgtacaaggtctagactcaaagcctctcccatcccttggcctggaccagtgagctggggagggactcggatgaactgaggcgcagcctacgccattgccttggacaggactctggccacaggcagggcgggtctgtgtcccatgtgtcctgtcagtcccctgagtatgtgtgtgggtgtggcgcatgtgcaggtctgtgcctcctgtcgggatttgggttttaacgtcttctgctggcccagccctgctctgttgtggggagttggcccccaggggaaagggctgtgagctgctccgccattaaactcacctccacctgagggcgctctgctgatctccgcctgggccctgatggccgtccccacccacctgccttccggcccggctccctggcggagccagaacccagggagttgcccgcgtgctgtccttcccctctgtgttgtgattgggttgtttcctgccctgcctggggctgcttctcgtcaccaagccctggtcctgcggcagctgtcacccctaccatccataccactgtgctgaccgctcagcctgaagagcagagaatgccatgggtgggactgtgggggtcggatcgtggggttgttggcagagggcaaccctgggccccacaccgtgtggacaggcagacaccagattgtccaggagcaggagctgctgggactgcgctggccccggacctagtgggccttctcctggctgctgagatgtcgtctgtgactggcctggctggagggggagtgttgacaacccaaagctgttctccagtctggggagggagaggcagggtccccaatgtccgagctgcatctggacgctgctcttaaaggacctcctggggcaggggagcggtagggtctggactgggcagatgctgtatgacctccctgagcacccgtgactgccccatgctttcccctttgtgctctgtgtgtgtctgggctgtgcccgggggcttcacaaataaagtcgtgtggcagcttcagagactcagaaactctcactgaaagcgggatagtctcgggggccgttgtacgtggagtcccacctcggcagagcatgcggccccgcagcagtctgtggggcagtcagccctgcagaagggcccggcctcggcctcaggccactacctgggaagtggcagtcctgagtgggggcccattttcctgcctggccacacctcacccagcaccctgcctttgggctgcagctcgcttggcttctgcgttgctccttcactatggaagccacctcccttgggatcctttgctccactgccacatatgtgaggacagcccagccaaccttccttacctcctaccctacaccatgtatgtgctttgggagcccatgtcccccacaaacggcctccaagaagtccctccaaggtttcttagagggcaatattttctcattggcagtcggccacgtaggtgaccaggtggcagaggatactgctggccctgtcccctgtcttctgtgtgagttgatacggtagggggtgggtgtggggctggcattaagttctgatgccagctacaacgtggatgaactttgaaaac

SEQ ID NO: 1893 - DNA, 1239 bp, Homo sapiens
gggaggtggaggttgcagggagcccacatcaggccattgcactctagcctgggcgatgagtgaaactccgtcttaaaaaataaataaatagataaaataggccgggcacggtggctcacgcctgtaatcccagcacttttggaggctgaggtgggtggatcacctgaggtcgagagttcaagaccagcttggccaatatggcgaaaccccatctccactaaaaatacaaaaaattagctgggcgtggtagcgggcacctgtaatcccagctacttgggagactgaggcaggagactcacttgaacctgggaggcggagattgcagtgagccgagattgctccactgcactccagcctgggtgcgacagggtgagactctgtctcaaaaataaataaattaaataagggtaattgaggtatccatcaccttaaatatttatctttatgctaggaacattcaaatttttctcttccagctttttttttttttttttgagagagtctttctgtgtcgcccaggctgctgtgtagtggcgcaatttcagctcagcacaacctctgcctcccggttttcagcgattctcttgctgaaatgagtggcctctagagtggctgggactacaggcgtgcaccaccatgcccggctaatttttatacttttagtagagatggggttttgacatgttggccaggctactctcaaactcctgacctcaggtgatctgcctgtctccgcctcccaaggtgctgggattacaggtgtgagccaccatgcccggcatcttctaggtattttgaaatatataatagattaatgtaaacaatagttaccctgttgacctattgaacactaggtcttatttcttccaactttatacttgtctccattaattaacctttcttcagcctcccctccctctaaccttccaggcctctggtaactaccaatctactatctttatgaattgcctaatactttctttgaatcataccaggagtggtgtcacatgcctgtaatagcaggtactgtggaggctaaggtgggaggatcacttgaggccaggaggtcaaggttacagtgagctatgattctgccactgcactccagcctaggcgacagagtgagaacctatctcttaaaaaaaacgaagaaaacagcaaactttcatgtaatttcaaagcacttctatgaatggaaagctgacattccttacaataaaggaaataaaatagtgttac

SEQ ID NO: 1894 - DNA, 5139 bp, Homo sapiens
gtcccgtctcaccatcctgggcttccaacggagactgcggtatccgcagctggagacccagcggcgagtagccttttgctcccggacggacttgaggttggagtctgtgtgttggggaccctgcctttggaagcgcccgaggtagctgcttggcagctgggggccgcggaccgcgccgggcttgggggaggacggggctggaggctgggttggatgctttagaccctccccttctctctcaccggcggagtgggtgggaaactggttctttcccatttctcggcctccttaccgatcccaaactgtaaagccccaacccctcacagcacaggaaaaatgattacctgggcccatttctttgacagtgtaacacatttttaaaaaatgtgtccttattttgcgtgtttaaagaaaataccaatgttgtctttatatacaaatagtgcgtttgtcctcctgaatccttaaggaaaggacccaggcttatcctctttcccctggtttgggatccatcgatggcctaaggctctaagacaagtcagtacggtaccgtggttagaaactgaatgttgtagaaatgaaagaaattgctcttgaatttttgtgcttaaccttcaaagacatgtgatttacttgacattgaccattcttggatttcgaaagtgaacagaaatttgtgtggcttttcttgttacgaatatgtttatgtttttttcttcagaggcttaaaggatggcctcgtcagatctggaacaattatgctctcatgttaatgaaaagattggcaatattaagaaaaccttatcattaagaaactgtggtaagtaaaacagattccactgactttgtatatacaaaatgcattttgattattccactctgaatgatatctttgcttggttaagtgactgcatcttaggtaattttagatttttgcataacgattttttaaatagtccaatgtcattttgaatattgtggaggatactaaaaatgtaaggtacattgaacaatgaactgaatattcattagaattatttacttatgtttttctgagacacataggccaatggtgagatttgaaggttatgtggcatccatggttctacagctaaatagagatacagtcatgcgttccttaatgatggagatgtgttctgacaaaagcgttacatgattttgtcgttgtgcaaacatcacatcatagaatgtacgtaaatgtacacaaacctagatggtatagcctactacatatctaggctatatagcctattgctcctaggcaacaaacccgtatagcatgtgactgtactgaataccttaggcaagtgtaacacaatggtgagtatttgtgtatctaaacatagaaaagatacagtaaaagattaaaaatggaacacctgtataggccacttaccattgatggagcttgcagaactggaagttgctgtgggtgagacagtgactgtgagggcctaggacatcactgtatactactgtaggctttataagtactatacacttatgctacactaaatttataaaaaatgaaaaactttcttcaataatacattaaccttagcttactataacttttttacttaataaacttcttagtttggcttagcttttttattcttttctaatagcttaaaacaaatacattgtacaggtgtacaaaaatatttttatatctttatgagctttttttctatttttttttaactttttaaaatttttttgtcaaaaacgaatacacacacacacacacattagcctaggcctatgcagggtcaggatcatcaacatctgtcttccacattcacatcttgttccactagaaggtcatcggggcagtaccacacatggagcagtcatctgtgataacaatgccttctggaatatctcctgagggatctgcctgaggctgttttacagttaactttttttttttaataggtagaaggagtacactctaaaataacaatacaaagtattgtatagtaaataacataaactagtaaccatttattatcaattattatgtactatacataattgtatgtgctgtacttttgtaatactggcattagagtttgtttacaccagcatcaccacaaacatgtgaataatgcattgtaccatgatgttatgatggctccgatgtcacaaggcaataggaatgtttcagctccgttataatcttatggggccactgtcatatttatggtccattgttgactgaatcactgttatgtggcacattattaaaaggcaagttaaaaaaactgatgtagagctccataggggtaaaagtagttcataacccatcttagagcctgctttggaggaagcttattactctatatcactgggaaataactaattgaaaatgaaataaattatttaagcatccatgaacttggagattttaagtatatttgaaaatattttgacgtgctgaaattggatgatgcaatgaaagttcagagaaacagatgatccttgtcaaatctaaaatgtctaaagaattacatactccctaaccttatctgggagggtaacggtttattggcagacagaattccatgtgctgggaaggttgtgttgaacttgtattgtagtttgtattatgaattggtagtttgaaaactttctcaaatatgaaattataatgttagataggccatttcgaattatacctcccctctcagggacgttgatattctcagtcctgtattgataactactaataaaggagcctcatacattttacagtttatggttcacatactctggaaagttaaagctaaagggactgggttcatcttaaggagccccctgacctcacacctgaggaaactgagactctcggaagtcaggtggctggcccaggtccctcagctcatgagtacttggttgggcgacagtttctgtttcttgattcccatgttagtactctttctattttgttgccatttttattgaagtaatttgtaaaagacttttagatgtttaataatgagtcttgtttaaattcactttctgaggttatgattagtcatggataaacaaatataatttggagatctatacaactatcaagccttgaattcacatgacccaccaaagcataggcctggctgaagcagtcagacccatgagatccttacacagttgtcaactgtcattttgtatggggggataataatttgtgtggctccatagcctataaaataaagtctggtagtttgtttgctactttggcttctgtaactgactagattactacataaaaaacagtgaccagacacacacctgtaatcccagcactttgggaggccaaggcaggcggatcgcttgagcttaggagtttgagaccagcctagtaacatagtaagaccctgtctctacacaaaataaaaaatgagccaggtgtggtggcgtttacctgtagtcccagctattcaggaggctgaggcaggaggattgcttgagcctggtaggttgaggctgcagtgagctccgatggtgccactgaactccagcctgggtgacagagaaagaccctgtctcaaaaaaaaaaaaaaaaaaaaaaagtggtaaacaacaccctaaaatttaggtgactaaaagttgagataccagtgtatggggaagaaatactgtgttcaactaattctactgaaattattctcagagacatcagtactctcatttacttattaattagttttacttgttatgagctgagtgtcaaatgcaagtagtgttgctctattagatagaatgatatactcatgatgatgatgaatggcagttagcatttactgagtattacgttctacatgcagggctaagcccatcttatatgtactttcacctatcttcacagtaatgaggtaggtacttggtgtctctgacttcaggccttctacctggttcactctactgcctccttaatctacacatattgccaaagtctgcttttacttatgtgtatgtcattgttagatagctggaaatgcagatgggaagcttcaattatgaaggtagtttttcttctgtgcttttaatctgcccttaaattttttaaaaaactacttcttttatttctagggaggaagggactctgattttctcacctagagaggggtgctaggaggtgggattgggaccatgagaatatactactttataaatgtcttatgtttgtttttgccaggtacccagggttatcaccagcttgtgactttttatgttactttgtctgcttaggggtggttttgaatagtgtggatagtgttaatatgaattccaaatccatattacaaattctgaaagagagtttcacctcaacctcactcccaccccttccacacacacactgaagggcctgtctaaaacataagcttatttctctggtgagtgattacaactttcactgaaaatatattcataaagaagagtcctagcctcgtttgagattctcacttccaacaccctgtgttttaaagccccaaaaccttggatcttatccctattaaaatcaaatatattcaattgctgagattgacaacctcctgtccagcattgctccacactcctcagattagggctgctgcagcctcagctcacacaccctgcctggtatgagggggaaccacagttccctcttcatattggaacccctggaaatttgcctttttctcatgaaagcttagctgtggacgtagaaggatgcttgttttacctcgcatttctaagtgttttaataagtggaagaatttgccagaaacaaaagacgcaggagagacattgtccttgcctctcgcctccttctgttccatactacttagaaatgaggtttcaggattgtccatggagtcattttctaggggctaaagcagtagacctttttccacccctctctaaggtacagctatctattctaagagttcgcatgagtacttatagctactgcttttctatacactttgttttctattttatttttgtttataacaggccaggaacctaccttgaaaactgtattaaataaaataggagatgagatcattgtaataaatgaacttctaaataaattggaattggaaattcagtatcaagaacaaacca

SEQ ID NO: 1895 - DNA, 364 bp, Homo sapiens
ctgtcaggcctctgagcccaagctaagtcatcatatcccctgtgacctgcacgtatacatccagatggcctgaagtaactgaagaatctcaaaagaagtgaaaatggcctgttcctgccttaactgatgacattaccttgtgaaattccttctcctggctcatcctggctcaaaagctcccccactgagcacctggtgacccccacccctgcctgccagagaacaaccccctttgactgtaattttcctttacctacccaaatcttataaaacgaccccacccctatctcccttagctgactgtcttttcggactcagcccgcctgcactcaggtgaaataaacagccttgttgctcacacaaa

SEQ ID NO: 1896 - DNA, 394 bp, Homo sapiens
gcgattctcctcccacaacctcccgagtagctgggattacaggcacccgccaccacgcctggctaattttgtatttttattagagacggggtttctccatgttggtcaggctagtctcgaactcctgacctcaggtgatccgcccacattggcatcccaaagtgctgggattacaggcgtgataaattgaccatcttataccaggaagtcaaatgagaagacatcagtaaaaatattctggccaactcatgttttatttatcatatcttcatcattaattgcttctcataatgccacagtttgtcatggtatttgtggcagcaggcaaagtccttgttcagactttgattaaattgctgtggcatttttctattaaaaagatctcctgtttcaa

SEQ ID NO: 1897 - DNA, 1487 bp, Homo sapiens
ggtttccttcaaacaactgcggatgagttttgcttttactatgcaagaaaagatggtgggttgtgctttccagattttccaagaaaacaagtcagaggaccagcatctaactacttggaccagatggaagaatatgacaaagtggaagagatcagcaggttcataaagataaatgctctttaatctttttaaaaaaacccaactgacaaatcttgtggttttgacagtgaatcaactgtctgtgcttatgttcagcagctatatcctccagatgctttagttttttctctgtggtagtttgtttctctaaaattctagcttaaatgcttttaatacttagactactaatcgtatattatgagcttggcttctctatgactcatgtcaattttatgggtatagttttaagcctgaattttatgattgttgttagtctatggcactgtgaaaatgttcagcacaattaccattagcaaatcaggtttttctaaatagatcttagaactttctctctacatgccttccataaggtttatttattgtgagtaaaactaattttaattatagtcgctgaaatatgagaaaatgagattatgacatttgaaaatatatacatgttttgattctcttattttactttctgaaagaaggctgttttgttttttgccattgaaagaatttaaaagaaccacttaaaagaattatattgtgacccttgggttagcaagcacttcatggttctcaaaaccatgattcctagaggaaatagagtttgaaaaggatgccaagtgcatcccttatctccttcatctcaagaaaagcttaccggttttctttaatttgtttagaaagcacaaacacaactgcttctgtattcaggaggttgtgagtgggctgcggcagcccgttggtgccctgcatagtggggatggctcgcaacgtctcttcattctggaaaaagaaggttatgtgaagatacttacccctgaaggagaaattttcaaggagccttatttggacattcacaaacttgttcaaagtggaataaaggttggctttttaaattttatttatttttgtgctggctacgttaattttattttagtgttaccttcctcactgaaggtatttctttgtaataaaagaaagaatcttgcaggagaaaataagggggcaacataagaaacaataattatggcacctgaattaggacagtgacattaaatttctgttatttgttgactattgtgcgctgcaatcgaattgatatttgacatgctttccccatgtaattgacacatttaaaggaatctttggctttataaagtattgtttaaatattgtttaatgggcataacacaggactgtacatcagcatttgctagtagaaacaaagaggtcttttggttattttggcaattgcaaatcattctttcaccatctctgtttttgagtctgtctcataaaaaatactacttatactacaa

SEQ ID NO: 1898 - DNA, 1487 bp, Homo sapiens; identical to SEQ ID NO: 1897

SEQ ID NO: 1899 - DNA, 1487 bp, Homo sapiens; identical to SEQ ID NO: 1897

SEQ ID NO: 1900 - DNA, 425 bp, Homo sapiens
ggtgcaggtaggcctgcccctgtctgtccaggcccccactcttggtcaggcccaggtcagcagaacaccgaggaccttgtggacagcccttcgttatgtttgggctgctctgtctactgtcaacaccatcaacttgaacttctgcaccatgctgagcttgaactctcagaggggcaggagcctggcagctaaaagccctgctgttccactccctcacagtgggacttctaagcctttgtgtccccatccggaatgtggagattgtggcttctacatcctggtggtccctacctcgtaggtgtttgcagaggtcctggcacttgtgaaggccttccttacagagtggcctccattctgagagcatggcttcaaggactcgggagagaattacggacagaccatgtgcggagctctcctcctcctcc

SEQ ID NO: 1901 - DNA, 542 bp, Homo sapiens
ctggttttgagaatcagtgaaggctgcaaaagtgtaatttggaaattatttcagttcggaggtgagccctgtcttatctttggacagtagttagtaactggcgcaccaggagttgtggagtggctgggcctgggctttcatcttggcccagcctcttgttagcagcccttcaagtgactggagctttacggagaacatgctgcaacctggctttgctcagcctgccgccagtgtgggcaaacctcttcgctggcagggcccggggcacggcgctaggtctcaccacccctctccccagccaacggctttctcccagcctcccaagacagcctctcacccggccaggcaggcaccccggcgaatctgatccctggcctagctcagctcacaacacgggtgtctccgagccccacagcagccatttccccgtgtttaccctcctcggtcctctgaccacccccttcaccctcagctgatgaccacctcccgcttcgcagtggaactaatagcgtctccagctctccagccccgatcctcccttc

SEQ ID NO: 1902 - DNA, 4962 bp, Homo sapiens
aaaaaattagccgggcatggtggtgggcacctgtagtcccagatactcaggagactgaggcaggagaatggcgtgaacctgggaggtggagcttgcagtgagccgagatcgtgccactgcactccagcctgggcgacagagcgagactccgtctcaaaaaaaaaaaaaaaaaaaaaggaattcaattcagaatcctcttgtttcattaaactcagaaaacccatcatataataagatagaaaatggaaaatgggttttccataagcccacccaaatattcagtttttccttgaatttaaggtatacttgttttccatcactaaaagtttttctgaacaatattattctaaaaatactggccaggcgcggtagctcacgcctgtaatcccagcactttgggaggctgaggtaagtggatcacgaggtcaggagtttgagaccagcctggccaatatggtgtaaccccatctctactaaaaatacaaaaattagccgggtacaaaaattagctgggtgtggtggcacacgcctgtagtcccagctacttggaaggctgaggcagaagaatcacttgaacccgagaggcagaagttgcactgagccaagatcgtgccactacactccagcctgggcaacagagcaagactccgtctcaaaaaaaaaaaaaaaaaaatactgttagtttccctattctattttttaaaatatctgtgattttaaaatattttttactagcccctacaaataaaaagttacatatcttacagcactgttatactgaatgataggtcactttggggtacagatctgtaatcaccaccatcctccagaatgtggaattttaatttgagaggtatgtttttggccaatgaaccaaagcaattccttaatttggtgaaagttctattacataatctttaatagtgatttagtacctataagacttttatcaagtgtatatctaatgttataaaacaatgtcatagaacagtaccatctctctcagctaatttttgcttgtacaggttgcaaactgggagaagcttctgatttcattgtccgtcaagggacactaatccaggtgccatcatctgcaggggaagttggttgttataaaatctgttcatgtggacaaagtggactcttagaaaactgtatggaaatgcactgtatagacctccagaagtcttgtattgttggaggaaaaagaaaaagtgagtcttaagctctgattttgtttttaatatgagattagttatttttactttgtaggaagaatactggatagattctgaccacagagtaaggtctgcatatcagatactccagggcagtatttttcaaactatacagagcactaggacttctaaggaagtctttagaagtcccctcaataaggggctaatggctaataataattaatatttattgaattctaatcatgtgctaaacacaaagctaagtcttgccttacattatctcattaaatcctccaagttacactttgatataggtaataataatacctgtattacccttactgcatagatgaggaagctgatgcttaaagagttcacccagctagtaaatgaccaaagctggattctgctccaggtctagttgactccaaatcccttacgcttcacaggccaaggacacaggtaatcttcccccgaccctttcttcaggcataccccaccccaccctcacttcaccagaagtgaaactcagattttgacatcatggaaagcaagtgggtgtaggaactacactgttaggagtttggaaaaaaagtacattaaaaagtactttgaccaccttccctaaaaatcttagactccactgcttccttaaccatcttttgcttgtagccccaacaactattcatgtcaatatatgatttcaaacaattgtgaaaaaacaccactttttaggatctgttccctccccacaagctcactctgctaccccatttctactcccatcccctaccccttcaaccatagtagttcagcttttatatgctttttggtttactcttctgtgtgagatttgattagaaagaagagtgctcttggctaaaattagctctcaaatttctgccttagagcaagtcaggtatttatctctcaatccatattctgcttgactaaactatgaaggtaggtactttgtatcacagaaaatatcaggacagattcattccttctgtaacatttcactgactaaatgcctattctgtacaaaagagcatactagtgccttatggagctgaaaccgggacgggggatgagatcatgctttatgtgttaagataagagaatttgagccaaaaaaagttgcagaccaagtgctcttctgggagctgggcattcctgccagggcatcagaagagtctttgatccaaagatggcatcaggtctggccctggacagatgagctttcaaagcagaaggggcagccagaaacattcttagaggatagggagcaccctggtaagaccagcacttcaggggcttggaggaatacgataggaggcaaatatgaaaatataaatcccacagattttactctagttggtatattcagaagtcatctttcaagaatttctggctgggcacagtggctcatgcttgttatcccagaactttggtaggccgaggcaggcagatggcatgagcctaggcattcaagaccagcctggacaacatggtgaaaccctgtctctacaaaaaatacaaaaaatatccagatgtggtggtgtacacctatagtcccagttacttgggaagctgaggtgggaggatcacctgagcccgggaagcggaggttgcagtgagctgggatcacgccagtgcactccagcctgggcgatagaatgagacccttctcaaaaaaaaaaaaaggaatttccattttaaaacttgttgaactattaaaattgtaatacgtgctctatttctcaatgcatgatatagatcaacattttctttctgtttctgtcaggtcatggaacatcctttagtattgactgcaatgtctgttcttgttttgctggcaatttggtgtgctctacccgcctttgcctcagtgagcacagttcagaagatgaccgtcgtaccttcacaggtgactgtgatcgcccagagtctgtcctcaggggccatcatttctttgcacacatttttcccttcaaggcagcttctccagtcttaactgcaaatgtacacaataaaatcaatacagaatctaagggcaagatgcttttcctccctggatctcagtttcttcctctatgaattgaaggtattatactaaatggtgtcttagggcccttagcactaatattctggaatttcatgagtcaaaaagaacagagccagtgattggaatgggtttaattaaattgaacttttctacctggtagaataccccatttacccctactgctatgatctaaaatgtccatgcatgttctcagtttgtttctcagcaccttcttcctcagcctaccttagcttacttcttcatctagactcccacaaacaataatatcccagaatattactttcttgactttcctatgctttgctgctcttattattcttacaccaacataaataagtgaaaaggctagtgagatgggatgctttcctctcgtgaagctattattgccaatagcaacagcacagtctgctggtatatcttggtatctgctttttcctagatctaaaatacctttggttgtgggtaaaaagttactaggtagctgcccttgcccccatttcacactgctgcagtggcaacttgattcttctttccccagaattagtattacatgtggagaggggtgggggccgggtggaggagaagtggaggagaggagagtaaggatttaccaaccttgtacctccagcccattggaaataaaaaggggatcagaaataagaagtgaatggcacactggtaaggaagtagaggtaggacgaacactaccccagccttcactgctttattatcatcatcctttattattatcctttgccctgctcaagcaaggactattcattctgcttagagaaaccatagagggatatggggataaagaataagcaaaggatttacaaggaagactttttaaaatttttttgttaatgtctaaatgtttttagaagttgagctttacaactagcaagacccctgtttcctatagtgtgtggcccctggtgtcctgggataaattaagtcaatgactgttgatctagcagactaaggaaattttactgacccaaaactgtgccacatttcttgggacccagtgtcccactccaaatgtgactcagagaaagaagttcataacaatttgtaagtctcaaaattacagtaattttctaagttactgtcttagacatgagagtggaaggaacctacaaccttcactctttctttttgttttttctgagaaggagctttgcttttgttgcccaggctggagtgcaatggcgtgatctcggctcaccacaaactccgcctcctgggatcaagcaattctcctgcctcagcctcccaagtagctaggaacgacaggcatgcgccaccatgccattctaattttgtatttttagtagagatggggtttctccatgttggtcaggctggtctcgaactcccgacctcaggtgatccgcccacctcagcctctcaaagtgctgggattacaggcgtgagccactgtgcccagcccactctttcttatgcttggtattagcctttaacattcaagaaatccccacaccagacttcaaacatctaaattctagattttatatgccaaatcaggagaaacagtctttactttccctacctatagccttgttaataggggtctctacctgggatcaaagtctagggggccctcaactagttggcaataaaaaggacaaaggaaagccatcttgcaga

SEQ ID NO: 1903 - DNA, 4962 bp, Homo sapiens; identical to SEQ ID NO: 1902

SEQ ID NO: 1904 - DNA, 151 bp, Homo sapiens
tggcatgcgcctgtagtcccagctactccggaggctgaggcaggagaatggcgtgaacctgggaggcagagcttgcagtgagccaagattgcgccactgcactccagcctgggcgacacagcgagactccatctcaaaaaaaaaaaaaaaa

SEQ ID NO: 1905 - DNA, 151 bp, Homo sapiens; identical to SEQ ID NO: 1904

SEQ ID NO: 1906 - DNA, 912 bp, Homo sapiens
  SITE (3): n equals a,t,g, or c
  SITE (13): n equals a,t,g, or c
  SITE (65): n equals a,t,g, or c
  SITE (137): n equals a,t,g, or c
  SITE (443): n equals a,t,g, or c
  SITE (697): n equals a,t,g, or c
ccnacgaccctgnagcccttcaccccggagatgaaagacttgatcaatggctacatccggacggntggaccaagccctgcgtgaccacaactggacggggctgcccagggagtatgtgcccagatgataggcctggncccacgccgccgcccccgctgagtgacgcaatcgcaccacggggctgcgctccccactctgatgctcaggcccgtggcctcactgggacgaacggtgggtggggggctcaccctggtgctgcctcccgcacaaggagacctggacacaacagacacacatcacaaggcgaacacaaatggacacacatacctggccacgaacccacacctcctcagacactcagacaccactccaggctcatagccccgtcttgatgcagagaagccacccacgtggggtgtgccaggcacccccagatacaaatngcagccacgcacagacgtaacacacaggtgccaggccgtgtgctcctggaggctggctggctgtctctctcacacagatacacgtgcgctccctgggatccgggaggccctgggcttcctgtgtgtagccctggcatagacttgctcgtcagggtgttcgactctgggatgctgggccgggcagacatttatgctctgagcagcaaggaccattgggatggaggtgggcacaaagactgctgcttccagggtgntgcggccctggccgtgtgtctgacatcccataaatgtgtgtgtggtgtgactacgggcaccacaaactccgcagccttgcctctcttttctctgtggctgggctggctgcaccatgggcagggttgaggactgccccccaccccgcccaagccaatgcagacactgacctcaagaccagccacaccaagtctgtgcactgcccaccacccccttc

SEQ ID NO: 1907 - DNA, 2776 bp, Homo sapiens
  SITE (2030): n equals a,t,g, or c
  SITE (2087): n equals a,t,g, or c
  SITE (2267): n equals a,t,g, or c
  SITE (2273): n equals a,t,g, or c
ggagattgtaagggctgtatctccgcgattactggtactggtgctccacccataggggccctgttctctatggggtcccacactgcggtcatgagagctagttctcatgagagcagcacccctaggtctggtcctgccagcctgggatgggggtcaatgtatgctacacatcttgggctcacaagtgaggctgtggaggccaggaggttcaagtatggagggtaggagtgcaacccaggagcaacgctcaaggtggccgagatgcagggaggattgtggcgatccggttgcacactggcctctgtggaggtcagggaggtgggaaggtgggtgggcctgaactcaggcagcccttcagtggcttcttcaggcctaggataaccctggccaggccccatggtcctgctctgggtcagctgtcagggagacctcccttcagcctgagccaagctgcattgggaggagaaggcagggtgagggatctgggagagcaggatgttgagatatcctgaccctctgcttcctagcctgatgatggggaacacagagccacccgctatgagcacaggccgggggtggaaggcccagtagagctgcccttccccagatggaagcttcctccaaccttcagtttggccagtgggtgggtttgggcatctgtgcccctggtggcctccaaatccttcctgggattcccccaaacccacactgatgcgaagctgttcttgaccctcccatagcatcaactcagttcagctcaaagctagaaacaccaaggtctttgaaaatgtttattggctcaggatagcttcagcatccaatctgcgaaggcccctgatggagctatttcttcctagtatcaggagcaattgagacccctcaggagtttccacactgctgtggacgggatagccagggcagacctgcatcccagagcaagcctagatccttgaaagcaatgtcaggcgtggcagtggggaagccatggaggctgggaagggcaaagtgtggagagaggagtgaccgggactggagccagggtctggggagagcaacagcaccaggcttttcctggtagttggattggtacattcactgctgccaggtacccagagatgtcatctctctccaggtagagcatcaccagctcctgtggccttgtagatgactctgtacctcagtgaagagtgcagacaagtagagtgatggggtcagtgtccatccagtttacgctgagtcagtccatacagcaagacacctggcacttggcaggtactcctggatgttgatgagcaaggaagagcaacggccctgtcagctggcagtggtcctcacagccttcatcccaggtctgcctacgtgggagatctcatcagaaacaggaacggggatctgtctgtgcttgcaggaaagtccatttgtttttctccaagttaggtctcatctacagctcttagcttctcagtaaagaggatactctcccaaccagccaaggaataaaagctgatctgtatgtagggcagaagtgtggcaaatgcatcaggaaccggttagaacagaacagagaaaccctgactgtctacagattccaactttaatagcaagcctgtggagttacacaaacctgtgttaaaacatgtaatttttatggatttcatctcccgttgtggatcaatttggaaaaaccaaaatatgtaattttaaaaaactaaaacacatcctggtagtcccagtgatgtgtaaatgagagagaagaatagacaggcttccaaaccctgggaagaaagctgcttaattatgtgaacatcttataatgaagtctcttgcagctaaaattagattttgagtgcatgaatctgtgataatgtttgcatatcagaatgcattctccccttaaaagtagcagtagccacttggttcttagggggccccaagaggagaggagaagtgctgaggttgatgttacgactgcaagaattcttgggacacaggtttgttttctgctgacttgctcggaaacccattggagngtatctgaaatgtgatgactccaaaggggttcatttcactatagggagaaattgatntcgtctgacttcctatttatcaccactcaatattgggtgagttggtctgaacaaggtggggataaagtagagtggaaataatgtagagtcgtcagactgaaaggccaggttgtagtcccagctcttatctgccatcttggacaaagcttttcccatctccagtctcagtttcccatccantaaaantgggggaagtggtaggtcttgctgattgcatccacattcattcctccatttcctttcccagcaaccccccatttctgtttgggaattcatatgatctgccagagcctctccaggggtggaatacatgtcctggactaagccaatgacaccttccatctttccagctatggtgactgggttaggtatgatcttgtgagttaagacaatgaagccagagggaatttcaagacttatgggaatgctgggtagaagctgttttaattcccctgttgaatgtgaaaaaggtagtagtattcctgggtctttatgatgaccaccttgggccttgggatcatgaccaggaatcacgtgaagctgacaccactgaagggagagttgagaggcagaaagagatcaagtccttggtgaaattgtttaagtacaggatcaagccttgcttgagattggccttacctctggactttttttgttatatgagctaataaattctgtttattgtttaa

SEQ ID NO: 1908 - DNA, 7803 bp, Homo sapiens
gctgtgattgggttattatacccctgcattgacagacatctaggagaaccacataaatttaaaagagagtggtccagtgtaatgcggtgtgtagcagtctttgttggtataaatcatgccagtgctgtatcctttactctgtaatgaaatgcataataacaaagtggcttccaacaaaccaaaggttaaacagccccttacaacttcactgttgtcaaattatgatatgcccacttagtcagaagaagaatgtcaaccatattgttgaaacatcggtgtagcagctgtgcaattataaagtggggtatagcctttcatttcattgtgtatttttcactatcacttagaaactttgcaaatttgaaaactttacttgtttttcttaaatttggttacttaattacttttgtgtagttaatccaaaaatggaacaggtacattttcagaggagttttttcctctctttctttgttaagaattgctaataagtacatgtggtagcttcaggtgctattttgtcttttgtttttcttaacttaaagaagctttttttttttaaaggtagatgcattggttttaatcaataccgacaaaccacataaacggcataagtagaaataccaacttagaccttggccaaaaaataagtttctaccctagtacatattttcaaagttttattgtttgaagattcagacattttatttagtggttaatgagtatttttacagtgtctcaggtagcccctattccccttcccctttctaccttctctgcccagaaaaaaatgtttgccctcataaggttttcctcctatcatcctctttatttcctctcttgtacttcctcctcatttgctctgactttccttggtagaagaggaactaggaaatgctattcctgtctttttctaggagatgtggtttagacaatgaaggtggcaggagccttgggtacttggaaaagcaagaagtgtgactcaggctgccaaaagtttgctcttataactctgcactggacttggggcaggcagagttagctagctggagagagagggtgggtcatgtgtcaagtagacccctgtgtctttcccaaaaagtattgaggtgttttggataagcttggggacagaaaccatagaaaagagcagggtcctagattctgaaaacacatctgccttcctctgcacagttgtgctggctgttgcaggtctgtgaatttggaagtccctcagtggctattattagttttaatttctgtttgtattgaggacatttccacatgtttattttggtgaactttttgagatttaagattttataaaaaatctagtggtcaggagggcttaaaaagttaaaatcatatactattatatctagaagagaacttagaaatcacctagttccacattttctttgtaaagataataaacagaagctaaagaggttaggtaatttactaagtcatttatactgcgacattgcagcagagctgagaacagccctgagacagcctgactaaagtctagaaacatctcattttcctacccaggaacctcaaaactgtgtcagttcctctctgtccggtggattagatctttctctcttagacacttccactttgatttttgtttttaagtagagaaatttaaatagccttttctgaaattctaaaaacttaataagttcaaattctttgctttgttcactctctttctcaatgaaatacttaaatatagcaatcttagatatcctgttgtccttcaagtaaagtccaacatgtttaccaaatttatagcatacacttctaatattaggttacttagactttacaaaatcatttggcactatttttttattttttgagacggagtcttgctctgtcacccaggctggaatgcagtggcacaatcttggctcactgcaagcttcgcctcccgggttcacgccattctcctgcctcagcctcctgagtagctgggactacaggcacctgccaccacacccggtgaatttttctgtatttttagtagagatggggtttcaccatgttagccaggatggtctcaatctcctgaccttgtgattcgcccacctcggtctctcaaagtgctgggattacaggcatgagccaccgcacctggcccatatggcactattttaagattgatatatctatttacgctggaagcctccttacttcgctgtgacttttaattaagtttagttagcaaacatgaaactcatttaataccaaattccactctttacatgagtgtttatttcatagggaaatcagagctctaaaccttttctttgaactttaagtataatgacagcataacaataagtaaaagcttttccagaagcatacccatatgaactgtaggtttctttttaaatcaagccttaacaaggaaggaccttgagggagttgcccacaatagtcctgagattctgagaaataagcaagctgggtgtttaggatacttgcttggtaggggtggggaaatggtgaaaaagagtgttaaaggaagtgggaaatggcttcgttgcaatttcttttttggatttctctatacgtgcagcatggtcagtttggtgatacgtgttctcccaaacctcccccgccttccccagtagctggttatagagccaagatgtggcctttgggacatagataatgcccttttaatgacacttgaaattaattcctttagtgtaatcctctagcaaagagatgagaaaactgaatttgtaaagcttaattttacccagagattttggtgtagaaaagggccatacatttgtgaatagatgcttaagtaggtgatgaaaataaaatatcatttgagcaaactgtcctataccagaaagtctcaggcaccaaaatagcttggcaggttgtaagataatgttcacttcaaggctttatcctcaacaaattaaaactagaacagttgacataatagaaagggatactgtgtccttggtactcttgtttctgaactgcattattataaaatgtgtctgtcagtaaatcatagagagaatgtggtaccctgttaaatagctgtcaactcttctattttcaagttcctgtacgattctcaagtaattctaaacctgttggagaagtaatattggtttccttttttgcaaaagtgtgttcctttagtgatacttgtgttctgaggcttccagttacatttttagcaaagaaagcatttcttaaataatgggtaaagccttataattgggaatgtatgtagactgttctttttgttttgttttgttttttgttttggaggggttacagttggtaggatctattgattaatgtcttttgtgtatctggtattgggtaaatactggagacagttttaatcccacctagcttcatacattgtactaagagactgaatgtacttgagtagaagcaattaattcccttctcaacagaggcatctcttatttagaaaaatgaacagatgatattatttggttacaacttttaagatgacttcttaacactgatctcagaaagtggatttcgataacaacatacagttgtctctcacactggctgcactatccattggactgtggtggacttttgatagatctagaagtggttttggccttggagtaggaattgccttcttggcaactgtggtcactcaactgctagtatataatggtgtttaccagtaagtattaatccttcaatttttggtgcttgtttgctagataaataaatgataaccgctttcagaattgagattatgaaatgaggttagccagtttaatctacagagtagtttattttcattgtaattatcttaagtgtcattgcagttcctctgtgggtattaaagacatgtctgttattctagatatacatctccagatttcctctatgttcgttcttggttaccatgtatattttttgctggaggcataacaatgggaaacattggtcgacaactggcaatggtaagctgatgctcacttttctgaataagatgtggaacaaatgacaagttttctctaaaaggcagtcctttaagggaaagcaatttgtgaagacaacattctttgattgcttttttgcacttccattgaaataaatcatttggaagaatttaatcacaggtgttttaaaagttgaggagccactggagagaaaaactcaaaatgtgttatggatagggcaatatgatttattgaccatatgggggatattagtggtttttaaaaaactaatctacaggtctcccactatatcagaaaaggacagttttaaaagttaaaaaggtcactactaataagtgtgttgctacaataggtatacattaggaccacctctaacaaatcaagatgtttgatcattttagtgatgaaggaaaaggaaaaggctagggagtgacattcagaggccacagcagttttatgaatcagtgctgtcacttttacctttttagccaggttaggagaattgagtgacttactttgctgtatttttggtaaaatagccaaccaattatcttaccctgttggtttcctttattttgaattgtgggtgtacatttttatagctgtactttaaaaatgttgttttgactggaagcttttgttaatgtaacagattttttcctttatatcatatagcaatttgaaaatacagtgatctgagttcaccacaacagccctatccttaagttcatgaactattctttgctaatttgccttattgaatactcaaagaaacctgctttgcttcctttcgacattaaaagattgatctaaattctaaatcatatactgccactacttgcttgtaatgcacaaatctcatctttctcttgcttttggctgtggctttttcactcccagaatgtgaattatttttttccctgtcacatttgtcatttaatcatagaaattatgtaactcttggattatttgaggaataaatgggcacatagtaataaaatgttcatttttagagcttttcagtttatttggaagttgctattcaaaagaagtcttaatctgttaaccttttaaccttttaatttttgcagtacgaatgtaaagttatcgcagaaaaatctcatcaggaatgaagaaggcaaaaaatatcttttgtacagaaaagcaagatgaaaaggatgtgaaatggtagatataccaacaaaacttcagactgtaaaattgccaggatgcagttttccccttgattggcgtgtgtgtatatatggataaatatatatatacacacacacatattactgcaatctgtgattgcttcatctgtaaatcagttgtaaacctttacatatttgacttaaataactgtaagatatatatgtactacattaaaaagtgttgattaatagatgaaatttttaaattaattttttaaaacatgccatacattgtatcacaatgttaatgtgccaagatattgttcctgtcatgcagagtataagaatgctttgaacaatttgtagacttagtgaaataaaataagaggaaagccaaaaacaaacaaacaaaaagcatatggggagctggtattttctctttagcttactgttgtgcctttttatttttctaatcacagcagtatgagttatgagtgccctaatttgtggttagtttctaatttaatgttgtttcatagagtttggagtgttttgatacagggtgaaaatgaacttctggtttcaaacctgcgttactggagacagcccaaagagtaattttctgttttgacaggttttactggaagtatatgtgatgagcagaagaggttatcagcattaaattgttttggttctaaatttggaacagtatatataattaaaagtaaggaacattagaggatttaattagaataaatacatgttttggaaatacagtgacctcttgcagtgtcacaaaagtgcaaagtgatattagctgtcatctgcaatacagaatctcattgcttttgcacatggagcatataggaaactccaaacagatcacaatgaggtttctaaatctgttgggttctgtcttctattgggttctgtgaagcaaaccactgtagctttagctgggttcagtcatatgactcgttggtggaatgcctaggtttttcatcttacatgcagtcttgggggtggatgaatacataatttctcatgtattcgtgtatccattagtgaatagttcaagtctgtttaagagtgtattgagatggcattctctgcatgttaaagatcttaatggcaaccagcacctcttaagtatggtttaaacatattcttagctaattttttccattagtttttgaaattggtggcagttgtctgatccacaagggcaagatcttctgagtactctggggtgtgagtatgtgtgcacacgtgtgtgttggagtgagtgagagaatgtgtctgtgcatgtggccatgctttcctagaatgtcaagtagatatttttacactttgagttttaaagcaattactatcagactgagatcttgtatgccaaactttaatctgcttttatgttttcaggctgaaggtgtgaaaatcctaagaggatttcatattgaatatgtgtacacaatcttaactatcgtggtggaaaacatactactataatttattattatatcttccagataatgttattcatttagaacaaataaggtatattttttagaatcaactttgtaagcactataaaatctttaataagttataaggtctatgatgtgtttactttaaaaattgctgttaaaagcaacacgtattaaatatgtaattatcatctgggttaagagtctgtttttcttctttgtggtaagtcttagaatatggtactgtggattaatctaatgaaattaacatatgtggttgaagttaccaagaaacgatgaaaagaaactaaatatagttgacccttgaacaacaggagttaggggcaccactccccaacatagttgaaaatccatgtataacttttgactcctccaaaacttaactactaatagcctactcttgatgggaagccttaccaataagaaacagttgatgaacacatattgtgtatggtatatgtattatatactgttttcttacaatagtgtaagctaaggaaaagaaaatgtgtttactcttcattcagtggaagtggaccatcctaaaagtcttcactcatgctatcttcatgctgagtagtaggctgaggaggaggaggaggagggggttggtcttgctgttgcgggggtggaagaagatgtgcattattagtgggcccacacagctgaaaaccatgctgtcaagggtcaactgtgtgtggtatcggtgagactgaatgattatcgttggtgttcttaaattattttcaggtcctctagaaaataagataattatagcaaaaaataaaattgttttgaaattttgataaatatataaatgtatagaacctatttttttcaatgaaagaaaatgggaaacattttttaacattgctagattggcagtgctttcttttattatttcaagttatggaaatttgcacagttgaaaactggggataaattctacaaaagtgcaagaaaacaattcaaattagccagagccctgctaaaacttttaatgtaaaatttatttatttgcactgagctgttttacttctttaaggccattgggacctctcaatgatgcatatgtttcatacatcttgtattttccaggtagaagtcagacttggttaataccaataaatacttctgtaatcctat

SEQ ID NO: 1909 - DNA, 7803 bp, Homo sapiens
gctgtgattgggttattatacccctgcattgacagacatctaggagaaccacataaatttaaaagagagtggtccagtgtaatgcggtgtgtagcagtctttgttggtataaatcatgccagtgctgtatcctttactctgtaatgaaatgcataataacaaagtggcttccaacaaaccaaaggttaaacagccccttacaacttcactgttgtcaaattatgatatgcccacttagtcagaagaagaatgtcaaccatattgttgaaacatcggtgtagcagctgtgcaattataaagtggggtatagcctttcatttcattgtgtatttttcactatcacttagaaactttgcaaatttgaaaactttacttgtttttcttaaatttggttacttaattacttttgtgtagttaatccaaaaatggaacaggtacattttcagaggagttttttcctctctttctttgttaagaattgctaataagtacatgtggtagcttcaggtgctattttgtcttttgtttttcttaacttaaagaagctttttttttttaaaggtagatgcattggttttaatcaataccgacaaaccacataaacggcataagtagaaataccaacttagaccttggccaaaaaataagtttctaccctagtacatattttcaaagttttattgtttgaagattcagacattttatttagtggttaatgagtatttttacagtgtctcaggtagcccctattccccttcccctttctaccttctctgcccagaaaaaaatgtttgccctcataaggttttcctcctatcatcctctttatttcctctcttgtacttcctcctcatttgctctgactttccttggtagaagaggaactaggaaatgctattcctgtctttttctaggagatgtggtttagacaatgaaggtggcaggagccttgggtacttggaaaagcaagaagtgtgactcaggctgccaaaagtttgctcttataactctgcactggacttggggcaggcagagttagctagctggagagagagggtgggtcatgtgtcaagtagacccctgtgtctttcccaaaaagtattgaggtgttttggataagcttggggacagaaaccatagaaaagagcagggtcctagattctgaaaacacatctgccttcctctgcacagttgtgctggctgttgcaggtctgtgaatttggaagtccctcagtggctattattagttttaatttctgtttgtattgaggacatttccacatgtttattttggtgaactttttgagatttaagattttataaaaaatctagtggtcaggagggcttaaaaagttaaaatcatatactattatatctagaagagaacttagaaatcacctagttccacattttctttgtaaagataataaacagaagctaaagaggttaggtaatttactaagtcatttatactgcgacattgcagcagagctgagaacagccctgagacagcctgactaaagtctagaaacatctcattttcctacccaggaacctcaaaactgtgtcagttcctctctgtccggtggattagatctttctctcttagacacttccactttgatttttgtttttaagtagagaaatttaaatagccttttctgaaattctaaaaacttaataagttcaaattctttgctttgttcactctctttctcaatgaaatacttaaatatagcaatcttagatatcctgttgtccttcaagtaaagtccaacatgtttaccaaatttatagcatacacttctaatattaggttacttagactttacaaaatcatttggcactatttttttattttttgagacggagtcttgctctgtcacccaggctggaatgcagtggcacaatcttggctcactgcaagcttcgcctcccgggttcacgccattctcctgcctcagcctcctgagtagctgggactacaggcacctgccaccacacccggtgaatttttctgtatttttagtagagatggggtttcaccatgttagccaggatggtctcaatctcctgaccttgtgattcgcccacctcggtctctcaaagtgctgggattacaggcatgagccaccgcacctggcccatatggcactattttaagattgatatatctatttacgctggaagcctccttacttcgctgtgacttttaattaagtttagttagcaaacatgaaactcatttaataccaaattccactctttacatgagtgtttatttcatagggaaatcagagctctaaaccttttctttgaactttaagtataatgacagcataacaataagaaaagcttttccagaagcatacccatatgaactgtaggtttctttttaaatcaagccttaacaaggaaggaccttgagggagttgcccacaatagtcctgagattctgagaaataagcaagctgggtgtttaggatacttgcttggtaggggtggggaaatggtgaaaaagagtgttaaaggaagtgggaaatggcttcgttgcaatttcttttttggatttctctatacgtgcagcatggtcagtttggtgatacgtgttctcccaaacctcccccgccttccccagtagctggttatagagccaagatgtggcctttgggacatagataatgcccttttaatgacacttgaaattaattcctttagtgtaatcctctagcaaagagatgagaaaactgaatttgtaaagcttaattttacccagagattttggtgtagaaaagggccatacatttgtgaatagatgcttaagtaggtgatgaaaataaaatatcatttgagcaaactgtcctataccagaaagtctcaggcaccaaaatagcttggcaggttgtaagataatgttcacttcaaggctttatcctcaacaaattaaaactagaacagttgacataatagaaagggatactgtgtccttggtactcttgtttctgaactgcattattataaaatgtgtctgtcagtaaatcatagagagaatgtggtaccctgttaaatagctgtcaactcttctattttcaagttcctgtacgattctcaagtaattctaaacctgttggagaagtaatattggtttccttttttgcaaaagtgtgttcctttagtgatacttgtgttctgaggcttccagttacatttttagcaaagaaagcatttcttaaataatgggtaaagccttataattgggaatgtatgtagactgttctttttgttttgttttgttttttgttttggaggggttacagttggtaggatctattgattaatgtcttttgtgtatctggtattgggtaaatactggagacagttttaatcccacctagcttcatacattgtactaagagactgaatgtacttgagtagaagcaattaattcccttctcaacagaggcatctcttatttagaaaaatgaacagatgatattatttggttacaacttttaagatgacttcttaacactgatctcagaaagtggatttcgataacaacatacagttgtctctcacactggctgcactatccattggactgtggtggacttttgatagatctagaagtggttttggccttggagtaggaattgccttcttggcaactgtggtcactcaactgctagtatataatggtgtttaccagtaagtattaatccttcaatttttggtgcttgtttgctagataaataaatgataaccgctttcagaattgagattatgaaatgaggttagccagtttaatctacagagtagtttattttcattgtaattatcttaagtgtcattgcagttcctctgtgggtattaaagacatgtctgttattctagatatacatctccagatttcctctatgttcgttcttggttaccatgtatattttttgctggaggcataacaatgggaaacattggtcgacaactggcaatggtaagctgatgctcacttttctgaataagatgtggaacaaatgacaagttttctctaaaaggcagtcctttaagggaaagcaatttgtgaagacaacattctttgattgcttttttgcacttccattgaaataaatcatttggaagaatttaatcacaggtgttttaaaagttgaggagccactggagagaaaaactcaaaatgtgttatggatagggcaatatgatttattgaccatatgggggatattagtggtttttaaaaaactaatctacaggtctcccactatatcagaaaaggacagttttaaaagttaaaaaggtcactactaataagtgtgttgctacaataggtatacattaggaccacctctaacaaatcaagatgtttgatcattttagtgatgaaggaaaaggaaaaggctagggagtgacattcagaggccacagcagttttatgaatcagtgctgtcacttttacctttttagccaggttaggagaattgagtgacttactttgctgtatttttggtaaaatagccaaccaattatcttaccctgttggtttcctttattttgaattgtgggtgtacatttttatagctgtactttaaaaatgttgttttgactggaagcttttgttaatgtaacagattttttcctttatatcatatagcaatttgaaaatacagtgatctgagttcaccacaacagccctatccttaagttcatgaactattctttgctaatttgccttattgaatactcaaagaaacctgctttgcttcctttcgacattaaaagattgatctaaattctaaatcatatactgccactacttgcttgtaatgcagaaatctcatctttctcttgcttttggctgtggctttttcacttccagaatgtgaattatttttttccctgtcacatttgtcatttaatcatagtaattatgtaactcttggattatttgaggaataaatgggcacatagtaataaaatgttcatttttagagcttttcagtttatttggaagttgctattcaaaagaagtcttaatctgttaaccttttaaccttttaatttttgcagtacgaatgtaaagttatcgcagaaaaatctcatcaggaatgaagaaggcaaaaaatatcttttgtacagaaaagcaagatgaaaaggatgtgaaatggtagatataccaacaaaacttcagactgtaaaattgccaggatgcagttttccccttgattggcgtgtgtgtatatatggataaatatatatatacacacacacatattactgcaatctgtgattgcttcatctgtaaatcagttgtaaacctttacatatttgacttaaataactgtaagatatatatgtactacattaaaaagtgttgattaatagatgaaatttttaaattaattttttaaaacatgccatacattgtatcacaatgttaatgtgccaagatattgttcctgtcatgcagagtataagaatgctttgaacaatttgtagacttagtgaaataaaataagaggaaagccaaaaacaaacaaacaaaaagcatatggggagctggtattttctctttagcttactgttgtgcctttttatttttctaatcacagcagtatgagttatgagtgccctaatttgtggttagtttctaatttaatgttgtttcatagagtttggagtgttttgatacagggtgaaaatgaacttctggtttcaaacctgcgttactggagacagcccaaagagtaattttctgttttgacaggttttactggaagtatatgtgatgagcagaagaggttatcagcattaaattgttttggttctaaatttggaacagtatatataattaaaagtaaggaacattagaggatttaattagaataaatacatgttttggaaatacagtgacctcttgcagtgtcacaaaagtgcaaagtgatattagctgtcatctgcaatacagaatctcattgcttttgcacatggagcatataggaaactccaaacagatcacaatgaggtttctaaatctgttgggttctgtcttctattgggttctgtgaagcaaaccactgtagctttagctgggttcagtcatatgactcgttggtggaatgcctaggtttttcatcttacatgcagtcttgggggtggatgaatacataatttctcatgtattcgtgtatccattagtgaatagttcaagtctgtttaagagtgtattgagatggcattctctgcatgttaaagatcttaatggcaaccagcacctcttaagtatggtttaaacatattcttagctaattttttccattagtttttgaaattggtggcagttgtctgatccacaagggcaagatcttctgagtactctggggtgtgagtatgtgtgcacacgtgtgtgttggagtgagtgagagaatgtgtctgtgcatgtggccatgctttcctagaatgtcaagtagatatttttacactttgagttttaaagcaattactatcagactgagatcttgtatgccaaactttaatctgcttttatgttttcaggctgaaggtgtgaaaatcctaagaggatttcatattgaatatgtgtacacaatcttaactatcgtggtggaaaacatactactataatttattattatatcttccagataatgttattcatttagaacaaataaggtatattttttagaatcaactttgtaagcactataaaatctttaataagttataaggtctatgatgtgtttactttaaaaattgctgttaaaagcaacacgtattaaatatgtaattatcatctgggttaagagtctgtttttcttctttgtggtaagtcttagaatatggtactgtggattaatctaatgaaattaacatatgtggttgaagttaccaagaaacgatgaaaagaaactaaatatagttgacccttgaacaacaggagttaggggcaccactccccaacatagttgaaaatccatgtataacttttgactcctccaaaacttaactactaatagcctactcttgatgggaagccttaccaataagaaacagttgatgaacacatattgtgtatggtatatgtattatatactgttttcttacaatagtgtaagctaaggaaaagaaaatgtgtttactcttcattcagtggaagtggaccatcctaaaagtcttcactcatgctatcttcatgctgagtagtaggctgaggaggaggaggaggaggggttggtcttgctgttgcgggggtggaagaagatgtgcattattagtgggcccacacagctgaaaaccatgctgttcaagggtcaactgtgtgtggtatcggtgagactgaatgattatcgttggtgttcttaaattattttcaggtcctctagaaaataagataattatagcaaaaaataaaattgttttgaaattttgataaatatataaatgtatagaacctatttttttcaatgaaagaaaatgggaaacattttttaacattgctagattggcagtgctttcttttattatttcaagttatggaaatttgcacagttgaaaactggggataaattctacaaaagtgcaagaaaacaattcaaattagccagagccctgctaaaacttttaatgtaaaatttatttatttgcactgagctgttttaccttctttaaggccattgggacctctcaatgatgcatatgtttcatacatcttgtattttccaggtagaagtcagacttggttaataccaataaatacttctgtaatcctat

SEQ ID NO: 1910 - DNA, 3253 bp, Homo sapiens
taagaaacaagcttggaggtttcctgatcaaatgaagtagctattgatgcagtgttcatgactgcccaagtagaaaacctaatgagtagtcagaaatatggtggtactgaagaaaaagaggagtgatattgctgttacttttagtataagaatttagcagatttgcttcacatctgttaaaagtttccagcctgaagagcctttgacaccaaggattaagcagtcaaggagttcattctaattttaatatcagtttattaatcttacctgtttattcattttcagaaagatactcaaagcctgagctcaaaaatccttttgatgtgtcttggggtctttgtataatggatcctggtggatcatgttttcttatacataatgtaaatgatactgtcctactcagggtaagctttacattaaacttaatttcctctccttttcagattgttaaaggaaatgggctggcaggaagacagtgaaaatgatgaaacatgtgctcccttaactgaggatgaaatgagagaattccaagttattagtgaacaggtaagaaaacctgaatcatacaacttcacttttaaactgcccttatttagaacaatataattatatgtaagcatggagtgggggagatttaggaatttatcacgataggtcagaattgcttttaaaaaaaaaaagagggaggacaggcttttgctatggtgtccagctggcctctagaactcctgggtgccaggtgatcctccaaccttagcctctggagtaactgggactacaggcaggaaccactgcacctggttgaattgactttatagaagtctgcaatagtgacttatttaaactattgggtgtgcaatagttaggaattagtgtaagtgatgtctatggattagtcattttccagaccttttttgttttgttttttgtttttgtttttggcttttctgggggaggagcaagagtgataagaagtagagagtgttagtagcttcctaagtaacttcatcttgtatccttttcttgcacaagagtatttcatattctaaaacatcttgcttaatgtctccctagttacctttctgaaagagtattagggaatttttgttagagcatcaggaagttgagatgctttttttcaaatcgattatttgtttatttaaagatggggtctctctcattagtggagtgcagtggctggtcatagctcactgcatccccaaatttctgggctcaagcaatactcttgcctcagcttcctgagcagcttggggctactggcttgtgccactacactgggcttattttctgtctttaaatgtttctaatttgggccaactatcttttttcttctttgatgatgttttgactcaattcttatttattaccaaccttttagttatgatttctcattttcagaaatagagaactgtattttttctagtatcttcatctccggttaaacgagacaattttgtaactttatatacctcattctactttacaaactatgaacaaagcagattggggggtgtattaatttaggtcagaataataaaaataacagatacagcttaatggtttctgattatattctggtaagtccctgaaggtatttattacagttgtcacttgaggcaataaaaatgtgggaaagtttagtaccttaatcagtgtgacaattattactcacatctactttgtctggatccagaattttttcagaaatatcattacttgtgtagtttttgggttaggatacaattttattatattcatgcttatattattacagtaggtttgtaactcttgagggataatttatttattttgctgttaacattttagttacagaagaatggtctgagaaaaaatggtattttgaaaaatggcttgatctgtgacttcaagtttggaccgtggaagaacagcactttcaaacccacaactgagaatgatgacacagagacaagtagcagtgatacatcagatgacgacgatgtgtgaaggatttcctaacagctttagaaatcttagtgtgatacatctctcatacagtttggggtgaattgtaaaaatgaagaactataatttatgtagtgaaataccccattagaagaggattttttgggggacttcaatatgaagaaaaccaagaatgttttgttgggctgtgttgaacattatttctttgtaaatgaatgttgtaggaatgaggacttgggttggtccaacattgactttcttcatcactgcaacatttctctgactagcaatgtgacgatgtaacaaatgagattttctcatttaataataaaaaattgtgtaatgttttgcaaagcttctgtcttaaaatgtccaggtcttaagaaaaaaggcagcttacactgttttgcttgcagagtcatatctttttcgtacaatggaaatcctcaagtccactttgtgcggtctccctctccttcccccaaaaaacaacaacaacaaaacaaaaaccaaaaaggaaaatgtagcatgttggctaaaactggagcaaagtgcactaaaacaatttcctgaactcacctgttgtactattcaccttttaaaccataaattgctctttagccatttgtagtgcagtaaatgttacaggaaaagacttggcacattttcttccaaattttaagaggtgattttcaaaagctttattggggtatgttgtcagaccagggttttcagagttgatggaaaagagtcttgtgagaaaacttattttgataaattattacacacgcagaaaaactgatcacactgactggatctgtccacgacatggaaaataaactggattttcagaatattgttgttttctgtagtgttcaaggtattgtttctaaacataaacatactctaaacatgctttattcacttgttaaagtcatacttttaaaagtaataccttactaaagatggtgattacttttccgaggtcagaaaaggaaagctaagcgttttcattatcaaatacacaagcttattaaatgaatgactgttaactactttattttcatttgcacattaattttggaattgtttctgttttgctgctgacggaaatactattttggctctgtgtatatttgtattttgatttttctggtttgtttacccccatttgcttttagctcccccttatgtttaaatatattctaacttatgtaaagagcataatcttagagcaaaaatacttgaggttttatgtcagatctaa

SEQ ID NO: 1911 - DNA, 843 bp, Homo sapiens
ttttgtagaaatggagtctcactttgttgcccaggctggtcttaactcctgggctcaagtgatcctcccacctcggtctctcaaagtgctggaattacaggcatgagccaccatgctcggctagattattttgaaagctatttcaggaacagttaaaagctacagcctctggtggagaagtagaaatacttgccttctgttatattctctttcataatagttgataattttttccatctgcattattgcttagttacgattcagtttttaaaagtaaaacagataaaagtttggatccagcaaaagagcagttagattgttttgctagtctagatttaatagtctctgtattaggtgtcattgaatggtaaaagtgaatggaaatgctattccaaaaggaggccatccagattaaagagtaaagatagtgcattggaagaagtcgtggctaaaaggaatgaaagaagaaatgattaatgctgactgtgacatttttgttcagaagcaacaaggtgctgtgcaatacatactaatttgggagacagaaaaccaaaattctatttgtctttgccatcaagtaagcaagttattttacttatatgatcttgattgttcatgtgtaaaatgtggatatcatgttatgttttattcaaggtctcagatattctgtgagactctgaaaaaaggtctaaaagtctataagcagctattgtgtagcaggtgcaagttaaaagatgagtaggtgtaaataagaggggacttaaacgtttgtggaacaatgtaattaaatgataaaaactattaactctgtttttcaacataactccatcaagttcaagaccc

SEQ ID NO: 1912 - DNA, 1640 bp, Homo sapiens
caaaacttgaggaagagttagaatggtaataaaatattaaatagaccttatacttaaaataaggtttcactatataatttgtcacaattcaatctaatcagctaaagttaaatgtagttagaattagccacaggagaatgtaaagcatgctttgacgaagctatcggtaacacatattgaatgtctttgagactcttagattgtactatttgcttaatagattaatgaaatttatcagatacaacctgtatttccaaaaacaagctagaaggaacctgaggaatgtggtttacatttgagatccaccttactgtgttttctactttcagaaaagattctgtagttttggtttttggcatctttcttatactcagttttttctgccttaattcccatttaccagcagttaactcatgtttattgtgctttcatgcattgtgatatggaatgtgtttagtaatttactccttataaatatggtaaagtacagtggtatggttattctatgcattaagttaatgacattaataagcttggttatgaggggttggagccatacatgtaatttaagagaacagttaaaagtgtaacatagttttagcttggtgtctaaataatgggcagctgataaaacagcttggaccatattgttttaaagagagcctacaagcacagaaactagttatagatctaatgtggaattgctgaactcagaactaggccatggaagtctgaaaagcaaatatggctgtttcaaactcatttttttggcagcttttttatttttaacactttattgaggtataaattgacttgaacacacaggtaaaacatacagtttacagtgttttgacctacaactaagtgaacataatctattattcccccgaatttcttggttccttttaagtccctgtcactaattctccacccccctctcattttattttggtataaaatgtaattaatgagcaaaattcttaaggtaatgacttaaaatagcatttcaaaaactatttgcttgattttagtataaggattagaatatttctgcagataatttctattgaaattgttaatctaaaatcagcttgacttaatcagatttatattaacagaattcagtatgttaaaggatctggttcccccaaaatactttgtccttttttgctagtgtttatgtatactgttagaatgtggttatataaaccttttaaatttaggaatctgttaaataacttgttttaacaccccatccgtcatcatccctaatctgatactggagtctaaatacatgctccataatcatgcaaactaagttgaatctagatgatgagggtagactgggtgcggtagctcatacctgtaatcccaggactttgggaggccaaggtcagcagatcacctgaggtcaggagttagagaccagcctgggccaacgtggtgaaaccctgtctctacttaaaaaaaaaaaaatacaaaaattagccgggcgtgggggcatacacctgtaattccagctactcataggatattgaggcaggagaatcgcttgaacccaggagtcggaggttgcagtgagttgagatcgtgccattgtgctccagcctgggcaacagagtgagactacgtctcaaaat

SEQ ID NO: 1913 - DNA, 1316 bp, Homo sapiens
aaatcttaacaatcaatgaagggaaaactggtggaaacataggaggaaaaatactgggataattttcatcacaaagtattggcattaacattggttagaataggggagaaactgcatgacttgacaactggacattcctgtatgttgtatgaggccctgtcttaacagaaatagtgatgtcatcatcatcctctcttatttggtcttgaattgccaccaatcggataaaacctttgaattatttaactcaatatatgttaagtttctactatgtgctgtgtattggtactataaatatgaataagacataagatattacattcaaaaacatcagaatacatgttcttttaaagtataccccaaaacatttaccatgtgttctggggcgcatgttaggctggatcacaaatcaagtctcaagaatttcaaaagattgaaatcatatagagtatgaattaaaccagaaatcaagtacataaaggtaacaaaaaatttccaaaatgcattaatttaaggaacatacacctcatgacccatgagccaaaaaataaatcacggcaaaattgcaaaaatattttgaaatgaattttaaagaaaatacttagcatattaaatacttagcatattaaagctctaagtacatatgttagaaattttaccgaaaggttggctatcagtgtttccagaagccagggaaaaagtttatacaatttgatcgctgaggcagggaaacaaagtgagacctccgatcgccctgcctttctgaggtgagcactctggatcccatcgcaggagatcagagtcttgctgagttgaggagaggaagattggagttgatactgagatagcttgaattttcaggacaaagtatcaacaaggaggaaggtagacaaaaaaatccagaaatctatgtagagaccccattgtgtacattgcggaacactaagcctaacaattctcaaaattagcgtgagattgggaaatatctaatttccatccagccacagtggagagtcctgactgaaaaccaggcatttcgctaaagatcccaaaaaggttggggggtacatacgtagggctaaactatcctgactaaaaactacactacacttgcttctcacccccacaaaaagcttaaaaacaagcctcattagtataaagctgatctgtaaggtactaaactacctgcaggacaaaggccaaatttataatttccaagacctcaaaaaaaccccatgtaaaaaaaaaaagaattaccggaaatttatttggggaaaaaaaaaatgccctggggttgaaaggggaaggaagccaga

SEQ ID NO: 1914 - DNA, 1773 bp, Homo sapiens
aaatcttaacaatcaatgaagggaaaactggtggaaacataggaggaaaaatactgggataattttcatcacaaagtattggcattaacattggttagaataggggagaaactgcatgacttgacaactggacattcctgtatgttgtatgaggccctgtcttaacagaaatagtgatgtcatcatcatcctctcttatttggtcttgaattgccaccaatcggataaaacctttgaattatttaactcaatatatgttaagtttctactatgtgctgtgtattggtactataaatatgaataagacataagatattacattcaaaaacatcagaatacatgttcttttaaagtataccccaaaacatttaccatgtgttctggggcgcatgttaggctggatcacaaatcaagtctcaagaaatttcaaaagattgaaatcatatagagtatgaattaaaccagaaatcaagtacataaaggtaacaaaaaatttccaaaatgcattaatttaaggaacatacacctcatgacccatgagccaaaaaataaatcacggcaaaattgcaaaaatattttgaaatgaattttaaagaaaatacttagcatattaaatacttagcatattaaagctctaagtacatatgttagaaattttaccgaaaggttggctatcagtgtttccagaagccagggaaaaagtttatacaatttgatcgctgaggcagggaaacaaagtgagacctccgatcgccctgcctttctgaggtgagcactctggatcccatcgcaggagatcagagtcttgctgagttgaggagaggaagattggagttgatactgagatagcttgaattttcagggcaaagtatcaacaaggaggaaggtagacaaaaaaatccagaaatctatgtagagaccccattgtgtacattgcggaacactaagcctaacaattctcaaaattagcgtgagattgggaaatatctaatttccatccagccacagtggagagtcctgactgaaaaccaggcattcgctaaagatcccagaaaggttgtgtgttacatacgtagggctaaactatcctgactaaaaactacactacacttgctcctcacccccacaaaaagcttaaaaacaagcctcaatagtataaagctgatctgtaagtaactaaactacctgcagaacaaagtccaaatttattagttccagtactccaaaaaaaacacatgtaaaaaaaaaatagatttacaagacatttatttggggaaaaaaagaatgcctgagggttgaaatggagaggaagccagagagacagagtcctcagaatacataaaatttctggcctccatggaggtgtgatggttaattttatgcatgtcaacttcgctgggccacaggatgccccatatatgatcgaacattatttctggttgtgttcatgaagctttttctggaggaaattcgcatttgaattgatggactgaataaagcagattgcagtccccagtgtggatgggcttgatccagtcttctaaggacccaaataaaataggtggaggaagcttgaattttctgcctgactgtggcgctgggacacccatcttctcctgcccttgaactgggactgacaccatcagtgctcctggttctcagaccttcggacagcagacttggggccttctcggcctccattattgtgtaagccaattccttataataaataagggtttatttattgataaatccttataggttgattataaa

SEQ ID NO: 1915 - DNA, 493 bp, Homo sapiens
agcatcacacattgctgcatcagagaggtcttaagacaggaagctagagtcttggtgcatgctcgaagtgagacggtgtcagcacagagcagggtaaaatcttcccgttaactcttcaccagagctatgactggaatcagaggttgaaaagatgtgagactgtacccaagaagcatcttataagcctacgtaatatactgttagactcatcgaaatctatttcctcccttctttataatcaaaacttcagtgtccagaataaagttggcagaagggttaaattggaaagttaaatgtactagaaggtgtacatttataagttttgaccttgagtcgtgttcaaggagaaagtgacattggaacttggaaaatttaaaaatgattctacttgaaaaatttgaccattgcatagaaatattagctatcgtctaatcttttgtaatcttagaaacaatcgtgaattgtttggtgaaaaatgaaaaaataaccattt

SEQ ID NO: 1916 - DNA, 424 bp, Homo sapiens
atccactgctggctcagtccaccccttgggctgcacagctctattcaggcctagctgccaggaagattactaggtatcattgtcaactcaggctctgtgcccagtaaacctggaaatgtctggatattcttccttgccagcatatagtcataaatctatttggggaagaacttgccatttcatcaaagtctgtacatgtatagcagggttcttcctcctagtgacctgtgacctagtaacccagccacctatgggttcttccatctgtggcttccttacctgaaaagtgcttcaggtctaggaactgagaaagggattgtgatgtgtcattggagccagtgcggttccattcgtgccttatttggttataggcgttaagcagcattcttgttagatgcccatctattttgcctataggggtgtt

SEQ ID NO: 1917 - DNA, 493 bp, Homo sapiens
agcatcacacattgctgcatcagagaggtcttaagacaggaagctagagtcttggtgcatgctcgaagtgagacggtgtcagcacagagcagggtaaagtcttcccgttaactcttcaccagagctatgactggaatcagaggttgaaaagatgtgagactgtacccaagaagcatcttataagcctacgtaatatactgttagactcatcgaaatctatttcctcccttctttataatcaaaacttcagtgtccagaataaagttggcagaagggttaaattggaaagttaaatgtactagaaggtgtacatttataagttttgaccttgagtcgtgttcaaggagaaagtgacattggaacttggaaaatttaaaaatgattctacttgaaaaatttgaccattgcatagaaatattagctatcgtctaatcttttgtaatcttagaaacaatcgtgaattgtttggtgaaaaatgaaaaaataaccattt

SEQ ID NO: 1918 - DNA, 1234 bp, Homo sapiens
gtggactacagcttattcagcctgggaaaaataatgttggagaaatactctatgaatagaatatactttggaagcccttaactaaacgcttacttctcttgacatcagataattcagtctagcaatatgatagataattcagtctgtcatactgaaaatgacagcacttttaacacctttctaaccttcttaacgtcaaagaatttttgtagaaatgtagtcctgtgattgtcattttttcccctaatttctctaattgttacattcttagtattttaatccatattaaatttatatggctataaatttcatctgtttacatcctgatttgtatactattttaaaaatacctttagtacctgggagaagtgacctctttatttttgaagatggcttattctttttgttctttataacattaaggctttcttattgtaaaaatgttcatgaacgacattttactcaatagagattcttcattatcttcatggtgttttgttgtgttactgtaatatcacttatgaaatcctattggtggatatcgtagtctcctctagatattttgccataatacatgccaaaatacaagtccctgctggacattctccctaagcacatctttgtatcatatcttttaattgcagaagtaatgtgtgaatatattttccttataaaagatgcaaacattacaaaaaggcaaatgtaccctttgaccatatcccaaaggatagtctttatcagttcattatttattgctgatcatttttctgttcatatatacatgcgtgtctcagtaaaaattataaaatgggggataattataatacctacctcataatgctttgtgaggattaaatgaattaagatcgataaagtgcttagaattgtgcctgacatgataaatacatactcactgaatgttagtcatcgttattatattcatcatcatcagtattattatttgtagaaaggctttttaacttctgcagaacttagtcaccattaggcagggtgtttgactgaagaaagaccctttgaaggtaacaagttaagaaaatttcccatcatcatgtacttactattgaacatgaaataatcctaggtgttgggggggaaagtactgtgaataatgtgtgtgaaggactttattccgactaatactctttttgtcgcattatatacccagtaaaaaagaaaagagaacataagcaaaatattggtgcactaatgagga

SEQ ID NO: 1919 - DNA, 1086 bp, Homo sapiens
gtatgattagagtcatcctttaacaagggagataggactaaggcatgtgtatatttagcaggcttcccaaagtaattctgatctatagcaatgtttgggaaccagtgacttactttgttttcctaatcactaccctcatcttattatgtaacctgtcttctaactctcttttttcctcatccatttgtaaaaaaaattcggttaaattctcccatattgactgaagttttgtttctcccaaacaagaaaaatgtgagtgattactttcatattttctttcagtcctggaatcaagatgtgagaccaagaaattatttctgaagaaagaaatttatgaaatagaatcaacccagtgggaaataatggaaaaactcacaagacgtgattttcagtgctccagtttcagagatgattgggaatgtaataggcagtttaagaaagaactcggctctcaggggggacatttcaatcaattggtattcactcatgaagatctgcccactttgagtcaccatccatccttcacattacagcaaatcattaacagtaaaaagaaattctgtgcatctaaagaatataggaaaacctttagacatggctcacagtttgctacacatgagataattcataccattgagaagccttatgaatgtaaggaatgtggaaagtcctttagacatccctcaagactcactcatcatcagaaaattcatactggcaagaaaccctttgaatgtaaggaatgtggaaaaacctttatttgtggctcagaccttactcgacatcacagaattcacactggtgagaaaccctatgaatgtaaggaatgtgggaaagcctttagtagtggttcaaacttcactcgacatcagagaattcacacaggtgagaagccttatgaatgcaaagaatgcgggaaggcctttagtagtggctcaaactttactcaacatcagagaattcatactggggaaaaaccctatgaatgtaaggaatgtggcaatgcctttagtcagagctcacaacttattaaacatcaaagaatccatacaggtgagaaaccttacgaatgtaaggaatgtgaaa

SEQ ID NO: 1920 - DNA, 511 bp, Homo sapiens
tctggagcctagcggccagacgtggcttctcctgagttctagggctcgggccagagtggcactactgcccggccagtccaggctcaggcaggaatcggacgctggggcccgggctctgcacagagagctgggcttgagtggagtttattgtagatttctcccaaggggatcacttagcttctcactgacacacccttcccaattgccacaagcgcaggggtatcttacagcactttggggaggggtgggacaaactgcaaggttctggggccaaggcctacccaggggcctctgcccagagaactcacaaccccctctctgacctgggggacaatgcaaacaggtcacagtgcattcccatattaggccatccccttcacgaagaattcaggggatgtgggaagtggggaggcggggagggatcttgactcttgtctcctttgtccttttgttcagacagagttgtacctgcagcagacaactctgaattaaagcatgaaaacacagcaag

SEQ ID NO: 1921 - DNA, 1457 bp, Homo sapiens
cagagcaggtaggcgccctgcagcctccctgctcccagcccaaggccagtcggcctgggaagttcactgccccaactcttttcccgggaccatactgagtcccccagccacgctgctgacattaccattattattttaccaagtaaactcactccttttcccccacaggggttacacccatctggttgtcccacccactcttcagaggctaggccccacctctgggggttggagggaccctgtgtcttactcgcccctctggcctaagggccactctggttatctgccaaggttgcttgccctcaccccaatgctccaacagccattgcctaactcatgggctctgcccttctgctcggtgccctccacgtgaggcggggcacctgcatgcactgggagggggcggctggcccagccctcggggcaggagccccctctgccacacgctttgtgcctccaaagctccccccgccttggtcagggcctcagaccagccaacctttgtggaataagccccagcccagccaaaccaaacccagatgcctgaggcctggctggggctgcccccgcaggacactgtggccatgccacggagggggcagtggacaaaaccaatccaaagccaagccgggactggctgcggacccagcctcctgtgccgcgcactcacggagctgcgtagtctcctcagacatagtcaaagctttgccgagaaaagaaatgtatgaactatatttgacaacataaaatctctctatttttcaccactggaatttagtcaagcttcaggcccctctgctcctgtctgtgtcttgcgtctgtggccttcctattgtgtcttgtgttttggtggatgtgacagggctggggccacagtctactctgtctctgctgctagagaagccacctgtggaggactgggctgtggttgggcctgaggcctgtggaggaggtgagtgtagccagcagcggccgtctactcctgttctggcctgagaccaccggtgtgggtcacgagggccctggcccacagtgttgagggtcctctctttcgggggctctcctggggccttcgatgggcttttcttcttgtcagtggagggagcagctccccactcagccctgggacaggccctgggactgtggtggccggtggccctggcccagctctggagtgcatgtgtgtgtgctcagatcccgcatctatgcaaaggtgcaggctgcctgtgaggctccaggcggtggaggtgcggcagctgctgctcaggtgccatgccctgaagaggcagggtacacatggggctgggagggcaaagatggggcggggcctccccctgagagagctcaccctccacagtgacccttttccttcctgcctaatacctcctcccgttgggctgtgacttttcctcctgccctcagcctctgaaacagaaatctttggggcctcccctttc

SEQ ID NO: 1922 - DNA, 15734 bp, Homo sapiens
gttttgtttaaaatcaaatctttattcaaaagatagtcaaggctgacaacttatgcagtctgtgacaaagagcaagtcaaggcaaggaaaaagctctcacaaagaacgtagctctgttctcttaaaatgtgtaactgttttcctggtagagcaaaatttcttgaaaggggcccagttgcgactttaagcagcgtttaaacagcctgcctccgtgtccagcatttaaatcagcacaagagaatcggctgcctgtgggccctgcctgagcctcagcctagcttggagtctgaggctccaaggaggcctgtgtgtataagccatcccatggtcaccctcctggacacgcccccctcatggcagcccccaccttaagcagcaggccggctgcaacccatcatccgagggtggttgccctttgctgcaggagggcgggaagccccccctgcctgccctgccctgcagtggcttcaggcatctgggatggagtggtccatggtgtggtggagcaggactggaggcaacctggatacagcaacaacagtgaccaggttggcagctccttctctccaccctccagcaacctccacccccttccgagccagtgcatcccatgtgggccttcactcccagttctaagactttcgaatcaccagaagccacaagctaccttggagggaggggaagggaggatagagctggctgagcctgtgccctgtgtcagcactgagaaagtggaagtggctgagccaggtgcacctgggaggccgggaggtgaaggggatggcagaggaggggtgaggaggggtgaggaggggtgcagccttactttttgaccatgtgctcgtagatcacactggggatgatggtcagggtgacaacgttcccagccgtggccagaatctccatgatctttttgtcctagggaggaggcaagtaagcgatcaccctaaggattggggaccaggggcaactctacaggcccctctgtggagggatcagcatggccactgctagaggacaccactgatggctgactgcagggcagggctgcctcggaccccgagcctgtcagatgagggtcccagcagactcccaggtaaggtcttgcttgagtgagaacatgggtctcccacctgaggatctccttggtcaaatgagcatgcctcttcccaccctcagcttgaaggccagcggtgtgagcctgacgcgtaacagggcctcatcaatgcgattctcctcccccttccaagggctcccagagactcaccaagcccacagtcacatttgggttctggcctcaaagcataaatgcctccccatcctgtgggaggtactaggcgtacccatccaccctctggctcctgctgcctccagggccataaggatcctcctcctcttacatcctcttacatttgcttgtttgataaaaagagatgggcctgcagacaccacttagatcatgggaagaacaagaaattaaaagtctctacgcaaagcgtgccaggtggtccaaacactaacgttatggccatagaagagcctctggccctcactcagagcctattgacctttacattacacatgtatgttatctggttatgtgttttcttggttgttcgaaaataaatgtgagaagatgtgctagacaggactagtgatggccacaggtggaaataaactttgaaaagacaaacgatctcaagaagtgtggctggctgggacaaacccagttctgaagaacctcacgaccccatggatttctgaataacgattttctaaaacattcctaaactactgaacatgatccactataccaaaaaaagtgccatacagagcaaggaggtgtccatgcagccagcaatagctattatgtattaagcacctgctatgtgcctggcactgtgctcagagctctaggtacactgtcttttttttttttttttggagacagggtctctctctgttgcccaggctggagtgcagtggcatgatcatagctcactgcatccttgacctcccaggctcaattagtcctcccacctcagcctcctgagtagctaggactacaggtgtgcaccaccacgcttggctaattttttagttttttttgtggaaagagggtttcacattgcccaggctggtctcgtgctcctggacttagtgatcctcctgctttggcctctcaaagcactgggattacagacgtgagtcaccgcacccagccctacgaacaccgtcttactgaaccctcacagcaaccttaggaagaggatgctgaggctcaggtggggtaagcaagctgcccaaagacctgagccctcccaccacccggcagtccctccctggtgcggccaccagcctaccttcagcccgataacattctgcccgtccacctcacacacgtagtggttggtgaggagcccgttgcgggccgcagaactccctttgaccagagagacaatcttccccttcttgatcacgaagccgacgtggcccatgctgtccttgtgcatggtgacagtccgctggaacggcctggcaggagggacagtgagctgtcctggggacatggctggggtgagacggagaggctgcccgggcctggctactcacctgtcccgaaccaccacgacaatcttatcgcctgatgccttcttcaccacctgatgggctttgtgcgagctccacccagcacagtcacgcccgtcaatctgcaggagctggtccccaaagcgcagccccacaagggatgcaggggtgttggcctggaccaactgcacaaagagcccctgggggaggcagggccccagagtcagtgtccctggcccaccctaggcacagatccctcttccaacctgttgttttcctcctgatactccaggaacctacagggtgccagggacacagctctgcatggcaggcaccaaggttaccccatttaccggggaggaaacactctaggcctcatagttaggaagcaggtgagtcaggatttcaaccctggcctggggctgcactccgaaacactccactgtaccattcacaaaggcatgggcttccctggcgtcggctgtctacaccgtcgcctggaagctagatgccctgggcagcgaagggcaggtggggaagggaggctcctccgagcgacggaagcccacggagaggccagtggagggccctgcgcaacccagcaccagccccgcccgggtctcggggaggagggactgggggcaagagcctggccgctggggttaggaggcccgctctgcaccttccttactgtggacgggccctctgagctctgaggcctggcgggagagcgcgtgcagctcgagctcctcttcccacccagcccccgcgccctacctggtcgaccttccgcagcctcagcccggtcttgccgcgctcgtccttgcacaggtggatctcgcgcaccccgggcttgatctcagctcgccgcacgcccaggctgtacccggttaccggtgccaccatctggccgggcccggggcccgagaccgctgtctgcagacaccagggggcagggggtcagcccggcccgtggggaccctgtgcctcaggagacactggggtgggggtagggatggggaaaggaggatggagccgtccccgggtccccccacgtccccagtccacgcttctcccctaggggcgagaggagacgtggctccacgcggccactagggggcgtcaaagtccatgcccttaaaaagccaggaaaacggggagggaaggggcgaggatacaggaagaggcccttcatttcccaagggaaactggcatcaggaaaagcctcctttaaaacccacttaaaatagaaaaagtcacagtaaatagtgagcaacaggggataaaaggactggatttttgtcttgagaaaaatgtaaaaatatacaaattcatgatgcagaaaaaggcaaggaacttcactctcccaacactattaaagatggtactggaagacctagccagcacagtaggcaagaaaagagggggagtcacacagatcagaagagaagaaataaaacggttcctatttatagatggcacgatggtctactagaaaatcccaaagaatctacaaataaactcctagaccaaataaaagagtttagcaaggtcctgggatacaaaattaacacacaagattcaattgtacttctgtatactaacaacgaacacatgtaaactgaaatttaaaatacaacaccaggctgggcgtggtggctcatgcctgtagtcccagcactttgggaggccgaggaagatggatcacttgagcccaggagttcaagactagcctgggcaactgttgaaacctcctctctactaaaaatacaaaaattggctgggctggtggcaagcacctgtagtccctgctactcaggtggctgaggcaggagaattacatgaacccaggaggtggaggttgcagtgagccaagactgagccactgctcagtccagcctaggtgacagagcaagactccccctccaaaaaaaaaaaaaaaaaaaaaaggaaaggaaaggaaaggaaaagaaaggaaaggaaaagaaaagaaaaggaatgcaatccaatccctcttccattcactcaaaaaaaaaaaaaaaaaaagaggccgagctcagtggctcactcctgtaatcccagcattttgggagaccaaggccggaggaccacttgaggccaggagttcaagaccagcctgggcagcaaagcaagacccccatctctgttaaaaacaaaaacgaagcaaaataaaacctaaaaacaagaacaacaaaaagaaatacgtgtaaatctaacaaaacacatacaggaaccgtatgctgaaaacaacaaaatactgataaaagatatcaaagaagacctaaataaatggaagattctctgtattcacgtgttgaaagaattagtaaagctgtcaattgccaccaaattgatatacagatataacaccatttctatcaaaatctctacaagatgttttgcagatccagggaaggttagtctaaactttatatgaaaagacaaaggaatttagaatagctaaaacaattctgacaaaaagaatagcgagaggaatcaccaccaaatttcaagacttattatatatagctacaataatcaagacagtgtggtactggtgaagggatagacaagtatcagtggaacaaagtagaaaatccagaaatagcctcaaatgagtaaagtcaactgctttttgcaagagtgctttcaacaaatggtgttggctgggcgcagtggctcatgcctgtaatctcagcactttgggaggacaacacagggagatcagctgaggtcaggagttcaagaccagcctgggcaacagggtgaaacctcatctctacaaaaatacaaaaattagccaggtgtgctggaacgtgcctgtggtcccagatacgcaggaggctgagatgggaggatcgcttgagcccaggaggcggaggttgcagtgagccaagatcatgtcactgcactccagcctgggtgacagagtgagaccccatctcaaaacaaacaaacaaacaaaacaacaaaaaaagcaaatggtgcaaccatggcaaaaatatgaactttgactgaaacctaactccttacaaaaaaattaacccaaattcaatcataaacgtaaacgcaaaacataaaactataaccattttagaagaatacgaaggagaaaatctttcggacttagggctaggtaaatatttctttacaaagtatgagccacaaaagaaaaaaaaatcaataaactggacctcatcaaaattcagaactgttaagctacagactgagagaaaacataaaccacacatctgacaaaggactttagaatacacaaagaactcccaaaacactacagacaagccccagcctggccaacatagcaagaccttgtctctgcaaaaaataaaaataacaataataaaagaaattagctgggcatggtggtgtgcacctgtggtcccagctactcgggaggctgaggtgggtggatcacctgacccgggaggtggaggctgcagtgacctgtgatcgcaccactgcactacagcctggacaatagagcaagaccctgtctcaaaaaacaagaagaagaaaacaagccatttagaaaatgagtaaaatatatgaagaaacattttaccggaaagaatatacagatggtaataagcacatggaaagatggtccacatcatcaggtgccagggaaatgcaaattaagaccatgatgagccatcattatacctatcatagtggctaaaatataaaatagtaataataccaaattctggtgaagacatgaagaaactggagcactcatgtattgctcacggcaaaataaaatggtatagccactccaggaactagtttggcagtttctttttgagacagggtctcactctgtcacccaggctggagtgcagtgctgtgatcttggctcactgcagcttccacctcctgggctcaagcaatcctcctgcctcagcctcctgagtagctggggctacaggcacaagccaccatacctggctaatttttgtattttttgtagagataggatttcaccatgctgcccaggctggtctcgaacttctgggctcaagtgatccacctgtctcagcttcccaaagtactgggattacaggcatgcaccaccacacctggtggcagtttctttaaaaaacttaaacatacatttgtcatacagcctagcaattgcactttgggcatttatcctagagaaatgaaaacgtatgtctatacaaaaacctgtataagaataactttgtttgtaaccaccaaaaactgggaacaacttagctattcttcaacaggttaaacaaaccctggtacattcacatcatggaatactactcagcagtaagaaggaatgaactattattgacacacacaacagcctggatggatctagagggtattgtgctgagtgaaaaaagccaacctcaaatggtcacatactgtacgattccacttatgtaacattctgaaatgacaaaattatagagatggaaaacagagggccggatgccaggggttagggagggtggcaagcaggcaggcataactatacagaagcagcctgggagggaggtggttgtggtgatgaactagttctgtatggattgcagtactggttacatgaatctacacactgatgaaatgacatagaactagagacacactgtactcgcgtaagactcctggttttgatagtgtactatagctatggaaaacataagcattgaggaaactgggtgaagggtactaacaacttctctgtactcactttgcatcttcctgggaatctactgtttaacaataaaaagttaaaagacatacaaaattttaaattataaaaatgtattcatcatcttatattttatcaaaattacggttgaatgcatttatgtcttaattataggaacaaagagtgatgacagtggggctgcctacagaaggaccttctttgcttcatgtctgcctttcacagcacgaccatgaagggggccactgtggagaaacaccccagggtgccatcagttcttctcagggtcccacatggcctcatccttgtggatttcctcctgtcagatcctcgttttggcagtggctttgtatgtgtctgtgacagttctctatcatcatatccatgaacttcatgaaattccccagccttagacaactttgcagtttgtactttcagtttcatcggctcaggacgagcctggcaggaagactgacaggtgggacgcagggatgctagagctaactggcaaggggcttaggcggggactggttctacaggtaaatatgttttcagtggcatatatttctgtgatggtgtcttttgctccccgaagccatggaaagcaggaattgagccttgttgtttaatttggggaccagagttgggtgacgagctcctgccctctcggctctgtttatccatgcaggcagccctgcttttgatgtccccaggttcacgctgggcttaatgacctcccttctcatccagctcaggcccaaggtcaaagggcaagccctggttctccatccccaaggcttgtgggaagatctgaaaccatgaaagcccacagtggttttcgtgaagcctcaaaatgaacggtgccatcaagaaacagagccagcagagtgctggggagaggggaggtccgagcacagagagaaagaaggtctgttgaaatggcaagaccaggaaaaagggaggattgggaggttctgcgcccgcagcaggcagaagccaaatacatacactgtcaccctctggaatctgaagcaggctctcctggacttcttggctggagagggaaagacccatataattttccagttctgccaagtttgggtacaaaactgatagggaaagaaggaagaataaatgtgtcattagaggacatgtgcttccctatgcctgcctggctcccctgtggctgctcatttttattaagaaatggagcctgggaatggtatttatttccaagactgtggggtatccccaggaacactcactgatgagcgctcctcagagggcccaggtgcagggtaggacaccgagtcctcatgcaccactttgctattcaactccactgactttatttgacacccagaaacctctgcatccctcagcgaatggttcccaccaggactggcagggtcctaatcccttcttataaggatttgtgtccttataagaagagacaacagagggctcatgcatgcgctctcatgctgtatctctctcgtgttctcgttttctctctctcttttaagcaagtacactgaggaaaggccatgtaaggactcagccagagggtggccatctgcaagccaggaagggaggcctcaccagaaactgaattggccagaaccttgatcttgggcttccagcctccagagctgtgggaatatacatttctgctgttgaagtcatccagcctatggtattttgttatggaagcctaagctgaataaggcaagtggggttctggccccttctctctttgagccgctatctgccgtccacttcttccccacctgcccccaccccaggccagccatagttccagcaaggaagtctgacaagtgtggtatttcattcccggggtcacatgagattggatcaccagaatggtgctgaaatgctgatttgaggtgactcaaatcgtttatatagacagaggccccacaaatgatatcacatcctcaaggcagccttgctgggggcatcagagaagccatagcttccctaacttgagctgggtttggaaggataaacaggggttcaccaggcagtcaaggagggaggggaacagcatgggcacaggctctgggaggtgaggtgactcagcccaggtcacccaggcagtaagaggtgggtggcaactggaagcctggtcctctcttcccaccatgttgagtccttaaccctggagcctcccatacctttggcattgccaagcttccctgatgatctcttccctgaaaggacttggcacccaggagcccctcatcccagcccactcacctggtggtggggaaatggctgttgcctggactggcagggctggcatcttgggtgaggctctgacctgggcctggggaggagcagggagcactggtcagctgtggccaggaccccaggaaccccagagcctggagctccatgaggccagggtctgggcattaggggtgtgagtgggcccggggtgtggggggagtgtgcaccaaccctcagggctcaagatcacgtaaacgtggcctccgcagatgtgtcttttcctgggaggaagttctgggggactgtgacccaccctatgtcacaacccatttactgcctgcaacaggcagaacatcaaggcccatctcccaatcaagttctcagctgaaaagtctccatttctcaaaacccactggaaccacagagtgctgggatggaggaggaagggggcttctgggggctaagcagaccaatgcctatgcccactagtcttgtttcctctgaaagcctgccttagagcatggagcccgcccatcctggagggagggagagctgggcctgggcaggacagagcaggcatgagagaggcatgcgtgcgctgcttggtcttttctattcttgctgtaacgccattggcattgccccctggatgtcttctctgcccagcaggccctgcagtggacacctacatgccctgaggcctacgggaatctccaagtggccccagtacccagcaccttccagggtaatccccaaggtccccttcagggaatccaggccaatggggcctggcgacttacctgaatggcttggtccacttttaggtcctctagagatgggtacagggatgacatggctgattctcagaacaccctgcagagtgcagagggtggggaaggataaggatgcagctgatgcccccttgaaaggaggcacagacatccgcaacagcaagcgggttggaacttaatattcaaacagaaaggcagcagggcacttagaatgcctccccgaactccacccctaatcccctgtcgatatttgaactctactgtattccactcatctccagcctcactgtcaacttttaatcttggccacaatgaagtaagaccagtaggaaatttataaagactctcacacaaactgtagcagaacttagacactcaacagggcactgctccagagggaggagggaatggggggtggagaggcaccatgagcacttatttactaaacaccttctcattgtcccagggagaatcagcaggacctctgagcaaggtgccccgagaaagtgaaaggaatgatgacctcttaagaaatgttttattcccttcctgacgaaatgtggggaaggagcagtctgcctttctgggttccttccctttactcactaaccactggctctgtcacacctccaggcttcgctgaggcagtccactccaactggagcccctgcccaacctccttgtcaccctcggttcctgtgggacacgcctcccctggctcccaggcaatacggtcactgcccctcccacccaggaccctgccctccgggacagctccgggacagcaccgggccagcctcttgcttgaactcgccacttgtcctgactgcagttctgaggggtaaaggtgtgtcctattcaccccactgaactcacatgtgatgggtacacatgataaaggaatgcccgctggtggcacaggaaactgagggtcctgtgcctgagcgatgtgactccaggcttcccaggatcagatccgctgggcacctccctgagtgaccacaggcacgccgaggacatactcatccatcactgctccttctcctccctctgcacctgctgccttgacccctgtgtcatccttggccccgcccccactatcccttcttgtctgtcatcaaatcccatctctcccacatcccgtgttgtgcaggtccccatcatctccctggccctctccaggtgccataacaccctccaaacacactgctgcctcccctcctgccgtcctgctgctctccagacagcagccaccaggccctttgtgtacacacttgggatgtcatgccctggctgaaagcccgccagtggcttccctgccttgggaatgtactctccttaaagaggctcacagggccttcacgattccaccagagattggaactggtgggcccagggccagatggaaatagattttatttgaccttgtggagtactgtaaacgttcagattagcagcttaaacacaaagctcaaggtactggatttaataatcgaatttcccactgctcccaaaaaacaggaagctttggcaaccctaggctatagcagagtagctacaattgagtagcagcagactccagggtgacccagtccaccatcctctattggctgttacacccagaccattgtactcactggtgccaagtcccaatagatatttgtttgcaaccctagtctacctctccagcttcatttcttgccttacgtcctttcagctgctactttcaactccagccacaatgagctacttccacgtccttgcatgtgattccctcctgtctcttttgcatgtgttattccttctatctggaatacccctcctctccctgctccttgcttggccaactcctaataattttcaagtctcagatcagggagctcctcttacaggaagcctgctttgatttgtgctccccctagcccctgctccatgtcctactcctgttgagtattcaccactcttgtggttgcctctttacttgtctgtctacctccttaggagttccaagatggcaggaacaggggcttctcatttgctgtgaagcctctaacccctagcatggaggctagctcaataatattgccagaagcaacacattctacctgggcttccacttttctccttgtaaagtaaagctctagtatcctaagaacacccaccttcctggatgaaacaaggaccagaagtcccaaatgtgcctctcacagtcctgttttattattattattattttgagacagagtctcactctgttgccaaagctggagtacagtggcgcgatcttggctcactgcaatctccaactcctgggctgaagccatcctcccacctcagcttcccaagtagctgggacataggtgcatgccgccacacctggttaatttttgtattttttgtagagacagggtttcagcatgttgcccaggctggtcttgaactcctgggctcaagcaatttgcccgcttcggtcccccaaagtgttgggattacaggcctgagccactatgcccagccttttgtttttaaaatctgaattagtgccaatatttaaaaatctggaaacacaaaatgcgtcacttcttacttggattgaaaaaaatataaacatttggcaaggcaagagctggaatagtgcatggcaacactcacccggctgagtcacagcctacctcgcaaatggggctgtacgtgctttcctgtttccgcaagtacccatcagcccttcactgatttacgttgcctgcttggttcctggaggcagccagttccagaccctgccctagcctggcctttggggtagaaatgaccatcccaacaggacaggaatttcctgggaggggagggagtctggctctgacttcctttagaccacctgggggaagagacccctttgcttatagccttccccactgtgtacacacactatgagatttttaatcttgggacagtcctgagcagctatcatctgccaaaacatgacctgccaccaggaccacgcatgaacagcagatgcgaaaataagcagccactcctgccctgattttcctaacatttaaccagtagagcacttatatttttgtcagctgtcccctgggagagcagggagtcagagatccatttcctggaaatcactcccgggccagatcacataaccctttttctgtgtctgagatcctttcaccactgccaccttctctggatcccatcttagtgctgggatgcggggaagtgagaaaacaggtacagtcgttccttggggtaggttccaggacaatgcccctcactccccatccctcggataccaacatccacagctgcttatgtcccttacataaagtggcataatatttgcatataacttatgcacattcttctgtatactttaaatcatctctagattacttacaatacctaatgcaatgtaaatgctaaacaaagttatattttatttttatttgaatttttgttgttttttttaatttttatttttaaatattttctgtctacagttggttggatccatggatgtgaaacctggggataggaaaggcatactgtatcccctgccttgtagcagctcacaatataatggggaatggttccctgccagcgaacatgctgtgtttcgttcaatcattcaaaacatttgagtgtccactgtgtgccagacgtgctggtccctctgctgtgcacatcatcctccttggtgtgatgctccttcgaggctcagttcagatgctacttctctgcttggcttttccagactgcatgatacccaggctgcctggctgggtcttcccatgtattccacccctgacctgtactgcccctgttgccaagctatttatcaaattatgtgattaatatctgggtattttcttacactggacctcactcataagggcaggagctctgtcccgttcacacacgatccttccccgccacggcactgcccagcacacatatgctagcaaaaattatttgactgaataaatcagtggttttccaaggaacagattggaaatttatgtgggcatttttgggtgtcacgagactgaggggacagtcatatccctgtcgggggtggggggggcagggatatgaaactcctgtaatggatgggacagtccattacagtcaccataacaaatggtcctgtcccgcacaactttcagatatcctgccaaactttcaagtaagccaaaaatccgttataattggttgtacatacaatcacaatgaatttttccctagttttagtacacactagactgtctggaaatgcatatatcaggttggttgtggggagttacactttgctcaccattctggaaaatcgctgcccaccctgctccccacgggtgagtcacccgaacagcatgctcacgtctgtgtacatgtgtagctgtcacagtgactccgcgcttttatataaatatatttagcctttgactcaagatgtcagatataaactgttggcaaaattcagctgaatattgtcttctagtaaacctaagctgattcctaagttgggtacaagcgtgatcgggtgtaagccagcctcagcttttacaaagtgaaatgcatattcttttattagaaattactttcatgtccctgccttctccttataaacaaagggcatcatattgattttttacccggggaaccatcacctgggctgcagcctcaggacgaacctgtgccttccctctgtctcaatttcctgctttgggaaataggagccacaagccacaaactccatccaccgcgccacaggagcgaggtccaacgcaacggtccctagggcctgcctccaacccagcctcagtttcctatctgtcacatcgttctatgatctcgaaatgactataacccctttcttagccccaaaccagccggaagcgacatcttccggttgctacaggttacggcggttgctatgggctacggcgcctgcgcagaaacaccgccaagcgactcagcaacttctagagcgcatgcgtttcgcccacccaggcccgggcgcggttaggggtgactcccacgatccctagcggctgcagagtggaacatggcggcctccttgccgcttgcgttaccagagtccacccggcctcgtgctttctccgggcgcccgtagctggcgccggcatccacaaaaatagatcaggtaaagcagcagagtaaggcataggaagacttggtcgggctccgcggcccctctttaccggattggaggctgcgcgggtgaaatcgagctttaaactcccctggcctcggaacaccatttgtagcctctgaaggaggaggacttataagattctgtactaaggcagccgtgggaaggg

SEQ ID NO: 1923 - DNA, 1045 bp, Homo sapiens
ctgccagtcaggtttgaatcctactgtgctattaactagctagtaaactcagacaagttacttaacttctctaagccccagttttgttatctataaaatgaatattataatagtacctctttttaggattgcgaggattaagcaggataatgcatgtaaagtgttagcacagtgtctcacatagaataagcactctataaatattttactagaatcacctaggattatagcactagaagagatcttagcaaaaatgtggtcctttctgttgctttggacagacatgaaccaaaacaaaattacggacaattgatgagccttattaactatcttttcattatgagacaaaggttctgattatgcctactggttgaaattttttaatctagtcaagaaggaaaatttgatgaggaaggaaggaatggatatcttcagaagggcttcgcctaagctggaacatggatagattccattctaacataaagatctttaagttcaaatatagatgagttgactggtagatttggtggtagttgctttctcgggatataagaagcaaaatcaactgctacaagtaaagaggggatggggaaggtgttgcacatttaaagagagaaagtgtgaaaaagcctaattgtgggaatgcacaggtttcaccagatcagatgatgtctggttattctgtaaattatagttcttatcccagaaattactgcctccaccatccctaatatcttctaattggtatcatataatgacccactcttcttatgttatccaaacagttatgtggcatttagtaatggaatgtacatggaatttcccactgacttacctttctgtccttgggaagcttaaactctgaatcttctcatctgtaaaatgtgaattaaagtatctacctaactgagttgtgattgtagtgaaagaaaggcaatatatttaaatcttgaatttagcaagcccacgctcgatttttatgtcctttcctcttgccttgtattgagtttaagatctctactgattaaaactcttttgctatcaa

SEQ ID NO: 1924 - DNA, 9912 bp, Homo sapiens
ccaacttatgttggatttgaacgagatgtattcagaacaatcgcagattattttctagatctccctgaacctctacttacttttgaatattacgaattatttgtaaacattttgggtatgtatagattttactgattttagttcattttgttaaagttttcaactttcttataatttagaagatctaaaaccataggtaaatataaaggtggcagcctacaaattattttaaaattcagtgaaataaggttccgaggttactcatacttccgcccagccaactaccaattcgggacttccctcaaccccctaccagactcaataattcactacaatgattcacagaactcagaaaagcactttaactatgactattagtttattataaaagctagacctcaagaatagccaaatggaagagttacacagagcacggtatgagggtgggggtggcacagagtttctctacccttctggtcatgccgtgatcccagcacatccatgtgttcactaacctagaaaactccctcagcctgcatgttttagagttttaattgaagtttaagtggcaaggcatgactgaccaaatcattggtcactgttgtcaattgaactcaatctctagcccctttctcctcccacaaggttgtagttggtgatgaaaattcaaaccatggccggccctcagttaccttagcatgaactcagatacgctgaaataggcttgttatgagtaactaaagacttctatcattcaggaaatttcaaggattttaggagctccataccaggtaccaaggacaaagatcaaatatatgtattttattataccacaattatcttatatttatgaggtttctagtacttgcagactgagaacagattttttaaatgtattctggctcaatccatttaattaggctgttgaaataattttttaaagttatattacaaatgggaaaaccactcatctgtcttgcacgtttgtaaccgaatgttgcatgtgtcctatttaagtggcttctgaattaagcaactactgtgtatactatactaacaatatatactatagtaatgctttattttttaactttactattgtttttgttttatttttgtccactgtcatacagttgcatcttaatttttgtttcatttcctggtagttgtttgtggctacatcacagtttcagatagatccagtgggatacataaaattcaagatgatccacagtcttcaaaattccttcacttaaacaatttgaattccttcaaatcaactgagtgccttcttctcagtctgcttcatagagaaaaaaacaaagaagaatcagattctactgagagactacagataagcaatccaggatttcaagaaagatgtgctaagaaaatgcagctagttaatttaagaaacagaagagtgagtgctaatgacataatgggaggaagttgtcataatttaatagggttaagtaatatgcatgatctatcctctaacagcaaaccaaggtgctgttctttggaaggaattgtagatgtgccagggaattcaagtaaagaggcatccagtgtctttcatcaatcttttccgaacatagaaggacaaaataataaactgtttttagagtctaagcccaaacaggaattcctgttgaatcttcattcagaggaaaatattcaaaagccattcagtgctggttttaagagaacctctactttgactgttcaagaccaagaggagttgtgtaatgggaaatgcaagtcaaaacagctttgtaggtctcagagtttgcttttaagaagtagtacaagaaggaatagttatatcaatacaccagtggctgaaattatcatgaaaccaaatgttggacaaggcagcacaagtgtgcaaacagctatggaaagtgaactcggagagtctagtgccacaatcaataaaagactctgcaaaagtacaatagaactttcagaaaattctttacttccagcttcttctatgttgactggcacacaaagtaaggctgttgctttcaatgcatgcaatattaactttgagtgtttactaactctgtgttttgcttacctggcttttcttccttgaagttgcttaattttttttcctccaagaggaattatttaaaaagacttttgtctgtgacataaccaagatttattctgtttacctaaggaacttattttcttttttgcaatttcatttattctgagtcactttatttgtaataagtgaagaattttaatacttagaaataagttgtaaagaaaataatgagaatcttaccatgctttagaggaacgtaatttctagaaatagttaaaagatgaaatactaagatattattttaccttctttatatagctgtatatactggtagtatgaaagcaactagtgtcattgatgatttttgggggggtatttttgtattctaggcttgctgcaacctcatttagagagggttgccatcgatgctctacagttatgttgtttgttacttcccccaccaaatcgtagaaagcttcaacttttaatgcgtatgatttcccgaatgagtcaaaatgttgatatgcccaaacttcatgatgcaatgggtacgaggtcactggtaagttgatttcttatagaaagaataagtctgattcataaaccaaaataacaaaaccaaactacgtaaaagtactactcaagtgatgtcttagtcttaaagtgctagattcttaggttggaaaggctctttaacctttcctagcagcagaattttggtgtattaatcttttgtgcacactctgttatactttcacatgctgatgttaatcctggctaaggactttgcctgctcattcatcctgaatcacttcatagtgattgaccagtcagaccacgttatgttgccttgtgccaattctgtttggtggataaggaagaagaaatgtaggtactgttgaaagcctaaggagactataactgtggacgcagagaactaatggaacttaatacagtaagtcagtgtttcagagaatatagtaatggaaaagtaggtcatcgtggacaagaagttgggaagcactattgccaaacagccttaggctccttgtgaaaatgaggataagggcatttatatgcagacaattgattggaaatgaactcttgaaatagtatctttaatctctttctttttttttaagtcaccacttcctcaaaatgcaacttcaatttacaagaggttcttatagcaaggaatccggagttatgctttcttccacgcgttattaaagatagttctttaacaatgacagacctaatataaagaagaagaattattcttgagtaattatagcactattaaaaagctaggaagtttatagaggaagatgttttcagagacatgactgggaaggtgataattttggttttgcacttttaagatttgaagtcataggacctccaagagaaattgaaatttgtccaacagaatgttggaaatatgagccaggtgaagaaagatcaggggagaatgcaaattgatttggtcatttacatagggatagtacttgaagctatgagagtagatgagctctacaaggctaagagtgtgaagaaagagcaaaaggctgaggtctgagccatggaaggagacaggaaaccccgagtgatgtgtaggaataaaactaaaaatgtatcaattctataaatattctgatcatctactatgtgtgaaatatttaaaacaattctgatttctaagtattttagaatgaggggtgtgtgtgtgtgtgtgtgtgtgtgtgtgtggtacagttagagggttgcatagatataagtgaaagtaacgagagtaataagtgagagtaatcaattttatcccaggatttgaagatcccataagatggaattgaaaaatgtgtgttttaaattgctgtctaaagactgacagaataaacatttttaaaaactattttccagcatttcaaaagctaaatggcatcagctttgcaaccacttatgaatagaagtgttctatatgttacacattctcctggtttgtgtttttctgtgggattcatttaatgtaattagttattgttctctgacaatctttaagcttaagcaacatatatatgtggtattaatagaacctatggtgtttactgataaaattgtgacaaaattgtagaaaaaccaaagccttttataattcttgggaattacattaaggatatactttttttttttttttctggttacacaggatcacgctctgtttcccaggctagagtacagtggtgtgatcatagctcactgcaccctggaattcctgggctcaaaaaatccttctgcctcactctcccaagtagctggaaccacagtcatgcaccatcatgcctggctagttttttatttcttcataggtatagggtttcactatgttgcctaggctggcttcgaactccttgcctcaagtgagcctctcacctcagcctcccaaagtgcttagattacaggcatgaaccaccatgctcagccatggaaaaactttaaaaaggatttatgtataatcaaattcttacatttctaactgtataaatcgttgtcctcatttttaaactgagggctgcttaccactttttcccaatacttcacataatgctacctggaaattaccgatattctagtttgtatgcaaccttagctttttaaattcacatcttttaatatttttctagatgatacataccttttctcgatgtgtgttatgctgtgctgaagaagtggatcttgatgagcttcttgctggaagattagtttctttcttaatggatcatcatcaggaaattcttcaagtaccctcttacttacagactgcagtggaaaaacatcttgactacttaaaaaagggacatgtaagtattgtgagtcttaaaattctctgcaatagtcagttgcaagtggcaaactcatctcaaaatagcttaatcaaaaagggagactttatcagctcccataaacaacctctaaaagtcaggaatgtagacagaatctgggactcaaatagctatatgactctttccatccctccatctcttatttctgtgttgatcctgtgtttgacaatggctccttcacatgatgaggaatgtggctagttgaagttcatgagttagagccttacatttgcaattcaaaggaaaaagagccattcctccgtctccaatttaaaagctctggatgtagactcttagcatagttgaggttaaatatgcatcgtttaggttgttaagagtgagtaggatggagatagggccttactctgattggttctacacaaaggagaatttattcttcacaaaaggtgaaggtagaggggtaaaatgggaaggaactattaaaagaaggagagaaggaatactgagcagccaaaataacagacatctactgtattctgtctttggctgcccaacacatgtttatgtttttcccatacataccattctaatattgccctggcttataattataactatctcctagaatttctttctcttatcagaagatgttagaagctctgcctatgtccctaggcctcaaaaaaaaaaaaaatacatgaaaactaaaaatatttcatttcagtaaatatgctgatcatctactacctgcactgtcagaacattaaagtcttaagatgaattagaataacacttagattgttattttatagttaaaagaataaaatccatagttaatggtaataattataatacctgtctttatttaatgcttattgtgggctgagccctttctatacattttcttatgtaatttccattttaatgatgaagaaacagaccaagaaaagttaaatacattgttgaatgctacaaaccaagtagattatggagctggggtttagaacctactgacttacatacctctactgcataatacatagtttttttaatggctgaatgtttgattggtggtaaattaataggtgctagatcccatcaaaagaatactttatcatataagaacatgaccagaattaacagagttatatcattttgatcactacagattgaaaatcctggagatggactatttgctcctttgccaacttactcatactgtaagcagattagtgctcaggagtttgatgagcaaaaagtttctacctctcaagctgcaattgcagaacttttagaaaatattattaaaaacaggagtttacctctaaaggagaaaagaaaaaaactaaaacaggtaagagaatgagcaagttctcaatcatgtaaacattttctaatgtgctgttcctggttgttaataacatttagaatctactttcttattttaatattttagattttaagtttgagttatatagactatatattatgatgtcttgtatatgtgcgttaacctaaaacatgtgagtacctacctgattttgctctttatcctgaattttaaaataataccaacagtaataatatatactctcctttttcactggtattttgtataattatagcttggattagcctgggaaagcaatttataaggtatggatatgtatctttgagtgacttatcactgttttagaatttttagctctgaaagcccagtagccacatgattttggcatgtctaattctaagtctgagacactgaaagaaatatgaatactagatgcctatgcccttcataggttttatcagtgggaaagaagatctggaatttagggggagaattaacatcggaagagaaagaatcctaaaatgttaatgttaatgagatctaagagatcttatagtattcacatgagaagagagagggaaaggcaaggataaaatgaaaggatactaatctctatactacgtctttgagaaaaacactgaattcttataaaatgttgagcactgcttcagcttgggaaataatgttaaataccttctaatttctcacctcatttttaagtttcagaaggaatatcctttgatatatcagaaaagatttccaaccacggagagtgaagcagcactttttggtgacaaacctacaatcaagcaaccaatgctgattttaagaaaaccaaagttccgtagtctaagataactaactgaattaaaaattatgtaatacttgtggaactttgataaatgaagccatatctgagaatgtagctactcaaaaggaagtctgtcattaataaggtatttctaaataaacacattatgtaaggaagtgccaaaatagttatcaatgtgagactcttaggaaactaactagatctcaattgagagcacataacaatagatgataccaaatactttttgtttttaacacagctatccagtaaggctatcatgatgtgtgctaaaattttatttacttgaattttgaaaactgagctgtgttagggattaaactataattctgttcttaaaagaaaatttatctgcaaatgtgcaagttctgagatattagctaatgaattagttgtttggggttacttctttgtttctaagtataagaatgtgaagaatatttgaaaactcaatgaaataattctcagctgccaaatgttgcactcttttatatattctttttccacttttgatctatttatatatatgtatgtgtttttaaaatatgtgtatattttatcagatttggttttgccttaaatattatccccaattgcttcagtcattcatttgttcagtatatatattttgaattctagttttcataatctattagaagatggggatataaaagaagtataaggcaatcatatattcattcaaaagatatttatttagcaactgctatgtgcctttcgttgttccagatatgcagagacaatgataaataaaacatataatctcttccataaggtatttattttttaatcaagggagatacacctatcagatgtttaaaataacaacactacccactgaaatcagggcatatagaatcattcagctaaagagtgacttctatgatgatggaacaggtctctaagctagtggttttcaaactggtacacattagactcacccgaggaattttaaaacagcctatatgcccagggcctaacttacactaattaaatctgaattttggggatgttgtatagggattagtattttttttaatctaggtgattccaatattcagccaactgtgagaatcaatggcctaaatgctttttataaacatttttataagtgtcaagataatggcacattgactttattttttcattggaagaaaatgcctgccaagtataaatgactctcatcttaaaacaaggttcttcaggtttctgcttgattgacttggtacaaacttgaagcaagttgccttctaatttttactccaagattgtttcatatctattccttaagtgtaaagaaatatataatgcatggtttgtaataaaatcttaatgtttaatgactgttctcatttctcaatgtaatttcatactgtttctctataaaatgatagtattccatttaacattactgatttttattaaaaacctggacagaaaattataaattataaatatgactttatcctggctataaaattattgaaccaaaatgaattctttctaaggcatttgaatactaaaacgtttattgtttatagatatgtaaaatgtggattatgttgcaaattgagattaaaattatttggggttttgtaacaatataattttgcttttgtattatagacaaatatataaataataaaggcaggcaactttcatttgcactaatgtacatgcaattgagattacaaaatacatggtacaatgctttaataacaaactctgccagtcaggtttgaatcctactgtgctattaactagctagtaaactcagacaagttacttaacttctctaagccccagttttgttatctataaaatgaatattataatagtacctctttttaggattgcgaggattaagcaggataatgcatgtaaagtgttagcacagtgtctcacatagaataagcactctataaatattttactagaatcacctaggattatagcactagaagagatcttagcaaaaatgtggtcctttctgttgctttggacagacatgaaccaaaacaaaattacggacaattgatgagccttattaactatcttttcattatgagacaaaggttctgattatgcctactggttgaaattttttaatctagtcaagaaggaaaatttgatgaggaaggaaggaatggatatcttcagaagggcttcgcctaagctggaacatggatagattccattctaacataaagatctttaagttcaaatatagatgagttgactggtagatttggtggtagttgctttctcgggatataagaagcaaaatcaactgctacaagtaaagaggggatggggaaggtgttgcacatttaaagagagaaagtgtgaaaaagcctaattgtgggaatgcacaggtttcaccagatcagatgatgtctggttattctgtaaattatagttcttatcccagaaattactgcctccaccatccctaatatcttctaattggtatcatataatgacccactcttcttatgttatccaaacagttatgtggcatttagtaatggaatgtacatggaatttcccactgacttacctttctgtccttgggaagcttaaactctgaatcttctcatctgtaaaatgtgaattaaagtatctacctaactgagttgtgattgtagtgaaagaaaggcaatatatttaaatcttgaatttagcaagcccacgctcgatttttatgtcctttcctcttgccttgtattgagtttaagatctctactgattaaaactcttttgctatcaa

SEQ ID NO: 1925 - DNA, 445 bp, Homo sapiens
acctccaacaccggggattaccaatttggcatgagatttgggtgaggacagatccaaaccttatcagtcactaatccagaaatttttttagcatttaattgatcaagcttttcgtagtgatcagtgataattgatttttgtaacataaaaccctagtatgagtacaaaatcctaattgctttcaaagttaattttttaaatgtacaaagatataagctaaatcatcaaaagctaattatgttttaatagtacaagtataatttccagttcatacaaaatagcattttctaaatgctaatagggttttattaatgttcagggtaactttatattcctttgttgtccactgggtgtcaatatgataaaatgacattgaataaatagcaataaattaaatatatttacagaaacattttatcaaattaagattaaaatctttattatg

SEQ ID NO: 1926 - DNA, 643 bp, Homo sapiens
aaaccttttctaaccaccctagggtaaatcctccattattcctttatttctttgttttccttgtagtatataatttgtaataattttgattactgattgtcattctgccaccctggagtatataatttttaattatctgattactgttattcttccatagtaggggaggtgatatccatttgcctgatacatagtatgtgttcaatacacatttgctaaagaataaatgaatcaataatacctaacatctctaatttgcagtcattcccaagagtaattattaaatatgtggcaaatttctttgcctttttacttttaaaaatctaattttgacataactgctgtaaccatccagaaacggcattgatgttgcttcacgttgctgatgcttaagcaatgtatattgtgtaatatacaatgtagtcttcaaactaatttcaacttctgcctttctgtgtactcccttatcccactgggtgatattatttggcatggtcattgtcattaaaatcatacaggatagtaattcctttccatctgctaccatgcctagccttatttaatttttcagattttctgttctattgaaggtaattgattttttctttttttttaatgcttgaaataaagcgttgaaaaacaa

SEQ ID NO: 1927 - DNA, 7728 bp, Homo sapiens
gggaatttgtgaggtaggccggaagtggtgttgcggagggaagtgtggggagagcagaggcgcagctctgctggagagacctgaggcttgcagcgctgggcccggccgggtcgctgcggctgggctggaggtgaggcgaaagaagggcatcctctgatgggagtggaccggagtccgctaaagcgaagcattccagggttcgttgcgggaaatacagtctggttttgccccccgtatgaattgagggaaggtgagagcagaagcaatccgggcctgaagggcgattattctagggtcggccgaggggttcaggccaaagttcattgaaatcctagctgggtccctggaggacgagaaaaccggtcaggagtctcctgggaagagggtcatgttttaatctagctaaagctggtacctggcagtttccactcttaaggcctagtgtactaactaatgtgtgcgcaatgtcaaaacaggaaacaaagggaaatgcaagaggtggaaggtaattttaagttagtggcagtatgacagatttccagtgccttcaggaaggtatccagccttaaagatcctttttttaaatagacgattttagacagaaaaaaggtagaaacaaaactataacacatgtgtactcaccactgaattggagaaataaatgattatataagtgattgaagtcctttgtcagctctaccccgtctcattctctttccttttgcctaaggaaaccactctcctaaccacctttatgcaatctgtaatgtgtacatctttttgcagctagcttgttttacataatgtttttgagatttgtcagtgttgtgtaactccaccttattcatcttaatagctgaacagatattctgttattttaatatgtcactgttcattgtttagtatctccagtgcctgacatactttaggcactgtaggtagctaaatgttagttgaatgcatggctgctgtagcatttgaactaagtagaaaagaataaataggacttcatgtgacccaacaagagtattccaggcaaaaggaatactagccaaaagcagagacatgaaagtgcatgaactatttcaagaatttccatacttttagtactgaaatgtagaatgtatggagatcatgtgatgaaggagaaacctggaaagatgaggcttaagcttaaaggatattatcctgaagagcttacacaagctcggcgccattaaatgcttttccagttatgaggaagctgattagagctgtattttcagaagatgatacagcgcactagagatatatcttaggatataaaagattagtgacagggaattttagactatcaagcattgtaacaataacaatcattgcattaagcaagtaagacaaccagccagactaaaaatccaaaaacattttcctagtccatcatattatcacattccttaacaattattaatatttcatattttcttctgacaaacttgcaacattttctacttcggcctcttacttagatgatacctcacatcctattgagttaaaaaaaaacttccccatgctttcatcaccacatctaccagacctgttccctaatatactgccactgctgttactatagatgaactgtctgatttaggagggagagtaaaccctttaaaaatacctttttaatacaatagtaactgaactagtgttacaaactttcaaggggggattgaaacgtgaatagtaagaatatgaaagaatggaatagttaaaagacaattgcttctaagagataaatgatccatatatagtaatataaaaataagatacttttttaatgtatatttctttttttcaggtagatttaggttctaagctttaaaagctaaatctaaatttacatgtatgtttttataggatcattgtttctactatttcttaacataagcagtttattatgaagtagaatctttaacaatcctgttttaaataatatgttttattagccttcgtcttacatatttcccagttgtccaaatatagttggataacttatttgttactgactgtgataaaaatagagtgtacattgtacagtttactacaggtgtcattaattttctcattctctcatatgcattgagtaactaccatacagcaagcactattctaggaacaggtagataagatttattagtggaaaatcacttacctaaaaccatatcatataaccgtgttaatgcaccttggtgtatgagaaactttcaactacaaatatttgattaccttaattgcaattcttaagggaggctaagtagatggatagctgaataaagttattacttggaaatgttgccatgtagccgcaggagccaatttcagtgcacacatcttaagcatcagtgtacacatttataggtctttggtgttttggccagcagaacccacctgggttatggaatcacactggtgtacttgatcgtgttcgggtatgaacatgctctgatttacattgagtactaattgagcatgtctatttaaattaaagttccagaatttatgtttaggccagaacctcaggtttgaacttctcccctaaaattcctctggcttctcattaaagccgctttcggagatataagtaaagaaagtcaaacaaaagactttgtagcatgttttgtttaacatgttttgtttagcactgtttttcttgagctatatatgataaatatctagggagaggtggcagaaggacaaaattgtagtagtttgaggtttcttgggggaaagttgaagcattaaaacatgttagcatccttatatgaacttttaactatggaaggaagagtcagtattccctttcaggcagctgtttatctggcttagactgcctcaaggctgtgtattgcccttcagcttttcttatgcattagaaagagatctagatgcatttgcctttagcagtgtagttctgaatacattgatgaccacccactgtgctgggacatgcaagaggtatgtaccataaactctttagtcctgctaatgtcctcgacagaggacataaaacctcctaagaaaagctttgtctctttccagccaaggttaactatttgtaacatgtcatctttcaaggaagcatctaaccaagattaagtcaaaggcatctaccaggtcctgaattctctcccagatgcacaccttttaaggtacaatcaggtaccatatgtaatctgtagctatttaaccatcgttaaagcatttaggactttgatttcctagaagaagtcatggtctgcaaaataattgtattaaaaggtataaaacctgatcaggaaaaagaggtttagggccaaactatacaactttgtaactagaccaataacacaaaataatagtgttttaaaatgtacccaggatttattttaatcagatatggtaagatatgcagatgtgaaaatgattgtcatgaaagaagaaatttttatactcatggatccctagaaacaggaagcatggcaccttacaccatgcaagggtgccatacctagaagcagcagggtcaatggggagaggaagtacaaggaaactgcaggaaagcctttatttggttttctgaggaaggaatgggcaaaactggataagcaggcttgaacaggtttaaaattggctagttgaaataattttggccgacttcgggcgtaggggatatccctagttgcctggtagctggtctggagtgattaggatagggcaatattggccaggagtataagaacccaagatgtctgtgttgggagttgggggattctggattggttagtttgcataggaattagctaaccctgggagaggtagtacctctccagtcatcaaggacccacctagataccaaatgattaacaatacaaaaataagaaagtacaattaatacaaacagtcataataaagatacagtattaacacagttaagacgtggaaattttaataaataaacactacagtaaatgtaggactgcacccctcccaaaaaatttgagataatttgatggaaaggtgtgtaaggaagggttgaaactactgttatggtcataagactgaaatatactatgatccaagagagcagtgcagcactaccaaggcaggcatgaccaagataggtgcggccaagcaaaaaggaagtatgtatggtgaataagctatactccttcatggcttgctgtattctgttttgttaatatactttccaagtcctgatgccaacttctgggttttactgtcactatttttctatttactaatctcagttgaagtggtttgccttacagaaataggcctaagccaatataagatagtgataaagagagctatagactgtttgcctcaccatctatgatcttggatatcataaaggcccccatagctggcagtaatactactttgtactgtgatgctttaatgtcttatctctggtcttattcccaggtcaaggatgcattccaggaaagttctataaaaatataccatcaactccaacctgatatttgacctagccatggaaaacctcattggctcctcactggatcagaccataaaaatgatccaggaatgaaaatctaagataaattcccaccacttcaagatgttcttatacaagtcaacagtctagcagatcagccagtctctttcatcatcaagcagacatactcaaggtaccaacacagcaaaggcacaaaatgtctctatatcagtatttttcatggtatatgtgagacccattagtgaggcatgaaatcaattctgtgagtcacaatgaacatttgtctaaaaaacaaaataaaatgtaaaataccaaagtgttttgcatgaatcctttgcctgaattgtgcacattgcaaggaatgctgaggtcaatttcaatatgcgagaggggtatttgatggaggagatatgatgaatagaatgtatattggctaagaaatggttttcagtcattgattcctgggtgtcttgcttgattttcataatagcacggttaatgttctatagtcaagttttatattacaattacttgcaactagttgtgaagtctgaaatattcgattcaattgcaaactttgagtgtagtttttgaaaagatgttatttagactgtatatttttttcttcttttttgagttagtgccaattataacattttaatcaaactggaacaaattgctattaaaatggatcatttctttattaaaagaaagaggaatagtgaagtgaaatatacagaagcatgttcaagttcatctgttgaatctggaattgtgaatagtgacaatattgagaaaaatactgactccaatctgcaaacttcaacttcatttgagccacatttcaaaaagaaaaaagtaagtgcaagacgttataatgaagattacttaaaatatggctttatcaaatgtgaaaaaccctttgaaaatgacagacctcagtgtgttatttgtaataatattcttgcgaatgaaagcttaaaaccttcgaaattaaaaaggcacttagaaactcagcatgctgaacttattgataagcctcttgaatattttcaaagaaagaaaaaagacataaagttatcaacacaatttcttagttgttctactgctgttagtgagaaagccttattatcatcatatttagttgcatatcgtgtggcaaaagagaaaatagctaacacagctgctgaaaaaattattcttccagcatgtttggatatggtgcgtacaatatttgatgataaatcagctgataaattaaaaactatacctaatgataacacagtatctcttcgaatttgtactattgcagaacatttagaaacaatgcttattactcgtttacagtctggtatagattttgcaatccagcttgatgaaagcactgatattggaagctgcacaacacttttagtttatgtcagatatgcgtggcaagatgattttttggaggattttttgtgttttttaaatttaacctcacacctaagtggattagatatttttacagaattagaaaggcgcatagttggccaatataaattaaactggaaaaactgtaaaggaattacaagtgatggcacagcaaccatgactggaaaacatagcagagtaattaaaaaattactagaagttactaataatggtgctgtgtggaatcattgttttatacatcgtgaaggtttagcatccagagaaattccacagaatctcatggaagtattgaaaaatgcagtgaaagttgttaattttattaaaggaagctcattgaatagccggcttcttgaaacattttgttcagagattggaactaatcatacccacttactatatcataccaaaattcgttggttgtctcaagggaaaatactaagcagggtttatgagctcaggaatgagattcacttttttctcattgaaaaaaaatctcatttggcaagtatttttgaagatgatacttgggtaacaaaattggcatatttaactgatatttttagcattcttaatgaactgagtttaaaactacaggggaaaaacagtgatgtattccaacatgttgaacgtatccagggatttcgaaagacattattgttatggcaagtaagacttaaaagtaatcgtcctagctattacatgtttccaagatttttgcagcatattgaagagaatattattaatgaaaacattttgaaagaaataaaattagagatattgttgcatctcacttctctgtctcaaacttttaaccatttctttccagaagaaaaatttgaaacattaagggaaaacagttgggtaaaagatccatttgcttttcgaaaccctgaatcaataattgagctaaacttggtgcctgaagaagagaatgaattattgcagcttagttcttcatatacattgaagaatgattatgaaaccttaagtttatcagcattttggatgaaggtaaaggaagactttccattgttaagtagaaagagtgtcctgctattgctaccattcacaacaactagtttgtgtgaactagggttttccatcttaacgcagttaaaaacaaaggaaagaaatgggctgaattgtgcagcagttatgcgggtagcattatcttcctgtgttccagactggaatgaacttatgaacaggcaagcacacccatcatagtaaataaaaatcttacctagcttttgtctttgtatttcttattttgaagtatttttctatgttatatttaaatggtactataatactgtgatacttttgttatgttttaatttttgttatatttaataaaattattttatgttcattgaacaaaaatttaatgaatttctgttagaggccaggaactattctagagacatttgggatacaaaagtgaacaaaacaggtaattccctagtagagtttatatcctggcaaggagaaattgacaataaacctaataaataaggtttataatatttagaagctattaagtgctatggaaagagtagtaagaaggaaggtcagggaagtactggggaaccaaaccatgaagggttctgtagaccattattgggcctctggcttttgtcagtggactagagaacagttgaagggtttaagcgaaggagagaaatgatctgagctaggttttaaaagacactctggtcactattttaaattcttagggtaagtctgaattaaatgttactttcccctcactgggc

SEQ ID NO: 1928 - DNA, 8985 bp, Homo sapiens
cttctcttcctgcaattgctctatcacttcttccctctcaagtcccgccctttcagctacctccaactgctgaggaaccggttgcctaaaaggagccggcaaaagcgcctacgtggagtccagaggagcggaagtagtcagatttgactgagagccgtaaagcgcggctggctctcgttttccggataacgactacagctccgactgtcagtgccggccttcctcgtgtgaggggatctgccggacccctgcaaattcaatttctttcccattccgggcccttccctatcgtcgcccccttcaccttggatcatgttcaagaagtaaggacatgctgtggcctccatcggctgctcacaaaggcggtggggtgggggtggggaagagggcgagagctaagatcctctttctctctcccccgcccctgccatcctgactccctaaggttttctatagtactatgctctcactcccaacttgaacacttctttaagctttccatccgtagtccttaattgggtttcagtccctccactcccattgttttttctccttacccctctttctcttttgccccctcccccaattctgtctccattcctagggttctaccaatcacatccgtgcactgtgatttagaggcatattctctgtagctgagaggggagccctgcgctcactgccatatgtttattagttatgaactgaataaaggaaggcttgacttcctgggtcatgggagtgaaggagtctgggtgacaggaagcaagcggcctgtcatgcctattgcctagctgccagattaaccttgccttgaaaataacgattgccccataggctattcagtgtaaggaagacaaaaattccttgggaacctactagtgggtttgccttccagatttggtagacgcaaaaagcaaagggggaacatgggcaaaggaaggtgggttttgtgcatgaaattttgagcaaaaacgaatagggatcttagaaatcattattatcatcacttaaaaaaaatctcagcagattacatagcctagcaggggccgattttctatgttatgcttgggttggtcttttgtatctcaagaattgagggttttgttttctgatctcaggttttattattggtgggagcctgtgtttcttcctgggtagaattgaataagattttccaggaaaggcatttgtgtagctaattacagattatggtgcaaagtatgtctcatattcctccccctaaccccagctaattgctgtatacttgacagtttatttcaatattgtattaagacattggttttgtgctggacagagtaaaagggagatggtatttttttttaaaagaacaatttatttcataattaagtatctaaatacttggttgggaataaatgactaattagaacagtacctttaggtattctgatacctctacttagaaatgccttttcttttcttgcaaaaattacttggcagatttgatgaaaaagaaaatgtgtccaactgcatccagttgaaaacttcagttattaagggtattaagaatcaattgatagagcaatttccaggtattgaaccatggcttaatcaaatcatgcctaagaaagatcctgtcaaaatagtccgatggtaagtctttgtttttgtctgtgtaaagctcggtatagctgaatatttaatgattagattgcactcatactaaatggaattattttcagattaactattgatagattaataatggggtagacacagaataactctaaaactccaatatttgtattttcaaagattttctatgtccctgaaaaaatgtggctttgtgtattgattgttctagtaaagagttaaatgttttagttcagagttggatttaatttatttcagtttgttgtttagagaattgttttattgaattacctaacaatggaattaataaaatgtgaaataaaattggttgtagcaggtaatatttttctttttttctctactggacttgcatgataggaaaaacaatgtaaacaatattttttggccaggatttttactgactttttaagaaagtttatcactgtatatgcgtgttttatattgtgaatttttgaaagaaaatatctaacttggtactttgtgacatttgtcttacagccatgaacatatagaaatccttacagtaaatggagaattactcttttttagacaaagagaagggcctttttatccaaccctaagattacttcacaaatgtaaggtttttttatttttattttttgaaattttactcctattgcaatattcaaatgtaaagtcttgtaagaaatatgcatttaatcagataagacactgctgggggagaaaaacagaaatatgcatttgggaatactgaaagacacaaaaagagtttagagtgacttctgataattgactcattatttattagtactaggtaataatggatgtaaaactaaaatgaatgcccatcttgtggtaaatctgaaaaatgcagattctctcatgcattccagaaagcccaagaaagatcatttattaattcattcaacaaatatttattgccgggcacggaggctcacgcctgtaatcccagcactttgggaggccaaggcgggtggatcacctgagatcaggagttcgagaccagcctggccaacatggtgaaaccccgtctctactaaacatacaaaagttagccgggcgtggtcacaggtgcctgtaatcccagctactcgggaggctgaggcaggagaatcacttcaacccgcgaggcggaggttgcagtgagcagagatcacgccattgcactctagcctggggaacaagagcgagacttagtctcaaaaaaaaaaaaaaaaaaaaaaagacaaatatttattgaacttactatgtgctaggcattcagctaggtgctgagaatacaatgggaagcaaagacattgtctctgtccttaagaaactaatagtctagtttggagaataaacaacaattagataattacgcaaatatgtatttacaaactgtgataagcattgtgagcattttcatcttttatatttgtatctatttgcctaatagagaaaagtctatatatgggaaagcattgactaagtgtccttccgtccaggtatttcctgtgatgtgtgtaaatgcatttttttttaaaattgggctctctgttacatagtttttaaaaattgatacgtcatagctgtacattgtctgctgttgtggtgcctgtatcccccaccacctatatatatttataatagttgtacatattttaggggtacatgtgatatttgatacctttatacagcgtgtaatgatcaaatcagggtaattagggtatctgtcacctcaaacgtttatctttgtgttgagaagattacaattcttctagctattttgaaatatagagtaaatcattgttaaatataatttccttattgtactctcgaatactagaacttatcgacctgtatttttataccccttaaccaacttctcctcatccccttgtagtttttttttaaattaacaggcttttattttttagagcagttttaggtttccagaaaaagtaagcagaaagaatagagttccctctccccagttcagattcccctatgaataacatcttgttttggaatgatacatttgtaacaattgaaccagcattgatacattattattaacgcaagtccttagtttacattagggtttactctttgtattctacagttttatggtttttcccaaatacatgtcaagtatctactgttaaagtatcatacagaatggttttactggcctaacatcctttgtgctccacctattcatccttcctccccccacttccccaaccccaggtaaccactgatctttttaatcgtttttttactctgcgtttttcacttaacattatatcacaaaaatttcccagggcatattaagtagtctccaaaaaccatagttttgaaattacggtttttggagaatacttgggatgctgaggcgggaagattgcatgagtccaagagttcaaggttattgtgaggtattgattgctccactgtactccagcctgggtggcagagcaagaccctgtctcaaaaaaacaaacaaaaaagattaccaatttggtaaacaaatgatagtgtttcagagttttcttttgtatctgtcagattaatttggggaaatactgttcagatcctttgcctttttctgttgagtcattagtcttattattaatatattgtatatcttttcttacagatccttttatcctgccacaccagcaggttgataaaggagccatcaaatttgtactcagtggagcaaatatcatgtgtccaggcttaacttctcctggagctaagctttaccctgctgcagtagataccattgttgtatccttcccaggctaaaactgctgaaaaatgtattcattgtgctcttatcattactgcgaaaggtgtaccatccaagagaacattagatgtacttttttgaaggttactgttactcttatctcatgcctttctggttacatttgaagttgtacaaagtaattttatttgttgctactaaattatctcatcttaggtcgtttcttagaagttaaatgagaacaagttacagaagagtctcagctgcatttcagcccagtcagggcctactgttatcagacttaggacacaatagggaattcttgattactaggggaaaggatatagatgatataattggatcagctttttggatatcaacttgccactgtaatgttcattttgacttactgacatacgttggagtgaaagctctcaaaagggaaaagaatttaggcaccaggtataggtatctcttaccaagcaacaattttgtgttaggagtgaatagtgggaaatattggcaacctccaacttttattttgaaaattaattatttgaaaagttgagtttgggggcctcagagcacgttttctcaaagagaaatgtcagagtcccagatggtccttaaagatcgattcaactcatgacatagctgaataattctgcattatttccatttctaccatgctgtttcagctattttctggattaaatagatttttgtgactattctggacaggagaacatcttctcctttatcatagctaaagtagccatttgcctcgggtatagaaaaggaatggtacttggtgggaatagggaaactacttttagagtgtgtttatcttattttagtttttgagatggagtctcgctctgtcgtccaagctggagtgcagtggcacgatcttgtctcactgcaacatctgcctcctgggttcaagcaattctcctgcctcagcccctcgagtagctgaggttacaggcacccactaccacgcccggctcatttttgtatttttagtagagacagggtttcaccatgttggtcaggctagtctcaaactcctgacctcaggtgatccacccgctttggcctcccaaagtgctgggattacaggtgtgagccaccacacctggccaggggtgtgtttaagaagaataagaaaaaaaaatgatattctctgttggggcagttatagcgaagaggtagtataagtagtatgtttatattctaggaacagcttatgttgacatgctttttgcctaataggtgctcacatatttggaacactgagtgaattgaaaatcaagggagaaaagtgaggacgggttttttgttgttgttgtttgtttttaatatttattaagtgttggtaaatttatagttctggagttaaccttaaatggaaaatttccttagtacctagtctttacttttaaaaataatttttattttgaaacagttacagatttagagaaagttgttaaagaaaatggtacagagaggtcttgtgtaccctgaatcttgactttttaaaatatgtactgcagtgtttaacattccagaaacttcatatgttaaccaagaccactctggtttttctagaaaggttgaaactgttatatcaggctcttaaagatagactgggaatttacctattattttaaaacagcctttacataaaaccaccattcaggccgggtgtggtggctcatgcctgtaatcccagcactttaggaggctgaggcgggcagatcacctgaggtcaggagttcgagacaagcctggccaacatgacgaaaccctgtctgtactaaaaatacaaaaattagctgggtggggtggcatgcgcctgtaatcccatctactagggaggttgaggcaggagaattgcttgaactcaggaggcagaagttgcagtgagctgagatcatgccactgcactccagccgggtgacaaagcaagactccatctcaaaaaaacaaacggccggctatggtggctcacgcctataatgccaccactttgggaggctgaggcaggcggatcatgaggtcaggagttcaagaccagcctggccaacatggtgaaatcccatctctactaaaaatacaaaaattagctgggtgtggtggcacacgcctgtagcaccagctactcgggaggctgaggcaggagaattgcttgaacccgggaggcagaggttgcaatgagccaagactgcgccattgcactccagcctgggcaacagagtgagactctgtctcaagaacaaacaaaaatccccactagtcagtgatcagaataattaatcagaacaattaatatttattgatttcacagtttttagtatttatgtgcaagaaattttactccttttttgtgtgacttattctggttttgttagcatggggttatagtattaacatttgacttgaaagaaaaggggttattagatttattcatttagcatttactgagtatttacagtgtacccacagactctgctaggtctctgctctcaaggagttaatggtctaggagaagacacaagaggggttccaagtggcttaactagtaacatgatcattatttgacacccttcccttgatggggaggccccaaggcattttgataaatagttttcttagctgtgttctttcaggctatcatggcagaaggaaaacagcatgctctatgtgttggagtcatgaagatgtctgcagaagacatgtaagtcttactttaggcccccttaacttttgatatatgggtaaccaacccaggaagcatcagaattacaggtgaaatttgctatcatgcataccacattacacaaatatccaagcacagaagcttcatttctgatatttcctaacacttaggaagccaatgaaacctattttgtcttcaggattgtagtctttcttaagcactgaaaagaacccatgtgccaacacagctgttttatatgtgtgtacgtggtactttaggaatcttatttagtatcatttaaattgggggaggagggaagatgttttactgctagcttcattttatttatttttatttttatttttttaagtttttttgagatggagtctcactctgttgcccaggctggagtgcagtggcgcgatcccgcctcactgcaacctctgcctcccaggttcaagcgattcttgtgcctcagccttccaagtagttgggattacaggtgtgcgccataatgtccagctaatttttgtatttttagtagagatggggtttcaccatgttggccaggccagtctcgaactcctgacctcaagtgatccacccacctcggcctcccaaagtgttgggattacaggtgtgagccactgcacctggtcattactgctagttttaaaaacagtgatatatctcaccaccacacagtatcttatatcctgacctggtaatacaagaaatgtagaatatttagagaactagtaaagatatattatcaaaacataggcagtatatttaaaaattttagaacccatttgatgaccaaattagtggtattaattttgtttcagggttaatgtagcactttgatattcccctagtcttgtgacattgttactctggttctatagacccactagttagatcactaaaatcacttttagatatgagctgccacagagtaatgtagtttaatataaacaacaatgtaattgtgatgtcaataagttctttacttgtggcttaataattaaaaaataacaatatactttgaattatatttatcacgagtaagactataaaaatgcataaaagtatgtttatgtgttttttttccttctacagtgagaaagtcaacaaaggaattggcattgaaaatatccattatttaaatgatgggctgtggcatatgaagacatataaatgagcctcagaaggaatgcacttgggctaaatatggatattgtgctgtatctgtgtttgtgtctgtgtgtgacagcatgaagataatgcctgtggttatgctgaataaattcaccagatgctaaaattctgttagcttcagaaattattttaagttttcttaaactcaagttaaaattgggtagcaaacttggacattaaaaggtatctggtaagtaagcaaactcatacaactaatgtcctttcttaggctaatgatataagagtgaagagcaggacttggtcaatggattgccattttatggtagacctctagagaaactgtctagttaaatggggctagaaactagactaggaattttattctattactccaggggacccagcagtgctcattctcgtgtgtgtgtgtgtgtgtgtgtgtgtatgtgtgtgtgtgtgtgtgtgtgtgttttgttgattgtttttttaaaaaaaacttcaatggaaaattctaaacatattaagaagtctggagaatagtataatggacctctccatatccatcacccagtttcagtttatggtcagtcttatttcatctatacctcaattatttctccccaccccccaattattttgaagcaaatcccagacatcctatcatttc

SEQ ID NO: 1929 - DNA, 478 bp, Homo sapiens
ctcgaggccaggagttcaagatcagtctgggcaacttagtgagaccctgcctgtctctacaaaaaattaaaattcgccaggtgtggtagtgcatgcctgtagtaccaactactccggaggctgaggcgggagggtcacttgagcctgggaagttgcaactccaatgaaccgtgatcatgccactgcactccagcctaggtgacagagtgagatgctgtctctaaaacaaaaaacaaagtgaaactcttgattggcataattttgtttctctatcagctttatttttaaaaaaattacataagtaaaacatgtctctttagctattatctcttaaatcagattaccttctgtaataattctatgggaattattctacgggagcacagtcattcacgcttgtaaccccagcactttgggatgccaaggtgggaggactgcttgagcccaggactttgcaaccagcctgagcaacatagac

SEQ ID NO: 1930 - DNA, 2092 bp, Homo sapiens
tatatattatacaaatacagtattatgtatagtacgtttatgctgttttgagcctccttgccctcatcctttgattcttgcctttttaatttcttgccagtttactatttatactgacaaaagcaacttagagtgtatacacaaaagattttataaaatcagtttatgtcctagtatttataatcccagattttataatataaaccatagaattttcaactttagtgactaaggatttttggcaaaagatatgtgatatcctttatatcctctactttatagccacacttctaatttgagtaaatcctctccttcaattttcttatagtccaatcagtgaaagtcgaagagtactacaggaatcatgtgagtttttcttaaagcacaattctaaagttaaacacaaaaagaagcactataaaccaagttcacacaagctgaaggtcatttccaaatccatgggaaccagcacaggagctacagcaaatcatggcacttctgcagtagcaattactagccatgattacctaggacaagaaactttgacagaaatccaaacctcaccagaaacatcaatgagagaggtgaaagcggacggagctagcacccccaggttaagagaacaggactgtggtgaacctgcctcgccagcagcatccatctccagactctctggggaacaggtcgacgggaagggccaggcaggcagtgtatctgaaagtgcgcggagtgaaggaaggtgagatttgattttatgtaaaatcatcactattttaaatactgcattacacattttttattaaagcataacacatttggaaagcattttgtgatatattatgtctgtactcttaccccaaggaagtttgggttcagcctataaatatgctatttagtagtttaattcttagctttgagaacagctttaatataggtggttcaagtaggaatgttcatttctgtggcaattgttaagagttccttgtacatttaagtaaatgcaatttacccaaaatacaggctaagttttaattaatactacattataattctgtctaaaaagtgtcaccttatacaaaattataatgtgtcattttatctaaaattattttattttctgaacatgaaaagatattgacattatctttaatgaattttctcaaatggccataggtgaccaaaacacaggtaagccagaatgcagacagctaattgcattaagatctcaaggttatcttacctagtcctctcagactaggctaaatgcaccttctctgtgatcctatggcagctttcatatatttggattgtaattagatacatgctttatcttctcgtagatttgtaaccttctcaatgggagagctaaagtcttactcatctttatgttcccagtttcttacatggtactgatccatggtgggaaatcaataaaacatttgttaaactgaggacaggaatcctgccttattctattccccacaagattccatgttcagccctatatatataagtagtgcttgatgaagtttctgaagtaagtgaaaattatattttaaacaattatttggccaggcacggtggctcacgcctgtaatcccagcactttgggaggccaaggtgggcagatcacaaggtcaggagatcgagaccattctggctaacatggtgaaaccccatctctactgaaaatacaaaaaattagccgggtgtggtggcacccacctgtagtcccagctactcgggaggctgaggcaggagaatcgcttgaacccaagaggtggaggttgcagtgagctgagatcacgctattattgcactccagcctagcaacagagtgagactctgtctcaaaaaaaaatatttgtattttgaagtgttaaagtacacctgaagactgttagctatttattctctgataaaggtggacactggttaggggtgaaactcatgaaaaatggcatcatatttgtgtttgtggatgtgtgtgtgtcaactttttttcttttatctaggattagtccaaagagtgatattactgacactggcctggcacagagcaacaatttgcaggtccccagttcttcagaac

SEQ ID NO: 1931 - DNA, 1031 bp, Homo sapiens
gaaactgaaagaagtagcattttggcatgatctggagctgacatacattccagaggctatatagatgatgacatctaccagtgaggctacatgactgacgtagaaactgaggttctttcgctagtctaggacaaagatgaagcttaacttcgctgatggatagaaccagactttgtcactgtttaaataatacatttttggttgttttctaaatatgaattcggttcactctgaaattagagcagttccatgagttcactgaatttatttgaacaatagtgtttgccatggtttgaatgatggtatctgctccaaaattcatgttgaaatttaaccctcaatgcaacagtgttaaaaggtgtagttggcctgtgggaggttattaaattatgacagagcttcactatcataaataggattaacgccttatgaagtggctcaaggtcgaaaggcgcaccttcttgcccttccactcttctaccctgtgaggacacagcgtttatctcttgcccttctgccatttgaagatacagtattgctcccctcagaggaggcagcaataaagtgccatgttggaagcagagagcaacccatatcagatgccagtcctgctagccccttaatcttagacttctcagtctctagaaccatgagaaataaatttgtattgtttgtaaattaccgattctatggaatttttgttacagcagcacaaatggtctgacagtgttcttctttaaaaaggaataatgttcatggatacagctctattgttcctggaattcttggggaagattctttggagttttgtggagttatatataacttactaggttgtccttgccatatttttatgatggtgagtgaacacagtatacctatgggtgagattagaataaaatagagatttttatttgtgtattacatatttagccaacatttattgtctactatatgctattctatttaaaatgttttcacttttcctgcttcttatctccttgtttccttgtacaaaaaaaaaaaaaaaa

SEQ ID NO: 1932 - DNA, 210 bp, Homo sapiens
gaaccaccagaagagccaattcatcccatcattttatttcctggttttgtttttgttaggacctttggaatgtatctgttaaatacaattaaatttggaatgcagtatttagaaaaatgtgtattcactagatctcttacaaactggtcataaactaagccttctaagagtgaggctcataaattaggatgtgttcattagttgtagaaa

SEQ ID NO: 1933 - DNA, 470 bp, Homo sapiens
agttctgtgtatgttttggcttttgttatagttgtttgaatgcatatctgtctctcctgttaggttgccagcttcttgaagaataaaattttatcagcatattttatttatattatatggacaattatatttctatatttttttgctatgccccaccatatctaattttacatatgggacctgtaagattttgatccttctcctaaaatgtttttggtaaatgctgatctcctgtgagagccacctgagtgaggaatctcagtgtgtaggaaagtgagacattctttaatgagagactggaagagtttggttgttaagtgggctcagaaaatgtctgttgtggcaagcctgtggccccatctactcaggatactgaggttggaggatcacttggacccaggagattgaggctatagtgagccatgattgcacctctgcactctagcctgggtgaaaaagtgagactgtct

SEQ ID NO: 1934 - DNA, 778 bp, Homo sapiens
gaagtatagtagaaattatagtagtttggattaatagatttaaggaggtatggtcaataatctcaaatgcctctcaagtgtgtttttgtattataagattttctaaataaaagtttctaaataaaacctaataatatttattttttaagagatagagtcttctattttgggagtggcgggtccggcagagagggatcttgctgtgttgctcatgctggagtgcagtggctattcacacatgtaatgatagtatactgcaactatgaactctagcaatgtttccagctcagcctcccacatagctgggactacaggtacatgtcaccatacctggtcataattattatttttaatgggaagcaatcgggagtcttcacttcttaatctgtctctgacattgttagctaatgtcaagtgacttcttccccaggtcatgttacctgtcagtactcaatcatcatgtacacagtaagaaattgttttatcttttcactctgaaatgcagggatagaaggaaggcatcaaaaaattaacaatggattatttcatcacaatgttaagtgcaaggtgtcggtacagcaagataatcctagatatttatttgaccttggaatgccgttaggcatatatctacttaaaaattgatgtggctgggcatagtggctcacacctgtaatcccagcactttgggaggctgaggcaggcacataacttgagctacaagttcgagaccagcctgggcaatgtgacaagaccctgtcttttcactaaaagtacc

SEQ ID NO: 1935 - DNA, 325 bp, Homo sapiens
ccttgagtgttcatatctttttttttttttttttttttttgagacggagtctcgttctgttgcccaagctggagtgcagtggcgtgatctcggctcactgccagctctgtctcctgggttcacgccattctcctgcctcagcctcccgagtagctgggactataggcacccgccaccatgcccggctaattttttttgtatttttagtagagacggggtttcaccgtgttagctaggatggtctcgatctcctgacctcgtgatctgcccgcctcggcctcccaaagtgctgggattacaggcgtgagccactgcgcccagccga

SEQ ID NO: 1936 - DNA, 404 bp, Homo sapiens
tgacaccttgactctggagctaagaggaagctgaaaaatttgttttagaaaattaagagttttgtatgcctatttaaaaacagttaaattttggtaggcccattcaatgaagatgtctcaatttaattttaatctttctttttagtattaaataagtttaaagaaatgaacttacctttgtgatgaggtgggtggtattctttggtattgtaaaggaccccttgaatgtaaagtttaggggaggggtggagaataatatgaacttacatctgcataaaatatcttgtgaaggatgcataggaaactggtaaaattctttgcctgtaggaaacttattttatatagttgtatacaaagtgattttatactgcataccctttaggaacttttgaaccatggtaatg

SEQ ID NO: 1937 - DNA, 686 bp, Homo sapiens
  SITE (6): n equals a,t,g, or c
  SITE (37): n equals a,t,g, or c
aataanacttgacattttccaaaggcaaatctcattntgcaaggagattgtggcaccatcctgtttgactctcagaaacctcttgtaattttgatgtaaaaactgtagaatgaagatgagaaaattctcgcaatgagtggatcatgacaactgtaaattagaacaatcagatttaaaccaattccgcagtcttctatatctttgtaaaagacaaatccttgatgttgtctgtgtgcaaccttttcataaactctggttttatgactagtacaaaccaccaaaaaagccatgtgatcaatagtctgtgtcctgttataacatgctgtggttgagccatcttgtttataaataatagagctctcctgaatttgtgcatagacttcttggttcctggcttttgttttttgtatcaagagattgtgatataaaacagcagaagataaatggaaaccttccattttaacttacgttgtttctggggtaatgttagacccttgaaagatgcattcaaagactgtatcttattttgcccttggctattagtgtctcacatatgtgtgtaaatgttttcctaccttctttttgctcagcaaaggcaagcaagtaaaatatatttgctaagtgattagttatgcacatttggggctagatttttttggtacttttatgtaaagaaaaagtggatt

SEQ ID NO: 1938 - DNA, 497 bp, Homo sapiens
ctccgtgagacaagagatgctctcagggaaaagacattggctttaggaagtgtacagctggacctaaggcaagcacagcatcgaataaaggaaatgaagcagatgcatccaaatggagaagctaaagaaagtcaatccattggaaagcagaactctttagaggagagaatacgtcaacaagaacttgaaaatctcttgcttgaacgacaactagaggatgctcgtaaggaaggcgataataaagagatagtcattaatatccacagagactgtcttgagaatggaaaggaagatcttctagaagaaagaaataaggaattaatgaaagaatataattatttaaaagaaaaactgcttcagtgtgaaaaagaaaaagcagaaagagaagtaagtatgaagaaaactataaacttctggaaagaaaatttaaatatttcattctggctatatgttgaacctagttcaatatacaaataaatagatgaaaatgtgtttac

SEQ ID NO: 1939 - DNA, 497 bp, Homo sapiens
ctccgtgagacaagagatgctctcagggaaaagacattggctttagaaagtgtacagctggacctaaagcaagcgcagcatcgaataaaggaaatgaagcagatgcatccaaatggggaagctaaagaaagtcaatccattggaaagcagaactcttcagaggagagaatacgtcaacgagaacttgaaaatctcttgcttgaacgacaactagaggatgctcgtaaggaaggtgataataaagagatagtcattaatatccacagagactgtcttgagaatggaaaggaagatcttctagaagaaagaaataaggaattaatgaatgaatataattatttaaaagaaaaactgcttcagtatgaaaaagaaaaagcagaaagagaagtaagtatgaagaaaactataaccttctggaaagaaaatttaaacatttcattgtggctatatgttgaacgtagttcaatataaaaataaatagatgaaaatgtgtttac

SEQ ID NO: 1940 - DNA, 284 bp, Homo sapiens
gattctcaaagttacggaaaaaagaaggatgcgatgtatggaaattttatgttgaagaaagacattgccatgctcaaagaggaattatatgcaataaaaaatgacagtctcagaaaggaaaagaaatatattcaggaaattaaaagcattacagaaataaatgctaactttgaaaagagtgtaagactcaatgaaaaaatgataacaaaaacagtggcccggtattcgcaacagcttaatgatctgaaagctgagaatgcaaggctgaattcagaattggagaa

SEQ ID NO: 1941 - DNA, 551 bp, Homo sapiens
agctgttttagtaaaccaaaaaagtgtttactatatcagcttggaaacatgctttgtttccaggagataaaaggtagagctgacaagatgctttcctttgagtaaagacattatgtcacctatgaaatgttagtagatgcagagcaatgctgataaggtgtgtagtcttagactactgaaataagaaatgtaacgtcttcatgttgccgcattttaagagcataatgaagcaggtaagtggaaatgcttgtacctgaaatgtgtattttgaaaatcagattcaattaagtgagctgctttgacacttaattctagattttccagatgaactgaagtgtgttgctgtgtcttgtgatgcttttccttcagtggctctctcttatatgtattttagttggtgtaactttgttttgattcatgccaatgtgacttaagtctgaaaatatgtcagtctcacattatgtatttttctgaccacttagtattttaaagacttctacttgttataaaatcacaatttggaataaatgtggtaaattttagcaaaaaaa

SEQ ID NO: 1942 - DNA, 284 bp, Homo sapiens
gattctcaaagttatggaaaaaagaaggatgagatgtttggaaattttatgttgaagagagacattgccatgctcaaagaggaattatatgcaataaaaaatgacagtctcagaaaggaaaagaaatatattcaggaaattaaaagtattacagaaataaatgctaactttgaaaagagtgtaagactcaatgaagaaatgataacaaaaaaagtggcccagtattcgcaacagcttaatgatctgaaagctgagaatgcaaggctgaattcaaaattggagaa

SEQ ID NO: 1943 - DNA, 19334 bp, Homo sapiens
catcttactccaaagggtttattgagacaagttttcacatacaagatggggacagaggggttggggcttataaacaggaacctggaaggggaccgagggtgcagggtagaaccaaacaagagagtgaaataaatagagggaaagagtggagacagggaggagactgactgagaccatcacacagtgataatgcgggtggggcggcgccatgaaaatcccgttatttatacagatatacagggagttcagggggacccgaggcccactccaccctccatgccccagggaggggcacaagaaagccgtctctacccatgggcgaccccatggggcgctgggagggctgccctaggagtgttgggcaatccctggcctggaagccttggttagtgtctggaaagcagtggagagggccggaggggaggggcagccaggccggggctcagctctgaggctcccggctgccaccctttctcccagcacagctcctgcccaggtctgggaggatgggggatgggggagcaggagctcaaggggagaacctggcaccttctggagtcttggaaaaactgatccctaaagacacccggccctggctgtgctgccctctggaaagcagctctgataccaggagcggctgtcagggcacagggggaaaccccgaggccatcctcgggggtgattcctgaaaggggcccatccccaggctggatgcttggggaaggcagccgttggggagggattcctggggaaagggccgttagcaccaccaggctccacggcaaacagacagaggccaggcctctgcacctccagcgaggctgggagtcccctgcgggaaagagaagggaggggagactgagccgccgcctctagggcgcctctaaggcctcaacccctcccctgcatgcccagggctcccccagtgattctcacaggacgcccctgactggactgcggggctcagcacacctggcagtactaggcatgggcgtgcagagactcagaatgcggggtttctgccctcacctcagccccacctgcccggccctacaccccagccagcgtggcggccagggcagggccaggtgggcatcatacgaagaccttggccagggcatcagcgccagcactggcaatgagggccttgctggggtggcaggcaacagcgtggatggcctcctcatgcttcttgcggtgggccgtgatctcctgcacgcacgttttgttgtccaggctccagagacgcagggagcagtcatggcctgcacatgtgtcggggacagaaggggtggtcactgggctcctcgctcagacgcagccctggaacccctcacctggccttgtccaaaggcctcaggggaagtggggctcaactctcctctctcaccctctgctcatcacctcctgtggcccgcccaaaggagaaccctggtcccctcctgtccacagtccatctcatcccccagcatttcttgagcagctactgcacactgagccccagggcggcaggggcagtgaacaaaacaggcaactctccctgccccgcagcattgacgctgcagctgggcaacaggaagagaaagaagaaagcaacccagccggtcagtgtgaggacagaatggccccaggaggaatgcagggagccttccaggcagaaggacaggcgggaaaggtcctgaggcaggaggtgggggtggccacaagagccttagcaggggcttggggagaagaggggagaggacggcaggctgggcagggccctggcgaggagaagtttaatttagggtcaagaggatcaggcagggcaaaggctcagctccctccactgtctagtggcccccagaatagagccctgtctgggcactgggctggagctcactgaccagcccctcacccaccagaggctgccagcacaggcccggaggcagagcccagccacagcctccaacaccacggcctgcgcctctgtgcacacacactcactgctgcactcactgcaggcctcacccttcacccccacagcgacctccagtctccttctccacccacccacgtcacactccatcccttctaagcacagccacgttgctggcctcaatgcccttatccagagacaacagggtgggagcacagaagtcccacgggtacccccaggtagacctggactgatgttacagagcttcaatggccaagttacaaagcgtctgggcatcagggcccacatctgtaaactggggatcaaagtaccaaccgcacaggctgcttagaggccgaatgagacgatgcagctccagtgacccagaggagggccccagcggactgtgctgccccctatggtcaccacggtcattcccgcccagaccagcctcccccagccctggcccccggggccccctgagcacttgcctggagccagtgcccaggcctcttcctccccttctccccaaccctggtgggactagtgtgctcaacttacttcctgacatcaggaatgcgccgttggggtccacggctaggcaggtgactgcgtccaggtgtgcaaccatggagtgcaccggcttacctgaggcgagaagggcgggtggcaggttcccctcccactctgggcctcgcctgagagagtgaaaggactggacgagagactcccagagcctcccacagggacgcaagcatctctgctgcctgcctctggccctccccacccactacgagcacaaggggctaggcctcacctgtccgattgtccaggaagcggatgcccctgtcgtcgtgggcggtgatggtgagaggctggtttggatgactcaccacttggttgatctgggttggacctgaaggaaaacgcaggaagagggaaggatgtcaagcagaaaatcaggaagaccagaacagaggcacaagcgcagcgtgacagcccctacaccagcctctgcctggatgtcgaggggggctgggcgagggcactccggtccccgaccgcagcgctggttctgcacaagcagcccctgggccctgttttggggcgggggaagaggaataacaaacatgaacacattccgccactctaccaagagggcccgacggggcggccctgacgcgctctccccactcagccccgccagtgccctggctgtgagggccgggggccctccactgggacccaacttccttcctgctcagggcctgagggtgcaggggagtcatctgagctgactgacaaggggtcgccaaagccccaggaggaagtggggcccagaagacactgagaccaattccatgagctgatgtcagcccccttaccgctgctgccccgggactccagcgtgaggagggcactgccaacctccatgtcatacaagacggtgtcgccagagcggaaggaggccacgatgtgggcaggctcggtgctggtgaaggccactgaggtggggaccccgtgctctgagggcacagggaagagaaggctgctgaatggaccctcagacccagccctgccccagggtgggggacagtgggtgggaggcctggggcctcagcaggaaccactctgatagcctccagatcccgcacagctccagggtgaggcaccggggcccccactcaccgctggctgtggggaaggtgcagaggcaggccgggctgctgctgctggggtcccagatgcggacggtgccatcagcagaacaggaggccaggcgctgggaggtgggactgaaggccaggccccacacggcgtccccgtggccctccaggacgtggctcagcacgcttgggtctgcacccaccgcagggaggaaatgggctgtgtcagggctgccagctcctccctggacagcccagagccccagctctgccaagccccaggcagctgggctccaatcacccacgcacccacttcacacctggtgcccctcggaactgtccactgccaggacagcccggcagctgctcacactgcccactagctctccaaggaaggttctagggctccagaaggcagggatttccctctattcacagctgtctccccaagcagggcccagaaactgggagctcaatacagaatttttcgggctccattaaggaagaaggaacagcatggttctgtggccccaggagcggcacgcagcctgtgctggacaagggttggtcccaaccctggcccgagcagtcttttcagcccatggccaagtgcatgggctttgcctggtctctccaaagccccctggtcattcagaggtccaatcactgcttccctggttgctggagtccacaccagcagctctggcctgctgacaccgaaagtgtggtggctaatgtagctgggaccgatcctgaccttgtgcaggtgagcctgttctctaaagtctgtcctccccttgagaggagacaaagacctctgaactctgcccagacaaggtggagcacagggccaggtgcatgatcaaggaggcagagccgggcgcagtggctcatgcctgcaatcccagcactttgggaggccaaggtgggtggatcacctgaggtccggagttcaagaccagcctggtcaacgtggtgcaaccctgtctctaccaaaaatacaaaaaatagctggatatggtggtgcgtgcctgtaatcccagctactcgggaggctgaggcacgagaatcacttgaacccaggaggtagaggttgcagtaagccaagatcacgccactgcattccagcctgggtgacagagtgagactctttgtctcaaaaaaaaaaaaaaaaaaaaaggcagagaacagggggacagatgttgaacagaagtgacagtctggtcacttccctacttaggtcttagatgctccaaagagaaagccccaacgcgctccagcctggcccagctaactccaccttctctgctttctctggacatgccctcccctcaaccacgcagagaccctggcggatccccacacacagagtacacggcatggcagagcagaggctgccagggccagccacgcctgtgcatgggctgctcccagcctgggctgcctcagcactgccttttggacgccggctcacagagattctcaggcagcttcaccacctcctcccacagccatcattcccatcccggctggctcgtcccttggccacgcgctgcatcgcgctgctcacaacagagcagacaggggagccgtcacacgcactcttgaggcctgcagtgttggcaagaggtggacgcgacgtgtgtgtgcgtggaggggacggccaggccccagtggatgtgaggggaaggcgggaggcgttgtcctcaccgtagccatcatagggatccatgctgaggtctggaatcttccaactatggatgcaggcatctgccccgccactgtagcagtattcactgttgctgcccatagccacagccaacactgggcccctggaagggacaaatatgtggaaagggggatgagacaagctcagggcctcccctggccacaggacctaagttccctactagcattcttcaaggatggccaaaaggaattcagtgactggggctctggccatgctacctggacaagctgcctgtcccctgccctcccccaccccacctccatctcctcccctgaagggctgtgctgagtaccagctgccagggcatgtgaaagtcagcatggagccccaagaaccagggctgtgtatatcatgaagggggcggggactcagagccccctgctgtcctgcctcctgccgtgggcctcccgcgatggcagtgagcaggtcaggagtcaggctgcatttaggacgagtttctagcaggctcaggggcacctccctacctgtgagcccggaaagcatgtataggttccacatctagcgccgcattcctgtgggatgacagaggagcctgatgtcactgagaccctgtcacccccgtccccagatgcccctgcccccggctctgagcttgctgccctcacttcttggccgtgaccgccttctgcaggttccagagcttgagcgtgccgtcctcggaggcggtgagcagagccgactggctgtggtggaaggccagggaacgaatgccgtcgtagtgcgagcgcagggtgaacttggggttccacgtcttcttaaaagcatctttgctgtcagacagctggggttggggggagctgcctcagtgtcttcgcatccatcccagcagtcatgcagacaccgacacccagggcttgaggccccctgtcttccacccacatgaccctggcaggaatgccctcagagcctgggctccagccgggaactctccccttcctctgctgggcagagtctccatgctcgcccaacaagtccccacactgcgctgggttctggagagacaaaggtgagcctgaccccttggggtcttgcagttgagaggaaggggaatgggggacacaactggaccatcccacaagtgtgcaggatcatcagccatgagcagggcaatgaattaaagatgcacagagagacatcaggcagcctgccctcctccctgggggccactgaggctttcctgaggaagcacgagccagcaggacttcacaagataaggagagggccctggagagggaaagggcccgtgcagaggccctgaggcagcaagggcgagcccaggcctgagaggtcagtggtacaggctgcaggaggcaaggagagtggcaggggatgagacaggtgctgggtggtgagccccggaggaatgcgcatttcatcctaagaaaaagcctcagagaaacaaggagccggggaagtgtttagagcaggggaacgacatggcttgttcctgccacccctgagaggctcagattaggggcaggtaaaagtagccacagacggggcacagtggctcacgcctgtaatcccagaactttgggaggccaaggcagaacgatcatttgaccccaggagttcgagaccagcctgggtaacatagggagatcccctcaaggagcaaaaaaaaaaaaaaaggtagcctcagagaaagaggttgagaggccaggaagtcccaggggagatgagggcatggagaccagacacgtgaccatgaaggggaggcagtgcacaagtgggagagctgtgggggcctctgtccaccacgctgcatgcgccctggtgccgctcacccagcaggggacccggagagggccaggttccggagagatgacgagcagagtaccaggcaagcctcagcaccatgccccaagatgggctcccagctgacgtccctgccttagctgtcccttctgccacagttctttagggtcagaggatctgctactgtgtggttcactcaccccctcccctagcggggctcagaacactgcacttccccaagatgaaatgacatcttggggcgtgcagagggaccccatggcacactccacttctcaggcctctgctctgaccccccttcctgaatctcacagcagtccccacccagccttactagggtcaccaacactggaaatcccattctgtcacagtaaaatgtgcacatacacccacaccaaaagctcccagctggccaaaggctcccagctggccaaaggctcccagatggccagaggcccgtccactgaggcccggaacatttcatttcagcccagctgcccattcacactagattggcctgacttggcagagcagggggtggctacaggtcatcttcctgcattccaaatcaccagggtgggaggggcagagtggaggagccgtggaactgtgattaaaacacaggctccagagtcttccaggccctgcgccttggcgaccgcagtcaagtccctccactgtctacatctgcacccctctgtgaaacaggatgagcagggcacgggcggcacccagtcagagcttgcaggggctggccctgggcgcaatgccaatggggacagtgtggggggcacccggagaacttacatcgcagctgaggtcgttgtcgttggtgacggtgagatctgccaagtcccccaggctcacctccccgcccccgatagtgtccatgatgaagacgtctgaggagaagccaaaggaacctggtagggggaggggagggaggggcagagagggccagggagagagagaatgacagagagaggcagagaaagagataaagagcaagagagagagacggggagaggacaagatgaagaatcacagctggaaagagacagagagacagacagggcaggacagacaaaaagagagggagacagacagacagacgaactttggggcagggaggctgcaaactggaggctgggcctcgaccctgaagacacagaagccctgggctcagctttgcagcctccctctgccatgggcccgcaggactgggaccaggtggggggtgcctcttaccttcatgtggccggggctggggtgtgccaggaggcgggccagtcacttttgggggcagcccatccacatcccgcaggtcagccagaatgccttggagtttgacccgacggctttctgcagggtcgaggcatagggccggagtcacccagcagttccaacccagtctggcataggtgacgccttccccacactgagggccccctgccactctgtggggctgtgaagctctggccctgggggagggggggaatgggcagaggagaggaggttgattgggcccctccgtggggcagtgggcaggtcactgccttgcctaggcctcaggccccagccacccatcccacgtatcctgagagccctcctagctaggagtcacaggacagggaggaagatgcggccctcccacctgcctctccccgactgggtcctcatcctgttccctccttgaggccagccagagctggacgcccgccctggagggctggcggccccacttcaggaagagccaggactgcctgcgtctccatggggattttccagggaaggggtgaggggccggcggccatgacctgggcctcctgctctccttggctaccctcctctcaggaaacatatccgtccggtagagagaccctgtacaggaagcagctgcgggcagctgagcctgctcccaccccctcggtggggaaggcaagcgggggctggccagaaaacgtcagctcacccagctcatgggggctcccatccacagtgcaccgccgagggtctggagccccttccccatcctctcctgagcccaggaaatcaaactcattgatagcatcctcagagtcgtcttcctcatcctcgtcttccatttcgggcaccagagccttggatgggagctggcacatggagaaagccagacaagtcagggggcctcttgtccagagactaagccacctccgtgcctaggaacaggtaagccggggctctgggcccgtttctgttcatggggctgcctcagccgccagccagctgccctggagcgccccctgctgggccttggacagctgctaccactagggccggttggcctgaccccaccctcacgcagtccttcccctagccagggctcagcctgctccagtcccccagcaaggtgcctcggatgaagaaaagtcagataatgcaacaatctgcctgcagggagggcagatatgcactggtgtccgtgtgtgaatatacggaggtgcaaacaagtgaggatgaatggaccacagcattgcagcgataaacacagcaccagcagccgtgctggcacaagagcaaattccactcactgaatgaccactgactacccctcgcagacacgacttcacttaacccccaaccctgcgaacagctaccgtgaacactgtcattatcattcccacattacaggccaggagacaggctgagcagcaggaacccacttgccctaggtcaccaaggccaagctctgcccactgtgaactcctccagggcgtggctgaccccttccacatgtcagccccccaggctgagtttggcgacacctctcgggcaccagtgaggggccagcctctgacctgcatgggggggaccagagggaaggggcatggagaagacctagggccaaggtttattcaacacttgtgcaaagaatggggaaggggagggtttagacagcatgcccagaaaggcagcggccgggctcaggactccagaggagagaaccaccacaggtgctctgaggggcacacgagtggcaattgtgctctgccaacagtgcctggaaccatgagggctccaccactaccaagtgccaccagcgccactaacacctactgagcacttgggggacagccaccatgcagctgagggcttcctgggcaccagctcattctaattaaatcctcaacaactcagacggagggactcagccccatctaaagggtgaggagactgaagccaagacaaagaagtgtgggcccgaactcacgcagctgggccagggccccctgggagccatgggcagtcccctgggttcccagctgggcctcgatggagggctgctgcgtagagacagagagccctacccaaccagccagcccaagggtgtgggcccgaaggggtgcaaacaccacggatgattcctgatggaatgggtggaggggtggaaaaggactagaaattctcagaggggtgggaaggaccaagcgtctggaccaggggccagcatttgagaccctggactcagccctcctgctcttcctctaggcctcctgcagtgctgcggctccgtgcacaccactctacttggggtgcgactctgtgctgagccacactggggatactggagatgcagtggaggcccacacaggcccagtccctcccagggagaggtcaggaggaatacagaccagacagggaggaccccagagtggccagggccagggaagggagcccagggtgagtcagagaaggcttcctggaggagggggtgtctgagctgagtctaaaggaggaaagaaaggggacctaggcaaagggacccgctaatgggaagcccggggctcagggaaagctccgaggccatctgccacaggtgcctccttcataggcacatgcccctgcctccaccacaacgcgtccttctgcacatgactatttacaaggccgctgctggccacaagctcctccaggccagggcctgtgtgtctccatatccctgctgccagcacacaccgcagcccctgaaggcccaggctgactcggaagggcttcgatcaggtcacacccaggccaggctgtgcagggcatggaggaagggctcaccttcacacgctgcttcttgtgctgcacgctgtccagctcatcgtcctcgtcgctgtcttcgtcctcgcagttctgcaggaaggggatctgccccagcactgagccgcccaagcgctctttgccatctttgcctgccgcgttcctgccaaagacagcagagcagaggaggcatgagtcctggcaggtgtcaaagctcagataggaaggtgccctcccaggcttggtggccagagcccagacccagctaaccccctaacccctgagcagccttgactctggtcacacacagagccccaaccccagcctctgcccaacaaatgctcattccaactggaagcctcactcagaccgcaaacggggcccagctcctcaatgaccgccgacctgagtttcagagggccagcccccaaccctggtcacaaatctccatcctgtgctgagtcagaaggaaagctggatgagaaagtgccactgactcagcagtccccattcccacagcccagtcagaccacaagggcaggtcaggcaggaggcaaacacgccctgcaggaaagaggaaccggccattctacaaatgctctgggaggcgccgaaagccagccagcctcgcgcaagcaggggcgccggcgatccctgctacccaggagcctgcactatccccagcaacagatggcactcctccttccacctcctggcttccaacttcatgacaagttatagcagaggaggtactgacccagcctgactgcgggagaaggcagggtgcaattccaagtgcagatcgacgaaaacgtcccccctttctgccatcaggttgatgccctggaggtcttgtcaactgccagttaccaacgggtgcagaggtcactgcagatgtaccctctcgcctcacggctaccatcaccagagctccactccatcctcagaacactcgctgcacttgcagcgggacacaggactccattctcaccggccttcctcccacaacgacactgacacgccgcacaggctcagcctctttctcagcttcctcctcctgttcctccctccagcctctaagtgggagagcacccgggcagtccccagatctcttctctgcgtcatctacactcactcctgcaggcactgcagacggccatggctttccaaagaatgcccatgtgcttgttcaactagacctatgtttaggggccaaatgccccgcagctccagacgagctctgcttctccacatgggggtaaacaggcccctcacacttcacacaacctcggcggcccccagaacttccactcccaggcttccccgtctcaggggatgctgctccaatggctcacaccaaaccctggagtcgctcgtttcttttcctctccccttagctgcagtccttcagtgtcgactgcctgaaagcctctggggaagctgacacctctcgcctcaccaccgctaaagtccatcagctctgtcccagacatcgagccatctcctaactggtccgcctgcctcctctgtgaccctcccacacctctccttctcagagtggatcaggtacgtcagattatgtcaccccgctgctcgaaagcactggcttcccacaaccctgagtcaaactcagactctatcccagcccaaggccctgagtggctgactcctgagaccacaacctccccgcagcccacgcctcactgcctgcggccatgccggcctcgtgctgcttctgtgcaggctgcgtctctcctgcctctggacctcggggttcactgtgccctctgcctagaacattctcctcccagccactcgtgtggcttaccctccatttaatgcccacagaggccctccctgcccaccccctgcagaggagcacatattggccctcgtggtctccatcgtgcttagcatcacctacgtggcctcacttgttctgcttaactgacaattgctgatgagagtgaacaagccagagattcctgagggtggcgaccacgtgtgctccactccctgctggcgaggcacccagggtgtgccttcggtaagcaccccactcgaccgagaagcgggcaggcctgagtatcaggacgggggcagggctggagatgaggccatggcgaagtgtgtggagggaacccaggacagaatccgggggatcccagcagtgaagggactcagggtttcagaacaagggagcccacggcatactccaggaggaggggccgccagggcacccagcgccatcagctgacactctgaccctggccttcaccagcagtcaggaggaacagagagacacacctgccatgtccacgggctcacctctttatctgctcctcgatctgtttcaccagcagcgactccccaccactgagccctgcagggcctggtggagccctgggggccccttcactcggctccactgccccgttgagctccagcgagcggcccagcagggaacggacgcgcttggaccgcatgtcgaggatggtgtctgtgtagcccacctcttccaggtacctgcaggggtgcagagccacgtgggtcagacatcccctgggcttcttcatgtaccacaggggccaatgcaaaccgagacaacctcttaaggggccacttaagagcatacaccaaaatctgacataagcacaccctcgctccagcagttccccgtcaaggctatttccagtggaagcccttgtacacacacacaatgctatgtgtgagggtgctccctgcactgctgtatggggaagccgaagcacagggaccagcctcagcacccaccgacaggggctgtgtcagcaaatgactcatagcgctgcaaggcagaagatcaacagggcagagccttaagggaagctggccacggtaaacagcagaacgaaaacgctaagttctatgatccacatgatgccaatgtttgtagaaaaaaacaaaaaggcgttaatgtgcataaagcttacaccacacgcaaacacacgtttgtattatgtcccccaagaggcctagaaagatccataaaaaacataacagcagtgacctctggagaatgggattaggggcgtaagaggaacttttgcaacttactctacttacttctacaaatgagcacttattacttctgcaatttaaaaactgaagccagctgggactggactaaaagtaaaaaaagaagaaggaaaaaagaacaaaaatcaatttggggtatctgtggcttcaaaatacagcgacaacagtcccttgctactcctcaggaggcttcctggccaggccgcctttgccgttccctgtcccttcgcagctctgaccctgtctcttgaatgttaggctgcacgcacctgcatgtacgtctcatcctgtgcgcctgtgtgtgtctgaggctcctatctccccaccaaaagagagacagggaagcacggggctttaaagctgggcactgggggcagattgcccaagatcccacaaattaaccatgcaaccttgtgtaaacagatcacctcaccgcatgccagttttcttatgaggggaacactagcattataccacacagagatctcagtgaggagccaacaggtggaaaatgtttagcacagtgccaggcacgtaataggtacttggtaagtgtagcctgttagtattactattattgttttagggttattgtttgcacacactttaagctagcaaccccacttccagatatctaacttgaggaaatcaaggatatgcacaaataccttcctgatttttatcacactgtctataatacaaaaaaattaaaagcaaccttgacaaaatacaaggaactgaccatggagagttatggttatctatatgacagacattatatgttgggtttttttcctccataggaccaaaggaaggaaattatgaggtcttcaaagtgatgcaacataactaattaatatggagagatgttcgtaactcttttttgttgttgttaagacagactcttgctctgtcgcccaggctggagtgcagtggcacgatctcggctcactgcaagctccgtctcccgggttcacgccattctcctgcctcagcctcccgagtagctgggactacaggcacccgccaccaagcccggctaattttttgtatttttagtagagacggggttttgccgtgttagccaggatggtctcgatctcctgaccttgtgatctgcccgcctcggcctcccaaagtgctgggattacaggcatgagctactgcacccggccgatgtttgcaactctttaacagtgaaaacaaatcccagcttttataaaatatataagctgggctgggcgcggtggctcacacctgtaatcccagcagtttgggaggccaaggcaggtggatcacttgagctcgggtgttcaagaccagcttggccaacatggtaaaacgctgtctttactaaaaatacaaaaattagccaggtgtggtggcacacacctgtaatcccagctacttgggaggctgaagcacgagaatcacttgaacccgggaggcagaggttgcagtgagccgagattatgccactgcactccactctgggtgaaagagcaagactctgtctcaaaacattaaaaaataaataaataaataagtaaatgaaatacataaactgagcagtgtggctcatgcctgttgtcccagctactcaagaggctgaggcaggagatcacttgagctcagatcaagcctgctgtgggctctgactgcaccactgtactccagcctgggagacagagtgagtttatttatttattaagataacagaggcaaaaatacacagccacggaagaaactgagaccatatatggcaaaatgtttataggggtatgaaatttcttgggtggagaaattatgagtgatttttctctctgctctcctatattttctaagttttctaaaatgcacaaatctcttcagcaattaaaaaataataatttgaggctgggcgcggtggctcacacctataatcccagcactttgggaggccaaggcaggcggatcacctgaggtcaggagttcaagaccagcatggccaacatggtgaaaccctgtctttactaaaaatacaaaattagctaggcatggtggtgcacgcctgtaatcccagctactagggaggctgaggcaggagaatcgcttgaacccgggaggcagaggttgcagtgagccgagatcgcaccactgcactccagcctgggcaacaagagcgaaactctgtctcaaataataataataatgataataatttggccaggcgcagtggctcatgcctgtaatcccagcactttgggaggccgaggcaggcggatcacttgagctcaggagtttgagaccagcctggccaacatgctgaaaccccatctctactaaaaaatacaaaaattagccgggtgtgatggcacctgcctgtaatcccagctactcagaaggctgaggcaggagaatcgtctgaggtggatggaggcagaggttgcagtgagctgagatcgtgccactgcactgcagcctgggcaacggagcagaaactgtctcaaaaaataataataaataataataacattaagaatttgctggtccaaacatggtgagttactgtgatgattcacagttgattacagacctacttacagatctgccttctccccacttcccactactgtatttgattagtctttaaataaataattaacaaataaaaaataatttaatattacccttgggaaataaaaagccatgcttcataaatcttcacaaggtatctaaaaaaaaaaaaaaaagccacacagggctcctatggccactgagacaaaaaaaaaaaaaaaaaaaaaagccacagaggcattcagggacacattccaacaggggtgtccccacgtttgcctcctgcagcgggtttccctccctttccccaggccaggctccgcccacagggtgaaagccattccagccatggctggctaaaatcctgatagttcagcatccccagtggggacggaaaaggactgtggagtctttggacttatctctcaagccaaacgtgtcacgtgtccccagcccccctccccgagcacactcactgtcggagaagctgccgcccctccttccacaccaacgggctgttctccagggtgaccgattccacggggccattggagactggcgggtgagagaacggaggctgtcttaagtcaggccactgccacctacccatcacctcctccatcttcctcacccctccaacccaaatcggtcactgtcgcaggtcctgtggcatcacttcctgagtgttggaaccctgctctcttcccttactcggggattcctcctccttgaagcgttcctcatctctaggtctcctgactggtggttccccaaactggcccccgacaagataagggtgttatctcaaaaccagaaagctggcctggttctgagagaagggccgactgggttcaagcccagctctgccccatcccagctgtgtgaccctgagttagtgtaagccgtgtcagtttcgtcctctgagaaatgagcttaatgataacagcatctccctcttgggagtgctgagaggatgcaatgagataatttgcttagtattttattcaagtctttcctgggcatctacgctgtgcctggccaggggcctgggctacatgggtaaacaaagacctgcccttgtggaacttccgttctagtgagaggagctggcagcaggtaatgaccatcactatcagctgagcacacaaggtcttctcagcttgcctcggccaagcttccccctcacccagcccgccctcccacatcctctgccctacactgtttgcccaggcacactgaccgactccctgtcccctaaccctttcagcgtgcgtctctgtatctgtgctctctcccctgactctcctgctggggaacggagtcatctttcaaggagcttagactctaagggaccagagggtagagaccatgtctcccgtgctctctgctgtattcctgatctgtgatacaaagcctgtaccctacaaataaagtcttttttggatgaacgattgaacggcaaccctgttcaaacgccacctcctcagtgacgtcttccccggctttcccgcaccgtccccagcactctataaatagccctggcgcccactcctcgcaaagggatcccgtgagctgctcgtgtgtctgcctctgttgcacagggggacccaagcaggactggcccccagggtccagcacgggacctggcagcccatagggagggctctgagagtgagattccgcccctgcccagccccggggccgattctgccttctaaggagcgaagtgagaaagaggcaccccatcttcctgcttctccagaacactcagcttctgcgggagggtgccgacagtgcgagcatcagagggtgggtaccttgttctgacacatctgctttcttctccccctggttcaggtctgtcccaaacttcagtttatgatatttggccctaaaagacaaatgattaatgaataagaggtgcgggagagtagacagggtcagtagttacctaaggaatccagaatcccaaaccccaaatcacagggcctcccccagctcgtctactactgaggctgaagcatccccccacacccctggcctggtggaagaaaccactccctggagtcaggcaacctaggttgctctcaggggtccttgaggaaaccatcagcccttgaaaccccagttccttatctgaaacagggctaacaatacccgttaggctattggaaggtataagggataacggaggtaaggactatacgatatttggcgcacagtgggccactagcatcgtgaatatcgttcctggtgtctaacccaaatcccacctactctgtcctgtttctcccctagaatcttatggtactggaatgatggaaaagaatgtcgaccccaaatctcccttagctggaaggaggcgtggctggtggcctcctgacactgtgcttgagacggacccagaaggcaggcccagggcaggatgaaggctcacctttcctgcttcagcgcatactctagcatcttgatccgccgcaccaggtccgtctttagattctcc

SEQ ID NO: 1944 - DNA, 19345 bp, Homo sapiens
catcttactccaaagggtttattgagacaagttttcacatacaagatggggacagaggggttggggcttataaacaggaacctggaaggggaccgagggtgcagggtagaaccaaacaagagagtgaaataaatagagggaaagagtggagacagggaggagactgactgagaccatcacacagtgataatgcgggtggggcggcgccatgaaaatcccgttatttatacagatatacagggagttcagggggacccgaggcccactccaccctccatgccccagggaggggcacaagaaagccgtctctacccatgggcgaccccatggggcgctgggagggctgccctaggagtgttgggcaatccctggcctggaagccttggttagtgtctggaaagcagtggagagggccggaggggaggggcagccaggccggggctcagctctgaggctcccggctgccaccctttctcccagcacagctcctgcccaggtctgggaggatgggggatgggggagcaggagctcaaggggagaacctggcaccttctggagtcttggaaaaactgatccctaaagacacccggccctggctgtgctgccctctggaaagcagctctgataccaggagcggctgtcagggcacagggggaaaccccgaggccatcctcgggggtgattcctgaaaggggcccatccccaggctggatgcttggggaaggcagccgttggggagggattcctggggaaagggccgttagcaccaccaggctccatggcaaacagacagaggccaggcctctgcacctccagcgaggctgggagtcccctgcgggaaagagaagggaggggagactgagccgccgcctctagggcgcctctaaggcctcaacccctcccctgcatgcccagggctcccccagtgattctcacaggacgcccctgactggactgcggggctcagcacacctggcagtactaggcatgggcgtgcagagactcagaatgcggggtttctgccctcacctcagccccacctgcccggccctacaccccagccagcgtggcggccagggcagggccaggtgggcatcatacgaagaccttggccagggcatcagcgccagcactggcaatgagggccttgctggggtggcaggcaacagcgtggatggcctcctcgtgcttcttgcggtgggccgtgatctcctgcacgcacgttttgttgtccaggctccagagacgcagggagcagtcatggcctgcacatgtgtcggggacagaaggggtggtcactgggctcctcgctcagacgcagccctggaacccctcacctggccttgtccaaaggcctcaggggaagtggggctcaactctcctctctcaccctctgctcatcacctcctgtggcccgcccaaaggagaaccctggtcccctcctgtccacagtccatctcatcccccagcatttcttgagcagctactgcacactgagccccagggcggcaggggcagtgaacaaaacaggcaactctccctgccccgcagcactgacgctgcagctgggcaacaggaagagaaagaagaaagcaacccagccggtcagtgtgaggacagaatggccccaggaggaatgcagggagccttccaggcagaaggacaggcgggaaaggtcctgaggcaggaggtgggggtggccacaagagccttagcagggacttggggagaagaggggagaggacggcaggctgggcagggccctggcgaggagaagtttaatttagggtcaagaggatcaggcagggcaaaggctcagctccctccactgtctagtggcccccagaatagagccctgtctgggcactgggctggagctcactgaccagcccctcacccaccagaggctgccagcacaggcccggaggcagagcccagccacagcctccaacaccacggcctgcgcctctgtgcacacacactcactgctgcactcactgcaggcctcacccttcacccccacagcgacctccagtctccttctccacccacccacgtcacactccatcccttctaagcacagccacgttgctggcctcaatgcccttatccagagacaacagggtgggagcacagaagtcccacgggtacccccaggtagacctggactgatgttacagagcttcaatggccaagttacaaagcgtctgggcatcagggcccacatctgtaaactggggatcaaagtaccaaccgcacaggctgcttagaggccgaatgagacgatgcagctccagtgacccagaggagggccccagcggactgtgctgccccctatggtcaccacggtcattcccgcccagaccagcctcccccagccctggcccccggggccccctgagcacttgcctggagccagtgcccaggcctcttcctccccttctccccaaccctggtgggactagtgtgctcaacttacttcctgacatcaggaatgcgccgttggggtccacggctaggcaggtgactgcgtccaggtgtgcaaccatggagtgcaccggcttacctgaggcgagaagggcgggtggcaggttcccctcccactctgggcctcgcctgagagagtgaaaggactggacgagagactcccagagcctcccacagggacgcaagcatctctgctgcctgcctctggccctccccacccactacgagcacaaggggctaggcctcacctgtccgattgtccaggaagcggatgcccctgtcgtcgtgggcggtgatggtgagaggctggtttggatgactcaccacttggttgatctgggttggacctgaaggaaaacgcaggaagagggaaggatgtcaagcagaaaatcaggaagaccagaacagaggcacaagcgcagcgtgacagcccctacaccagcctctgcctggatgtcgaggggggctgggcgagggcactccggtccccgaccgcagcgctggttctgcacaagcagcccctgggccctgttttggggcgggggaagaggaataacaaacatgaacacattccgccactctaccaagagggcccgacggggcggccctgacgcgctctccccactcagccccgccagtgccctggctgtgagggccgggggccctccactgggacccaacttccttcctgctcagggcctgagggtgcaggggagtcatctgagctgactgacaaggggtcgccaaagccccaggaggaagtggggcccagaagacactgagaccaattccatgagctgatgtcagcccccttaccgctgctgccccgggactccagcgtgaggagggcactgccaacctccatgtcatacaagacggtgtcgccagagcggaaggaggccacgatgtgggcaggctcggtgctggtgaaggccactgaggtggggaccccgtgctctgagggcacagggaagagaaggctgctgaatggaccctcagacccagccctgccccagggtgggggacagtgggtgggaggcctggggcctcagcaggaaccactctgatagcctccagatcccgcacagctccagggtgaggcaccggggcccccactcaccgctggctgtggggaaggtgcagaggcaggccgggctgctgctgctggggtcccagatgcggacggtgccatcagcagaacaggaggccaggcgctgggaggtgggactgaaggccaggccccacacggcgtccccgtggccctccaggacgtggctcagcacgcttgggtctgcacccaccgcagggaggaaatgggctgtgtcagggctgccagctcctccctggacagcccagagccccagctctgccaagccccaggcagctgggctccaatcacccacgcacccacttcacacctggtgcccctcggaactgtccactgccaggacagcccggcagctgctcacactgcccactagctctccaaggaaggttctagggctccagaaggcagggatttccctctattcacagctgtctccccaagcagggcccagaaactgggagctcaatacagaatttttcgggctccattaaggaagaaggaacagcatggttctgtggccccaggagcggcacgcagcctgtgctggacaagggttggtcccaaccctggcccgagcagtcttttcagcccatggccaagtgcatgggctttgcctggtctctccaaagccccctggtcattcagaggtccaatcactgcttccctggttgctggagtccacaccagcagctctggcctgctgacaccgaaagtgtggtggctaatgtagctgggaccgatcctgaccttgtgcaggtgagcctgttctctaaagtctgtcctccccttgagaggagacaaagacctctgaactctgcccagacaaggtggagcacagggccaggtgcatgatcaaggaggcagagccgggcgcagtggctcatgcctgcaatcccagcactttgggaggccaaggtgggtggatcacctgaggtccggagttcaagaccagcctggtcaacgtggtgcaaccctgtctctaccaaaaatacaaaaaatagctggatatggtggtgcgtgcctgtaatcccagctactcgggaggctgaggcacgagaatcacttgaacccaggaggtagaggttgcagtaagccaagatcacgccactgcattccagcctgggtgacagagtgagactctttgtctcaaaaaaaaaaaaaaaaaaaaaaaaaaggcagagaacagggggacagatgttgaacagaagtgacagtctggtcacttccctacttaggtcttagatgctccaaagagaaagccccaacgcgctccagcctggcccagctaactccaccttctctgctttctctggacatgccctcccctcaaccacgcagagaccctggcggatccccacacacagagtacacggcatggcagagcagaggctgccagggccagccacgcctgtgcatgggctgctcccagcctgggctgcctcagcactgccttctggacgccggctcacagagattctcaggcagcttcaccacctcctcccacagccatcattcccatcccggctggctcgtcccttggccacgcgctgcatcgcgctgctcacaacagagcagacaggggagccgtcacacgcactcctgaggcctgcagtgttggcaagaggtggacgcgacgtgtgtgtgcgtggaggggacggccaggccccagtggatgtgaggggaaggcgggaggcgttgtcctcaccgtagccatcatagggatccatgctgaggtctggaatcttccaactatggatgcaggcatctgccccgccactgtagcagtattcactgttgctgcccatagccacagccaacactgggcccctggaagggacaaatatgtggaaagggggatgagacaagctcagggcctcccctggccacaggacctaagttccctactagcattcttcaaggatggccaaaaggaattcagtgactggggctctggccatgctacctggacaagctgcctgtcccctgccctcccccaccccacctccatctcctcccctgaagggctgtgctgagtaccagctgccagggcatgtgaaagtcagcatggagccccaagaaccagggctgtgtatatcatgaagggggcggggactcagagccccctgctgtcctgcctcctgccgtgggcctcccgcgatggcagtgagcaggtcaggagtcaggctgcatttaggacgagtttctagcaggctcaggggcacctccctacctgtgagcccggaaagcatgtataggttccacatctagcgccgcattcctgtgggatgacagaggagcctgatgtcactgagaccctgtcacccccgtccccagatgcccctgcccccggctctgagcttgctgccctcacttcttggccgtgaccgccttctgcaggttccagagcttgagcgtgccgtcctcggaggcggtgagcagagccgactggctgtggtggaaggccagggaacgaatgccgtcgtagtgcgagcgcagggtgaacttggggttccacgtcttcttaaaagcatctttgctgtcagacagctggggttggggggagctgcctcagtgtcttcgcatccatcccagcagtcatgcagacaccgacacccagggcttgagggcccctgtcttccacccacatgaccctggcaggaatgccctcagagcctgggctccagccgggaactctccccttcctctgctgggcagagtctccatgctcgcccaacaagtccccacactgcgctgggttctggagagacaaaggtgagcctgaccccttggggtcttgcagttgagaggaaggggaatgggggacacaactggaccatcccacaagtgtgcaggatcatcagccatgagcagggcaatgaattaaagatgcacagagagacatcaggcagcctgccctcctccctgggggccactgaggctttcctgaggaagcacgagccagcaggacttcacaagataaggagagggccctggagagggaaagggcccgtgcagaggccctgaggcagcaagggcgagcccaggcctgagaggtcagtggtacaggctgcaggaggcaaggagagtggcaggggatgagacaggtgctgggtggtgagccccggaggaatgcgcatttcatcctaagaaaaagcctcagagaaacaaggagccggggaagtgtttagagcaggggaacgacatggcttgttcctgccacccctgagaggctcagattaggggcaggtaaaagtagccacagacggggcacagtggctcacgcctgtaatcccagaactttgggaggccaaggcagaacgatcatttgaccccaggagttcgagaccagcctgggtaacatagggagatcccctcaaggagcaaaaaaaaaaaaaaaaggtagcctcagagaaagaggttgagaggccaggaagtcccaggggagatgagggcatggagaccagacacgtgaccatgaaggggaggcagtgcacaagtgggagagctgtgggggcctctgtccaccacgctgcatgcgccctggtgccgctcacccagcaggggacccggagagggccaggttccggagagatgacgagcagagtaccaggcaagcctcagcaccatgccccaagatgggctcccagctgacgtccctgccttagctgtcccttctgccacagttctttagggtcagaggatctgctactgtgtggttcactcaccccctcccctagcggggctcagaacactgcacttccccaagatgaaatgacatcttggggcgtgcagagggaccccatggcacactccacttctcaggcctctgctctgaccccccttcctgaatctcacagcagtccccacccagccttactagggtcaccaacactggaaatcccattctgtcacagtaaaatgtgcacatacacccacaccaaaagctcccagctggccaaaggctcccagctggccaaaggctcccagatggccagaggcccgtccactgaggcccggaacatttcatttcagcccagctgcccattcacactagattggcctgacttggcagagcagggggtggctacaggtcatcttcctgcattccaaatcaccagggtgggaggggcagagtggaggagccgtggaactgtgattaaaacacaggctccagagtcttccaggccctgcgccttggcgaccgcagtcaagtccctccactgtctacatctgcacccctctgtgaaacaggatgagcagggcacgggcggcacccagtcagagcttgcaggggctggccctgggcgcaatgccaatggggacagtgtggggggcacccggagaacttacatcgcagctgaggtcgttgtcgttggtgacggtgagatctgccaagtcccccaggctcacctccccgcccccgatagtgtccatgatgaagacgtctgaggagaagccaaaggaacctggtagggggaggggagggaggggcagagagggccagggagagagagaatgacagagagaggcagagaaagagataaagagcaagagagagagacggggagaggacaagatgaagaatcacagctggaaagagacagagagacagacagggcaggacagacaaaaagagagggagacagacagacagacgaacttttggggcagggaggctgcagactggaggctgggcctcgaccctgaagacacagaagccctgggctcagctctgcagcctccctctgccatgggcccgcaggactgggaccaggtggggggtgcctcttaccttcatgtggccggggctggggtgtgccaggaggcgggccagtcacttttgggggcagcccatccacatcccgcaggtcagccagaatgccttggagtttgacccgacggctttctgcagggtcgaggcatagggccggagtcacccagcagttccaacccagtctggcataggtgacgccttccccacactgagggccccctgccactctgtggggctgtgaagctctggccctgggggagggggggaatgggcagaggagaggaggttgattgggcccctccgtggggcagtgggcaggtcactgccttgcctaggcctcaggccccagccacccatcccacgtatcctgagagccctcctagctaggagtcacaggacagggaggaagatgcggccctcccacctgcctctccccgactgggtcctcatcctgttccctccttgaggccagccagagctggacgcccgccctggagggctggcggccccacttcaggaagagccaggactgcctgcgtctccatggggattttccagggaaggggtgaggggccggcggccatgacctgggcctcctgctctccttggctaccctcctctcaggaaacatatccgtccggtagagagaccctgtacaggaagcagctgcgggcagctgagcctgctcccaccccctcggtggggaaggcaagcgggggctggccagaaaacgtcagctcacccagctcatgggggctcccatccacagtgcaccgccgagggtctggagccccttccccatcctctcctgagcccaggaaatcaaactcattgatagcatcctcagagtcgtcttcctcatcctcgtcttccatttcgggcaccagagccttggatgggagctggcacatggagaaagccagacaagtcagggggcctcttgtccagagactaagccacctccgtgcctaggaacaggtaagccggggctctgggcccgtttctgttcatggggctgcctcagccgccagccagctgccctggagcgccccctgctgggccttggacagctgctaccactagggccggtcggcctgaccccaccctcacgcagtccttcccctagccagggctcagcctgctccagtcccccagcaaggtgcctcggatgaagaaaagtcagataatgcaacaatctgcctgcagggagggcagatatgcactggtgtccgtgtgtgaatatacggaggtgcaaacaagtgaggatgaatggaccacagcattgcagcgataaacacagcaccagcagccgtgctggcacaagagcaaattccactcactgaatgaccactgactacccctcgcagacacgacttcacttaacccccaaccctgcgaacagctaccgtgaacactgtcattatcattcccacattacaggccaggagacaggctgagcagcaggaacccacttgccctaggtcaccaaggccaagctctgcccactgtgaactcctccagggcgtggctgaccccttccacatgtcagccccccaggctgagtttggcgacacctctcgggcaccagtgaggggccagcctctgacctgcatgggggggaccagagggaaggggcatggagaagacctagggccaaggtttattcaacacttgtgcaaagaatggggaaggggagggtttagacagcatgcccagaaaggcagcggccgggctcaggactccagaggagagaaccaccacaggtgctctgaggggcacacgagtggcaattgtgctctgccaacagtgcctggaaccatgagggctccaccactaccaagtgccaccagcgccactaacacctactgagcacttgggggacagccaccatgcagctgagggcttcctgggcaccagctcattctaattaaatcctcaacaactcagacggagggactcagccccatctaaagggtgaggagactgaagccaagacaaagaagtgtgggccagaactcacgcagctgggccagggccccctgggagccatgggcagtcccctgggttcccagctgggcctcgatggagggctgctgcgtagagacagagagccctacccaaccagccagcccaagggtgtgggcccgaaggggtgcaaacaccacggatgattcctgatggaatgggtggaggggtggaaaaggactagaaattctcagaggggtgggaaggaccaagcgtctggaccaggggccagcatttgagaccctggactcagccctcctgctcttcctctaggcctcctgcagtgctgcggctccgtgcacaccactctacttggggtgcgactctgtgctgagccacactggggatactggagatgcagtggaggcccacacaggcccagtccctcccagggagaggtcaggaggaatacagaccagacagggaggaccccagagtggccagggccagggaagggagcccagggtgagtcagagaaggcttcctggaggagggggtgtctgagctgagtctaaaggaggaaagaaaggggacctaggcaaagggacccgctaatgggaagcccggggctcagggaaagctccgaggccatctgccacaggtgcctccttcataggcacatgcccctgcctccaccacaacgcgtccttctgcacatgactatttacaaggccgctgctggccacaagctcctccaggccagggcctgtgtgtctccatatccctgctgccagcacacaccgcagcccctgaaggcccaggctgactcggaagggcttcgatcaggtcacacccaggccaggctgtgcagggcatggaggaagggctcaccttcacacgctgcttcttgtgctgcacgctgtccagctcatcgtcctcgtcgctgtcttcgtcctcgcagttctgcaggaaggggatctgccccagcactgagccgcccaagcgctctttgccatctttgcctgccgcgttcctgccaaagacagcagagcagaggaggcatgagtcctggcaggtgtcaaagctcagataggaaggtgccctcccaggcttggtggccagagcccagacccagctaaccccctaacccctgagcagccttgactctggtcacacacagagccccaaccccagcctctgcccaacaaatgctcattccaactggaagcctcactcagaccgcaaacggggcccagctcctcaatgaccgccgacctgagtttcagagggccagcccccaaccctggtcacaaatctccatcctgtgctgagtcagaaggaaagctggatgagaaagtgccactgactcagcagtccccattcccacagcccagtcagaccacaagggcaggtcaggcaggaggcaaacacgccctgcaggaaagaggaaccggccattctacaaatgctctgggaggcgccgaaagccagccagcctcgcgcaagcaggggcgccggcgatccctgctacccaggagcctgcactatccccagcaacagatggcactcctccttccacctcctggcttccaacttcatgacaagttatagcagaggaggtactgacccagcctgactgcgggagaaggcagggtgcaattccaagtgcagatcgacgaaaacgtcccccctttctgccatcaggttgatgccctggaggtcttgtcaactgccagttaccaacgggtgcagaggtcactgcagatgtaccctctcgcctcacggctgccatcaccagagctccactccatcctcagaacactcgctgcacttgcagcgggacacaggactccattctcaccggccttcctcccacaacgacactgacacgccgcacaggctcagcctctttctcagcttcctcctcctgttcctccctccagcctctaagtgggagagcacccgggcagtccccagatctcttctctgcgtcatctacactcactcctgcaggcactgcagacggccatggctttccaaagaatgcccatgtgcttgttcaactagacctatgtttaggggccaaatgccccgcagctccagacgagctctgcttctccacatgggggtaaacaggcccctcacacttcacacaacctcggcggcccccagaacttccactcccaggcttccccgtctcaggggatgctgctccaatggctcacaccaaaccctggagtcgctcgtttcttttcctctccccttagctgcagtccttcagtgtcgactgcctgaaagcctctggggaagctgacacctctcgcctcaccaccgctaaagtccatcagctctgtcccagacatcgagccatctcctaactggtccgcctgcctcctctgtgaccctcccacacctctccttctcagagtggatcaggtacgtcagattatgtcaccccgctgctcgaaagcactggcttcccacaacccctgagtcaaactcagactctatcccagcccaaggccctgagtggctgactcctgagaccacaacctccccgcagcccacgcctcactgcctgcggccatgccggcctcgtgctgcttctgtgcaggctgcgtctctcctgcctctggacctcggggttcactgtgccctctgcctagaacattctcctcccagccactcgtgtggcttaccctccatttaatgcccacagaggccctccctgcccaccccctgcagaggagcacatattggccctcgtggtctccatcgtgcttagcatcacctacgtggcctcacttgttctgcttaactgacaattgctgatgagagtgaacaagccagagattcctgagggtggcgaccacgtgtgctccactccctgctggcgaggcacccagggtgtgccttcggtaagcaccccactcgaccgagaagcgggcaggcctgagtatcaggacgggggcagggctggagatgaggccatggcgaagtgtgtggagggaacccaggacagaatccgggggatcccagcagtgaagggactcagggtttcagaacaagggagcccacggcatactccaggaggaggggccgccagggcacccagcgccatcagctgacactctgaccctggccttcaccagcagtcaggaggaacagagagacacacctgccatgtccacgggctcacctctttatctgctcctcgatctgtttcaccagcagcgactccccaccactgagccctgcagggcctggtggagccctgggggccccttcactcggctccactgccccgttgagctccagcgagcggcccagcagggaacggacgcgcttggaccgcatgtcgaggatggtgtctgtgtagcccacctcttccaggtacctgcaggggtgcagagccacgtgggtcagacatcccctgggcttcttcatgtaccacaggggccaatgcaaaccgagacaacctcttaaggggccacttaagagcatacaccaaaatctgacataagcacaccctcgctccagcagttccccgtcaaggctatttccagtggaagcccttgtacacacacacaatgctatgtgtgagggtgctccctgcactgctgtatggggaagccgaagcacagggaccagcctcagcacccaccgacaggggctgtgtcagcaaatgactcatagcgctgcaaggcagaagatcaacagggcagagccttaagggaagctggccacggtaaacagcagaacgaaaacgctaagttctatgatccacatgatgccaatgtttgtagaaaaaaacaaaaaggcgttaatgtgcataaagcttacaccacacgcaaacacacgtttgtattatgtcccccaagaggcctagaaagatccataaaaaacataacagcagtgacctctggagaatgggattaggggcgtaagaggaacttttgcaacttactctacttacttctacaaatgagcacttattacttctgcaatttaaaaactgaagccagctgggactggactaaaagtaaaaaaagaagaaggaaaaaagaacaaaaatcaatttggggtatctgtggcttcaaaatacagcgacaacagtcccttgctactcctcaggaggcttcctggccaggccgcctttgccgttccctgtcccttcgcagctctgaccctgtctcttgaatgttaggctgcacgcacctgcatgtacgtctcatcctgtgcgcctgtgtgtgtctgaggctcctatctccccaccaaaagagagacagggaagcacggggctttaaagctgggcactgggggcagattgcccaagatcccacaaattaaccatgcaaccttgtgtaaacagatcacctcaccgcatgccagttttcttatgaggggaacactagcattataccacacagagatctcagtgaggagccaacaggtggaaaatgtttagcacagtgccaggcacgtaataggtacttggtaagtgtagcctgttagtattactattattgttttagggttattgtttgcacacactttaagctagcaaccccacttccagatatctaacttgaggaaatcaaggatatgcacaaataccttcctgatttttatcacactgtctataatacaaaaaaattaaaagcaaccttgacaaaatacaaggaactgaccatggagagttatggttatctatatgacagacattatatgttgggtttttttcctccataggaccaaaggaaggaaattatgaggtcttcaaagtgatgcaacataactaattaatatggagagatgttcgtaactcttttttgttgttgttaagacagactcttgctctgtcgcccaggctggagtgcagtggcacgatctcggctcactgcaagctccgtctcccgggttcacgccattctcctgcctcagcctcccgagtagctgggactacaggcacccgccaccaagcccggctaattttttgtatttttagtagagacggggttttgccgtgttagccaggatggtctcgatctcctgaccttgtgatctgcccgcctcggcctcccaaagtgctgggattacaggcatgagctactgcacccggccgatgtttgcaactctttaacagtgaaaacaaatcccagcttttataaaatatataagctgggctgggcgcggtggctcacacctgtaatcccagcagtttgggaggccaaggcaggtggatcacttgagctcgggtgttcaagaccagcttggccaacatggtaaaacgctgtctttactaaaaatacaaaaattagccaggtgtggtggcacacacctgtaatcccagctacttgggaggctgaagcacgagaatcacttgaacccgggaggcagaggttgcagtgagccgagattatgccactgcactccactctgggtgaaagagcaagactctgtctcaaaacattaaaaaataaataaataaataagtaaatgaaatacataaactgagcagtgtggctcatgcctgttgtcccagctactcaggaggctgaggcaggagatcacttgagctcagatcaagcctgctgtgggctctgactgcaccactgtactccagcctgggagacagagtgagtttatttatttattaagataacagaggcaaaaatacacagccacggaagaaactgagaccatatatggcaaaatgtttataggggtatgaaatttcttgggtggagaaattatgagtgatttttctctctgctctcctatattttctaagttttctaaaatgcacaaatctcttcagcaattaaaaaataataatttgaggctgggcgcggtggctcacacctataatcccagcactttgggaggccaaggcaggcggatcacctgaggtcaggagttcaagaccagcatggccaacatggtgaaaccctgtctttactaaaaatacaaaattagctaggcatggtggtgcacgcctgtaatcccagctactagggaggctgaggcaggagaatcgcttgaacccgggaggcagaggttgcagtgagccgagatcgcaccactgcactccagcctgggcaacaagagcgaaactctgtctcaaataataataataatgataataatttggccaggcgcagtggctcatgcctgtaatcccagcactttgggaggccgaggcaggcggatcacttgagctcaggagtttgagaccagcctggccaacatgctgaaaccccatctctactaaaaaatacaaaaattagccgggtgtgatggcacctgcctgtaatcccagctactcagaaggctgaggcaggagaatcgtctgaggtggatggaggcagaggttgcagtgagctgagatcgtgccactgcactgcagcctgggcaacggagcagaaactgtctcaaaaaataataataaataataataacattaagaatttgctggtccaaacatggtgagttactgtgatgattcacagttgattacagacctacttacagatctgccttctccccacttcccactactgtatttgattagtctttaaataaataattaacaaataaaaaataatttaatattacccttgggaaataaaaagccatgcttcataaatcttcacaaggtatctaaaaaaaaaaaaaaaaaagccacacagggctcctatggccactgagacaaaaaaaaaaaaaaaaaaaaaagccacagaggcattcagggacacattccaacaggggtgtccccacgtctgcctcctgcagcgggtttccctccctctccccaggccaggctccgcccacagggtgaaagccattccagccatggctggctaagatcctgatagttcagcatccccagtggggacggaaaaggactgtggagtctttggacttatctctcaagccaaacgtgtcacgtgtccccagcccccctccccgagcacactcactgtcggagaagctgccgcccctccttccacaccaacgggctgttctccagggtgaccgattccacggggccattggagactggcgggtgagagaacggaggctgtcttaagtcaggccactgccacctacccatcacctcctccatcttcctcacccctccaacccaaatcggtcactgtcgcaggtcctgtggcatcacttcctgagtgttggaaccctgctctcttcccttactcggggattcctcctccttgaagcgttcctcatctctaggtctcctgactggtggttccccaaactggcccccgacaagataagggtgttatctcaaaaccagaaagctggcctggttctgagagaagggccgactgggttcaagcccagctctgccccatcccagctgtgtgaccctgagttagtgtaagccgtgtcagtttcgtcctctgagaaatgagcttaatgataacagcatctccctcttgggagtgctgagaggatgcaatgagataatttgcttagtattttattcaagtctttcctgggcatctacgctgtgcctggccaggggcctgggctacatgggtaaacaaagacctgcccttgtggaacttccgttctagtgagaggagctggcagcaggtaatgaccatcactatcagctgagcacacaaggtcttctcagcttgcctcggccaagcttccccctcacccagcccgccctcccacatcctctgccctacactgtttgcccaggcacactgaccgactccctgtcccctaaccctttcagcgtgcgtctctgtatctgtgctctctcccctgactctcctgctggggaacggagtcatctttcaaggagcttagactctaagggaccagagggtagagaccatgtctcccgtgctctctgctgtattcctgatctgtgatacaaagcctgtaccctacaaataaagtcttttttggatgaacgattgaacggcaaccctgttcaaacgccacctcctcagtgacgtcttccccggctttcccgcaccgtccccagcactctataaatagccctggcgcccactcctcgcaaagggatcccgtgagctgctcgtgtgtctgcctctgttgcacagggggacccaagcgggactggcccccagggtccagcacgggacctggcagcccatagggagggctctgagagtgagattccgcccctccccagccccggggccgattctgccttctaaggagcaaagtgagaaagaggcaccccatcttcctgcttctccagaacactcagcttctgcgggagggtgccgacagtgcgagcatcagagggtgggtaccttgttctgacacatctgctttcttctccccctggttcaggtctgtcccaaacttcagtttatgatatttggccctaaaagagcaaatgattaatgaataagagatgcgggagagtagacagggtcagtagttacctaaggaatccagaatcccaaaccccaaatcacagggcctcccccagctcgtctactactgaggctgaagcatccccccacacccctggcctggtggaagaaaccactccctggagtcaggcaacctaggttgctctcaggggtccttgaggaaaccatcagcccttgaaaccccagttccttatctgaaacagggctaacaatacccgttaggctattggaaggtataagggataacggaggtaaggactatacgatatttggcgcacagtgggccactagcatcgtgaatatcgttcctggtgtctaacccaaatcccacctactctgtcctgtttctcccctagaatcttatggtactggaatgatggaaaagaatgtcgaccccaaatctcccttagctggaaggaggcgtggctggtggcctcctgacactgtgcttgagacggacccagaaggcaggcccagggcaggatgaaggctcacctttcctgcttcagcgcatactctagcatcttgatccgccgcaccaggtccgtctttagattctcc

SEQ ID NO: 1945 - DNA, 17397 bp, Homo sapiens
catcttactccaaagggtttattgagacaagttttcacatacaagatggggacagaggggttggggcttataaacaggaacctggaaggggaccgagggtgcagggtagaaccaaacaagagagtgaaataaatagagggaaagagtggagacagggaggagactgactgagaccatcacacagtgataatgcgggtggggcggcgccatgaaaatcccgttatttatacagatatacagggagttcagggggacccgaggcccactccaccctccatgccccagggaggggcacaagaaagccgtctctacccatgggcgaccccatggggcgctgggagggctgccctaggagtgttgggcaatccctggcctggaagccttggttagtgtctggaaagcagtggagagggccggaggggaggggcagccaggccggggctcagctctgaggctcccggctgccaccctttctcccagcacagctcctgcccaggtctgggaggatgggggatgggggagcaggagctcaaggggagaacctggcaccttctggagtcttggaaaaactgatccctaaagacacccggccctggctgtgctgccctctggaaagcagctctgataccaggagcggctgtcagggcacagggggaaaccccgaggccatcctcgggggtgattcctgaaaggggcccatccccaggctggatgcttggggaaggcagccgttggggagggattcctggggaaagggccgttagcaccaccaggctccatggcaaacagacagaggccaggcctctgcacctccagcgaggctgggagtcccctgcgggaaagagaagggaggggagactgagccgccgcctctagggcgcctctaaggcctcaacccctcccctgcatgcccagggctcccccagtgattctcacaggacgcccctgactggactgcggggctcagcacacctggcagtactaggcatgggcgtgcagagactcagaatgcggggtttctgccctcacctcagccccacctgcccggccctacaccccagccagcgtggcggccagggcagggccaggtgggcatcatacgaagaccttggccagggcatcagcgccagcactggcaatgagggccttgctggggtggcaggcaacagcgtggatggcctcctcgtgcttcttgcggtgggccgtgatctcctgcacgcacgttttgttgtccaggctccagagacgcagggagcagtcatggcctgcacatgtgtcggggacagaaggggtggtcactgggctcctcgctcagacgcagccctggaacccctcacctggccttgtccaaaggcctcaggggaagtggggctcaactctcctctctcaccctctgctcatcacctcctgtggcccgcccaaaggagaaccctggtcccctcctgtccacagtccatctcatcccccagcatttcttgagcagctactgcacactgagccccagggcggcaggggcagtgaacaaaacaggcaactctccctgccccgcagcactgacgctgcagctgggcaacaggaagagaaagaagaaagcaacccagccggtcagtgtgaggacagaatggccccaggaggaatgcagggagccttccaggcagaaggacaggcgggaaaggtcctgaggcaggaggtgggggtggccacaagagccttagcagggacttggggagaagaggggagaggacggcaggctgggcagggccctggcgaggagaagtttaatttagggtcaagaggatcaggcagggcaaaggctcagctccctccactgtctagtggcccccagaatagagccctgtctgggcactgggctggagctcactgaccagcccctcacccaccagaggctgccagcacaggcccggaggcagagcccagccacagcctccaacaccacggcctgcgcctctgtgcacacacactcactgctgcactcactgcaggcctcacccttcacccccacagcgacctccagtctccttctccacccacccacgtcacactccatcccttctaagcacagccacgttgctggcctcaatgcccttatccagagacaacagggtgggagcacagaagtcccacgggtacccccaggtagacctggactgatgttacagagcttcaatggccaagttacaaagcgtctgggcatcagggcccacatctgtaaactggggatcaaagtaccaaccgcacaggctgcttagaggccgaatgagacgatgcagctccagtgacccagaggagggccccagcggactgtgctgccccctatggtcaccacggtcattcccgcccagaccagcctcccccagccctggcccccggggccccctgagcacttgcctggagccagtgcccaggcctcttcctccccttctccccaaccctggtgggactagtgtgctcaacttacttcctgacatcaggaatgcgccgttggggtccacggctaggcaggtgactgcgtccaggtgtgcaaccatggagtgcaccggcttacctgaggcgagaagggcgggtggcaggttcccctcccactctgggcctcgcctgagagagtgaaaggactggacgagagactcccagagcctcccacagggacgcaagcatctctgctgcctgcctctggccctccccacccactacgagcacaaggggctaggcctcacctgtccgattgtccaggaagcggatgcccctgtcgtcgtgggcggtgatggtgagaggctggtttggatgactcaccacttggttgatctgggttggacctgaaggaaaacgcaggaagagggaaggatgtcaagcagaaaatcaggaagaccagaacagaggcacaagcgcagcgtgacagcccctacaccagcctctgcctggatgtcgaggggggctgggcgagggcactccggtccccgaccgcagcgctggttctgcacaagcagcccctgggccctgttttggggcgggggaagaggaataacaaacatgaacacattccgccactctaccaagagggcccgacggggcggccctgacgcgctctccccactcagccccgccagtgccctggctgtgagggccgggggccctccactgggacccaacttccttcctgctcagggcctgagggtgcaggggagtcatctgagctgactgacaaggggtcgccaaagccccaggaggaagtggggcccagaagacactgagaccaattccatgagctgatgtcagcccccttaccgctgctgccccgggactccagcgtgaggagggcactgccaacctccatgtcatacaagacggtgtcgccagagcggaaggaggccacgatgtgggcaggctcggtgctggtgaaggccactgaggtggggaccccgtgctctgagggcacagggaagagaaggctgctgaatggaccctcagacccagccctgccccagggtgggggacagtgggtgggaggcctggggcctcagcaggaaccactctgatagcctccagatcccgcacagctccagggtgaggcaccggggcccccactcaccgctggctgtggggaaggtgcagaggcaggccgggctgctgctgctggggtcccagatgcggacggtgccatcagcagaacaggaggccaggcgctgggaggtgggactgaaggccaggccccacacggcgtccccgtggccctccaggacgtggctcagcacgcttgggtctgcacccaccgcagggaggaaatgggctgtgtcagggctgccagctcctccctggacagcccagagccccagctctgccaagccccaggcagctgggctccaatcacccacgcacccacttcacacctggtgcccctcggaactgtccactgccaggacagcccggcagctgctcacactgcccactagctctccaaggaaggttctagggctccagaaggcagggatttccctctattcacagctgtctccccaagcagggcccagaaactgggagctcaatacagaatttttcgggctccattaaggaagaaggaacagcatggttctgtggccccaggagcggcacgcagcctgtgctggacaagggttggtcccaaccctggcccgagcagtcttttcagcccatggccaagtgcatgggctttgcctggtctctccaaagccccctggtcattcagaggtccaatcactgcttccctggttgctggagtccacaccagcagctctggcctgctgacaccgaaagtgtggtggctaatgtagctgggaccgatcctgaccttgtgcaggtgagcctgttctctaaagtctgtcctccccttgagaggagacaaagacctctgaactctgcccagacaaggtggagcacagggccaggtgcatgatcaaggaggcagagccgggcgcagtggctcatgcctgcaatcccagcactttgggaggccaaggtgggtggatcacctgaggtccggagttcaagaccagcctggtcaacgtggtgcaaccctgtctctaccaaaaatacaaaaaatagctggatatggtggtgcgtgcctgtaatcccagctactcgggaggctgaggcacgagaatcacttgaacccaggaggtagaggttgcagtaagccaagatcacgccactgcattccagcctgggtgacagagtgagactctttgtctcaaaaaaaaaaaaaaaaaaaaaaaaaaggcagagaacagggggacagatgttgaacagaagtgacagtctggtcacttccctacttaggtcttagatgctccaaagagaaagccccaacgcgctccagcctggcccagctaactccaccttctctgctttctctggacatgccctcccctcaaccacgcagagaccctggcggatccccacacacagagtacacggcatggcagagcagaggctgccagggccagccacgcctgtgcatgggctgctcccagcctgggctgcctcagcactgccttctggacgccggctcacagagattctcaggcagcttcaccacctcctcccacagccatcattcccatcccggctggctcgtcccttggccacgcgctgcatcgcgctgctcacaacagagcagacaggggagccgtcacacgcactcctgaggcctgcagtgttggcaagaggtggacgcgacgtgtgtgtgcgtggaggggacggccaggccccagtggatgtgaggggaaggcgggaggcgttgtcctcaccgtagccatcatagggatccatgctgaggtctggaatcttccaactatggatgcaggcatctgccccgccactgtagcagtattcactgttgctgcccatagccacagccaacactgggcccctggaagggacaaatatgtggaaagggggatgagacaagctcagggcctcccctggccacaggacctaagttccctactagcattcttcaaggatggccaaaaggaattcagtgactggggctctggccatgctacctggacaagctgcctgtcccctgccctcccccaccccacctccatctcctcccctgaagggctgtgctgagtaccagctgccagggcatgtgaaagtcagcatggagccccaagaaccagggctgtgtatatcatgaagggggcggggactcagagccccctgctgtcctgcctcctgccgtgggcctcccgcgatggcagtgagcaggtcaggagtcaggctgcatttaggacgagtttctagcaggctcaggggcacctccctacctgtgagcccggaaagcatgtataggttccacatctagcgccgcattcctgtgggatgacagaggagcctgatgtcactgagaccctgtcacccccgtccccagatgcccctgcccccggctctgagcttgctgccctcacttcttggccgtgaccgccttctgcaggttccagagcttgagcgtgccgtcctcggaggcggtgagcagagccgactggctgtggtggaaggccagggaacgaatgccgtcgtagtgcgagcgcagggtgaacttggggttccacgtcttcttaaaagcatctttgctgtcagacagctggggttggggggagctgcctcagtgtcttcgcatccatcccagcagtcatgcagacaccgacacccagggcttgagggcccctgtcttccacccacatgaccctggcaggaatgccctcagagcctgggctccagccgggaactctccccttcctctgctgggcagagtctccatgctcgcccaacaagtccccacactgcgctgggttctggagagacaaaggtgagcctgaccccttggggtcttgcagttgagaggaaggggaatgggggacacaactggaccatcccacaagtgtgcaggatcatcagccatgagcagggcaatgaattaaagatgcacagagagacatcaggcagcctgccctcctccctgggggccactgaggctttcctgaggaagcacgagccagcaggacttcacaagataaggagagggccctggagagggaaagggcccgtgcagaggccctgaggcagcaagggcgagcccaggcctgagaggtcagtggtacaggctgcaggaggcaaggagagtggcaggggatgagacaggtgctgggtggtgagccccggaggaatgcgcatttcatcctaagaaaaagcctcagagaaacaaggagccggggaagtgtttagagcaggggaacgacatggcttgttcctgccacccctgagaggctcagattaggggcaggtaaaagtagccacagacggggcacagtggctcacgcctgtaatcccagaactttgggaggccaaggcagaacgatcatttgaccccaggagttcgagaccagcctgggtaacatagggagatcccctcaaggagcaaaaaaaaaaaaaaaaggtagcctcagagaaagaggttgagaggccaggaagtcccaggggagatgagggcatggagaccagacacgtgaccatgaaggggaggcagtgcacaagtgggagagctgtgggggcctctgtccaccacgctgcatgcgccctggtgccgctcacccagcaggggacccggagagggccaggttccggagagatgacgagcagagtaccaggcaagcctcagcaccatgccccaagatgggctcccagctgacgtccctgccttagctgtcccttctgccacagttctttagggtcagaggatctgctactgtgtggttcactcaccccctcccctagcggggctcagaacactgcacttccccaagatgaaatgacatcttggggcgtgcagagggaccccatggcacactccacttctcaggcctctgctctgaccccccttcctgaatctcacagcagtccccacccagccttactagggtcaccaacactggaaatcccattctgtcacagtaaaatgtgcacatacacccacaccaaaagctcccagctggccaaaggctcccagctggccaaaggctcccagatggccagaggcccgtccactgaggcccggaacatttcatttcagcccagctgcccattcacactagattggcctgacttggcagagcagggggtggctacaggtcatcttcctgcattccaaatcaccagggtgggaggggcagagtggaggagccgtggaactgtgattaaaacacaggctccagagtcttccaggccctgcgccttggcgaccgcagtcaagtccctccactgtctacatctgcacccctctgtgaaacaggatgagcagggcacgggcggcacccagtcagagcttgcaggggctggccctgggcgcaatgccaatggggacagtgtggggggcacccggagaacttacatcgcagctgaggtcgttgtcgttggtgacggtgagatctgccaagtcccccaggctcacctccccgcccccgatagtgtccatgatgaagacgtctgaggagaagccaaaggaacctggtagggggaggggagggaggggcagagagggccagggagagagagaatgacagagagaggcagagaaagagataaagagcaagagagagagacggggagaggacaagatgaagaatcacagctggaaagagacagagagacagacagggcaggacagacaaaaagagagggagacagacagacagacgaacttttggggcagggaggctgcagactggaggctgggcctcgaccctgaagacacagaagccctgggctcagctctgcagcctccctctgccatgggcccgcaggactgggaccaggtggggggtgcctcttaccttcatgtggccggggctggggtgtgccaggaggcgggccagtcacttttgggggcagcccatccacatcccgcaggtcagccagaatgccttggagtttgacccgacggctttctgcagggtcgaggcatagggccggagtcacccagcagttccaacccagtctggcataggtgacgccttccccacactgagggccccctgccactctgtggggctgtgaagctctggccctgggggagggggggaatgggcagaggagaggaggttgattgggcccctccgtggggcagtgggcaggtcactgccttgcctaggcctcaggccccagccacccatcccacgtatcctgagagccctcctagctaggagtcacaggacagggaggaagatgcggccctcccacctgcctctccccgactgggtcctcatcctgttccctccttgaggccagccagagctggacgcccgccctggagggctggcggccccacttcaggaagagccaggactgcctgcgtctccatggggattttccagggaaggggtgaggggccggcggccatgacctgggcctcctgctctccttggctaccctcctctcaggaaacatatccgtccggtagagagaccctgtacaggaagcagctgcgggcagctgagcctgctcccaccccctcggtggggaaggcaagcgggggctggccagaaaacgtcagctcacccagctcatgggggctcccatccacagtgcaccgccgagggtctggagccccttccccatcctctcctgagcccaggaaatcaaactcattgatagcatcctcagagtcgtcttcctcatcctcgtcttccatttcgggcaccagagccttggatgggagctggcacatggagaaagccagacaagtcagggggcctcttgtccagagactaagccacctccgtgcctaggaacaggtaagccggggctctgggcccgtttctgttcatggggctgcctcagccgccagccagctgccctggagcgccccctgctgggccttggacagctgctaccactagggccggtcggcctgaccccaccctcacgcagtccttcccctagccagggctcagcctgctccagtcccccagcaaggtgcctcggatgaagaaaagtcagataatgcaacaatctgcctgcagggagggcagatatgcactggtgtccgtgtgtgaatatacggaggtgcaaacaagtgaggatgaatggaccacagcattgcagcgataaacacagcaccagcagccgtgctggcacaagagcaaattccactcactgaatgaccactgactacccctcgcagacacgacttcacttaacccccaaccctgcgaacagctaccgtgaacactgtcattatcattcccacattacaggccaggagacaggctgagcagcaggaacccacttgccctaggtcaccaaggccaagctctgcccactgtgaactcctccagggcgtggctgaccccttccacatgtcagccccccaggctgagtttggcgacacctctcgggcaccagtgaggggccagcctctgacctgcatgggggggaccagagggaaggggcatggagaagacctagggccaaggtttattcaacacttgtgcaaagaatggggaaggggagggtttagacagcatgcccagaaaggcagcggccgggctcaggactccagaggagagaaccaccacaggtgctctgaggggcacacgagtggcaattgtgctctgccaacagtgcctggaaccatgagggctccaccactaccaagtgccaccagcgccactaacacctactgagcacttgggggacagccaccatgcagctgagggcttcctgggcaccagctcattctaattaaatcctcaacaactcagacggagggactcagccccatctaaagggtgaggagactgaagccaagacaaagaagtgtgggccagaactcacgcagctgggccagggccccctgggagccatgggcagtcccctgggttcccagctgggcctcgatggagggctgctgcgtagagacagagagccctacccaaccagccagcccaagggtgtgggcccgaaggggtgcaaacaccacggatgattcctgatggaatgggtggaggggtggaaaaggactagaaattctcagaggggtgggaaggaccaagcgtctggaccaggggccagcatttgagaccctggactcagccctcctgctcttcctctaggcctcctgcagtgctgcggctccgtgcacaccactctacttggggtgcgactctgtgctgagccacactggggatactggagatgcagtggaggcccacacaggcccagtccctcccagggagaggtcaggaggaatacagaccagacagggaggaccccagagtggccagggccagggaagggagcccagggtgagtcagagaaggcttcctggaggagggggtgtctgagctgagtctaaaggaggaaagaaaggggacctaggcaaagggacccgctaatgggaagcccggggctcagggaaagctccgaggccatctgccacaggtgcctccttcataggcacatgcccctgcctccaccacaacgcgtccttctgcacatgactatttacaaggccgctgctggccacaagctcctccaggccagggcctgtgtgtctccatatccctgctgccagcacacaccgcagcccctgaaggcccaggctgactcggaagggcttcgatcaggtcacacccaggccaggctgtgcagggcatggaggaagggctcaccttcacacgctgcttcttgtgctgcacgctgtccagctcatcgtcctcgtcgctgtcttcgtcctcgcagttctgcaggaaggggatctgccccagcactgagccgcccaagcgctctttgccatctttgcctgccgcgttcctgccaaagacagcagagcagaggaggcatgagtcctggcaggtgtcaaagctcagataggaaggtgccctcccaggcttggtggccagagcccagacccagctaaccccctaacccctgagcagccttgactctggtcacacacagagccccaaccccagcctctgcccaacaaatgctcattccaactggaagcctcactcagaccgcaaacggggcccagctcctcaatgaccgccgacctgagtttcagagggccagcccccaaccctggtcacaaatctccatcctgtgctgagtcagaaggaaagctggatgagaaagtgccactgactcagcagtccccattcccacagcccagtcagaccacaagggcaggtcaggcaggaggcaaacacgccctgcaggaaagaggaaccggccattctacaaatgctctgggaggcgccgaaagccagccagcctcgcgcaagcaggggcgccggcgatccctgctacccaggagcctgcactatccccagcaacagatggcactcctccttccacctcctggcttccaacttcatgacaagttatagcagaggaggtactgacccagcctgactgcgggagaaggcagggtgcaattccaagtgcagatcgacgaaaacgtcccccctttctgccatcaggttgatgccctggaggtcttgtcaactgccagttaccaacgggtgcagaggtcactgcagatgtaccctctcgcctcacggctgccatcaccagagctccactccatcctcagaacactcgctgcacttgcagcgggacacaggactccattctcaccggccttcctcccacaacgacactgacacgccgcacaggctcagcctctttctcagcttcctcctcctgttcctccctccagcctctaagtgggagagcacccgggcagtccccagatctcttctctgcgtcatctacactcactcctgcaggcactgcagacggccatggctttccaaagaatgcccatgtgcttgttcaactagacctatgtttaggggccaaatgccccgcagctccagacgagctctgcttctccacatgggggtaaacaggcccctcacacttcacacaacctcggcggcccccagaacttccactcccaggcttccccgtctcaggggatgctgctccaatggctcacaccaaaccctggagtcgctcgtttcttttcctctccccttagctgcagtccttcagtgtcgactgcctgaaagcctctggggaagctgacacctctcgcctcaccaccgctaaagtccatcagctctgtcccagacatcgagccatctcctaactggtccgcctgcctcctctgtgaccctcccacacctctccttctcagagtggatcaggtacgtcagattatgtcaccccgctgctcgaaagcactggcttcccacaaccctgagtcaaactcagactctatcccagcccaaggccctgagtggctgactcctgagaccacaacctccccgcagcccacgcctcactgcctgcggccatgccggcctcgtgctgcttctgtgcaggctgcgtctctcctgcctctggacctcggggttcactgtgccctctgcctagaacattctcctcccagccactcgtgtggcttaccctccatttaatgcccacagaggccctccctgcccaccccctgcagaggagcacatattggccctcgtggtctccatcgtgcttagcatcacctacgtggcctcacttgttctgcttaactgacaattgctgatgagagtgaacaagccagagattcctgagggtggcgaccacgtgtgctccactccctgctggcgaggcacccagggtgtgccttcggtaagcaccccactcgaccgagaagcgggcaggcctgagtatcaggacgggggcagggctggagatgaggccatggcgaagtgtgtggagggaacccaggacagaatccgggggatcccagcagtgaagggactcagggtttcagaacaagggagcccacggcatactccaggaggaggggccgccagggcacccagcgccatcagctgacactctgaccctggccttcaccagcagtcaggaggaacagagagacacacctgccatgtccacgggctcacctctttatctgctcctcgatctgtttcaccagcagcgactccccaccactgagccctgcagggcctggtggagccctgggggccccttcactcggctccactgccccgttgagctccagcgagcggcccagcagggaacggacgcgcttggaccgcatgtcgaggatggtgtctgtgtagcccacctcttccaggtacctgcaggggtgcagagccacgtgggtcagacatcccctgggcttcttcatgtaccacaggggccaatgcaaaccgagacaacctcttaaggggccacttaagagcatacaccaaaatctgacataagcacaccctcgctccagcagttccccgtcaaggctatttccagtggaagcccttgtacacacacacaatgctatgtgtgagggtgctccctgcactgctgtatggggaagccgaagcacagggaccagcctcagcacccaccgacaggggctgtgtcagcaaatgactcatagcgctgcaaggcagaagatcaacagggcagagccttaagggaagctggccacggtaaacagcagaacgaaaacgctaagttctatgatccacatgatgccaatgtttgtagaaaaaaacaaaaaggcgttaatgtgcataaagcttacaccacacgcaaacacacgtttgtattatgtcccccaagaggcctagaaagatccataaaaaacataacagcagtgacctctggagaatgggattaggggcgtaagaggaacttttgcaacttactctacttacttctacaaatgagcacttattacttctgcaatttaaaaactgaagccagctgggactggactaaaagtaaaaaaagaagaaggaaaaaagaacaaaaatcaatttggggtatctgtggcttcaaaatacagcgacaacagtcccttgctactcctcaggaggcttcctggccaggccgcctttgccgttccctgtcccttcgcagctctgaccctgtctcttgaatgttaggctgcacgcacctgcatgtacgtctcatcctgtgcgcctgtgtgtgtctgaggctcctatctccccaccaaaagagagacagggaagcacggggctttaaagctgggcactgggggcagattgcccaagatcccacaaattaaccatgcaaccttgtgtaaacagatcacctcaccgcatgccagttttcttatgaggggaacactagcattataccacacagagatctcagtgaggagccaacaggtggaaaatgtttagcacagtgccaggcacgtaataggtacttggtaagtgtagcctgttagtattactattattgttttagggttattgtttgcacacactttaagctagcaaccccacttccagatatctaacttgaggaaatcaaggatatgcacaaataccttcctgatttttatcacactgtctataatacaaaaaaattaaaagcaaccttgacaaaatacaaggaactgaccatggagagttatggttatctatatgacagacattatatgttgggtttttttcctccataggaccaaaggaaggaaattatgaggtcttcaaagtgatgcaacataactaattaatatggagagatgttcgtaactcttttttgttgttgttaagacagactcttgctctgtcgcccaggctggagtgcagtggcacgatctcggctcactgcaagctccgtctcccgggttcacgccattctcctgcctcagcctcccgagtagctgggactacaggcacccgccaccaagcccggctaattttttgtatttttagtagagacggggttttgccgtgttagccaggatggtctcgatctcctgaccttgtgatctgcccgcctcggcctcccaaagtgctgggattacaggcatgagctactgcacccggccgatgtttgcaactctttaacagtgaaaacaaatcccagcttttataaaatatataagctgggctgggcgcggtggctcacacctgtaatcccagcagtttgggaggccaaggcaggtggatcacttgagctcgggtgttcaagaccagcttggccaacatggtaaaacgctgtctttactaaaaatacaaaaattagccaggtgtggtggcacacacctgtaatcccagctacttgggaggctgaagcacgagaatcacttgaacccgggaggcagaggttgcagtgagccgagattatgccactgcactccactctgggtgaaagagcaagactctgtctcaaaacattaaaaaataaataaataaataagtaaatgaaatacataaactgagcagtgtggctcatgcctgttgtcccagctactcaggaggctgaggcaggagatcacttgagctcagatcaagcctgctgtgggctctgactgcaccactgtactccagcctgggagacagagtgagtttatttatttattaagataacagaggcaaaaatacacagccacggaagaaactgagaccatatatggcaaaatgtttataggggtatgaaatttcttgggtggagaaattatgagtgatttttctctctgctctcctatattttctaagttttctaaaatgcacaaatctcttcagcaattaaaaaataataatttgaggctgggcgcggtggctcacacctataatcccagcactttgggaggccaaggcaggcggatcacctgaggtcaggagttcaagaccagcatggccaacatggtgaaaccctgtctttactaaaaatacaaaattagctaggcatggtggtgcacgcctgtaatcccagctactagggaggctgaggcaggagaatcgcttgaacccgggaggcagaggttgcagtgagccgagatcgcaccactgcactccagcctgggcaacaagagcgaaactctgtctcaaataataataataatgataataatttggccaggcgcagtggctcatgcctgtaatcccagcactttgggaggccgaggcaggcggatcacttgagctcaggagtttgagaccagcctggccaacatgctgaaaccccatctctactaaaaaatacaaaaattagccgggtgtgatggcacctgcctgtaatcccagctactcagaaggctgaggcaggagaatcgtctgaggtggatggaggcagaggttgcagtgagctgagatcgtgccactgcactgcagcctgggcaacggagcagaaactgtctcaaaaaataataataaataataataacattaagaatttgctggtccaaacatggtgagttactgtgatgattcacagttgattacagacctacttacagatctgccttctccccacttcccactactgtatttgattagtctttaaataaataattaacaaataaaaaataatttaatattacccttgggaaataaaaagccatgcttcataaatcttcacaaggtatctaaaaaaaaaaaaaaaaaagccacacagggctcctatggccactgagacaaaaaaaaaaaaaaaaaaaaaagccacagaggcattcagggacacattccaacaggggtgtccccacgtctgcctcctgcagcgggtttccctccctctccccaggccaggctccgcccacagggtgaaagccattccagccatggctggctaagatcctgatagttcagcatccccagtggggacggaaaaggactgtggagtctttggacttatctctcaagccaaacgtgtcacgtgtccccagcccccctccccgagcacactcactgtcggagaagctgccgcccctccttccacaccaacgggctgttctccagggtgaccgattccacggggccattggagact

SEQ ID NO: 1946 - DNA, 390 bp, Homo sapiens
cacggggagcatgttaaatgtcaaagaaactatgtaaactggtagatgttaattaactctgccagacaaaacagttgcaggattggataaatgaggaaatccatcatctaagaagttatatgcaagaacggaagggatgagaagtcattctcatacacaaaacttctcaattctcctgtgtctggatgaaggccatagacattttatgaatttaaagtgggagcaccaaaaatgtcattggagtgcttatttcttcaagcttggtgtgttataaatgtcatctagggacgatgccataccagtaggaagatatcatttacagcgtgttctagacactgaaaccatttcagtcacagataaatatcttcccaagggtttggtttgcaaaaa

SEQ ID NO: 1947 - DNA, 390 bp, Homo sapiens; identical to SEQ ID NO: 1946

SEQ ID NO: 1948 - DNA, 291 bp, Homo sapiens
gggaacgatcttcaaagcagagggaacaaacaaatgcaaatgcatcaggatatgaaagccaagagagcatcagagttgaccatagctggaaagacacgaacatgagatggaatgacagagcggagactggaaagagaggttaagaccatattgtaaagtgtctcatggcccctgataaattatttgggcctattttataggtgataagagtaaaaaagttttgctttgttgttattttgaagaggcaaagtaaaatgaccagatttgtttgttacaaatctatgtgaagaa

SEQ ID NO: 1949 - DNA, 291 bp, Homo sapiens; identical to SEQ ID NO: 1948

SEQ ID NO: 1950 - DNA, 648 bp, Homo sapiens
gaagttccgctgtgttacagagtctttacaagttccaatcttgtaaactaggtatgattatccctttttatggataaggaaactcatgttcagaaacttaagtaatcttctcaatgatatatatctagcaactggtcgaaccaggattcaaattttatgtctaataattgtgaacaaaatccatcaaataaccatccaaaacccagcctgtgaacgcatttaaagaaattttgctctagaatcagcactgattttcaactctgctgtcttctgtgaacattgcataataaactaacactaagtcaaacacagaccatgttcccacccaagtcagccttggttcccaagcacaagtcgctttcagaatagcttgttgttgaagcaggaaaaaaaaaattgtgcttgatttggccttgagtagcaatgtgaattataaaggaagttaagcatggcttgctagaagagtcccagcggtgctggtgcttctatagaattaattggagagtctttttttttttgaagtcccaggcagccaatgagtgaaaatgcataatttatgcaagtgttggggaaaaggcacacctgtgccaagataagattttcctatcttggatgagtgggaagtttaatttttctgcaaaaataaat

SEQ ID NO: 1951 - DNA, 648 bp, Homo sapiens
gaagttccactgtgttacagagtctttacaagttccaatcttgtaaactaggtatgattatccctttttatggataaggaaactcatgttcagaaacttaagtaatcttctcaatgatatatatctagcaactggtcgaaccaggattcaaattttatgtctaataattgtgaacaaaatccatcaaataaccatccaaaacccagcctgtgaacgcatttaaagaaattttgctctagaatcagcactgattttcaactctgctgtcttctgtgaacattgcataataaactaacactaagtcaaacacagaccatgttcccacccaagtcagccttggttcccaagcacaagtcgctttcagaatagcttgttgttgaagcaggaaaaaaaaaattgtgcttgatttggccttgagtagcaatgtgaattataaaggaagttaagcatggcttgctagaagagtcccagcggtgctggtgcttctatagaattaattggagagtctttttttttttgaagtcccaggcagccaatgagtgaaaatgcataatttatgcaagtgttggggaaaaggcacacctgtgccaagataagattttcctatcttggatgagtgggaagtttaatttttctgcaaaaataaat

SEQ ID NO: 1952 - DNA, 18998 bp, Homo sapiens
  SITE (1690): n equals a,t,g, or c
atggcctcgctggctgtattccttatatgatgctgtaagtaacttaccttaaatttactttatatatggtaggccatgtcataattaagggtcattaaaaaacaaaggtttagtttttccagtttctagtgccttataacttaagatatcgttaagagtggtggctcacacctgtaatcccagcactttgggaggccaaggcagggggattgcttgaagccaggcattcaagaccagcctgggcaacatggtgaaaccccatctctacaaatacaaaaattagccaggtttggtggcatgtggctgtagtcccagctgcttgagaggctgaggtggaaggattgattgagcctgggaggtcaaggctgccgtgagctgagattgtgtcactgtactccagcctggacaacagagcaagactgtctcaaaagggaaaaaaaaaggtatcacaagactctttagagttttattaagcatgtgaaattttgttgggttgggtgatagttacatttagaacattaaagcatccatattttactgttttggtttttctctaaacaagtatattaacttacgtctcttgatcattagtctattaattaatgcatccaggagggtttttgctccttaaagtttaacactaggcattgccacattttgcaaaactaagggacagtgctgaaatggtttaaagaatctggatttcagatcagagactgacttcagagtctgatttctgtcacttactctgtgggcctggagcaaattacttctccaaggacctatgaaatggatataatggtagctattgtacctggtgtgcatagcgggcattcaataaatgctagccatttcccttaatgaatcactgcccacaaatctggagtcctgggaaaactcaacaacatgcacgacactaaaggaaactgcagttgatctccgctctttagcagcttttcagcaattacaaagacacaatatatgagtttttgcatgttttgcatatgcttgtgaaaattatgtagtaaataggtgccaagtaaggtatgtagatagcaagtgctagtgcaatttataggtgccataatccctatggactgggtcagaaatggcctaatagaaggcagaagagaggccagttccaagcaggggcatagaacagaacaatctgcaagggagttgggagcatataccgctgggttaagacagtgagtgagaaaaggctggaaggcagacagtgctgggcaaaggagctggagcttgatcattgctgcatacgaaaatggaggcatttaaactgggactgagatgggactgagtgattaaattgctaccagtgttagttttaagagttgaaaagcttaatagtaaattttaataagcccatgaacttgattatggctacctttattttaaacaaggagaccttaatggacagaatcaagaaacagctacgtgaatgggatgaaaatctaaaagatgattctcttccttcaaatccaataggtatgaaaagttagtttcctgcctggagcctgggatgtcttgctataaaaaatagctttttcatggatgcgatccaatcatatcttctaggttttaagactgattaaaacattttaattctgaaaagcataatttcctttgagcagttgaaaaaaaatgagtttttttaaattaattgcaatanaatcctcatattctgtgagcactccaattttagacaagttttccataaaaagttcaaattgcagaaagtggctgtcatccaaaaacacttcctgtgtaaggactcctttccctgttcttcaaggtgcctttaaaagaagtgagtctagttccaggacttgccttaattatagatactctctttatctgtttataaggtatagtttagttatttttctagtctcttggcaaataacttctaacatggatttgagttcatgtttaacataaaaggattttaccaaaaaaagtataagaaaagcaattaaatttagagcttctgaaaagtgtatctttgacagctggtatatttttgtattgtttatacttgtataaaatgtgtaaccttaaagagaagggtttatttcaaaaggatattatccgatttgtaagttctctgatgcttatctgactcctaagtttaaaacttgaaaaaccatgtcttgaagatttttcttacagagtagctgcttgtcttcctattgatgatgtattgagaattcagctccttaaaattggcagtgctatccagcgacttcgctgtgaattagacattatgaataaagtgagtaaagtgaatatgtttttgatgcccatgttttattcaggctggagaactaggatgctctgttggggccaatggagctctgtatagagtccagtaatgtagtcatgcaattcagatttcaattgggatcttacaaacaaactcattgttttgtgtttgtcaaatatgaatacatttatcaacttagtgaaaaataacttgatttctgcatggaaatatccaaggttatatatcactattcctttactctagagaaggtcatttagttttatgtaaatatgtggcagatctcagtttcagtgactttcgtgctccatctttaaaagtgtttttgaatgcttggaaggaaaatgtgatattcagagagagcaatatctttataagtaagtttcttgatgatctatgtgattacatgataaagtgaatgccagtttttcctaccaataatttttctctcaaatcttttagtgtacttccctttgctgtaaacaatgtcaagaaacagaaataacaaccaaaaatgaaatattcaggtaaggtctttattacgtttttaatatacttgccttatcagaattataatgaagactgtatttctgttttccataaactttcctccagtaccttaaagttacaaacatttagcaaatgaaatatagggaattagctcacttttgctaagaccatcttccagattgggtactcagagcaacaatgcatgtcagggattattcacaggtaatgagcatggtaaagtaaaacaactgagaaattcttttccccctaattcttgttgacaatctatatattagactgtcttcaattaggccctaacatagatgcttcagaaattacatttcagtcatcagttttgccatatagggccaaagtaggacatgcttctgaacacatactgatgctctgatataacagtgtttgaaaatcattttatgacaaatccatcagttgtaaatcaagaaggtaaggaaactgctttctgcaaaataatcaactgccccaaaatgaccacacaggaccttgtcattgcacttacactctcagactcctttagaagcatttgagttttatattctttacaatgtctgtcttgaggagggttttaaaaacaagtactatttcctttgggtcatcacagaaaacatttagacatttagacaaaacaggcctgtctgccagctgtacccccaccccattttcatactaagatcctggtattatataaaactgaaggattaaaaactgtatagctcatacctcatttcttggtgaacttcaataaaattctaagcatttaataaaattagacttctcgttttgacgtgttctccatgttgattctttgttttagtttatccttatgtgggccgatggcagcttatgtgaatcctcatggatatgtgcatgagacacttactgtgtataaggcttgcaacttgaatctgataggccggccttctacagaacacagctggtttcctgggtaatattatggtggtggttgcttttttttttctttttttaccttaattgggcagaaaaatccagagtcctaagcagagttgccacaatctttataataaaaagtagacagacaaatgagtaatttgctacaaaaattagccgggtatgggggcaggggtctgtactcccagctgctcgggatgctgaggcacaagaatctcttgaacctggaaggcaagagtgttgcagtgagccaagattgtgccactgcagtccagcctgggtgacagagtgagaatctgtctatttaaaaaaaaaaaaaaatttatttaaatgtccttcattccacaaatagctagaaacatctgttgcactttttgtatcttttatcattgaatgaaaggaagaaaaggttgacaactgcagttgtcctcagattactgtatccagttaaatccaaaattgtttttttctgtcagtcatgtaattctgaaaatcagctgtcttatgacccagtagaactttatatctggaccatattctgtagtaatgtaaaaccggagaatgtttacaaagcaatgatagactaagaaggtgcagaacccattgaatcctgcttttcttctagtttgccttttgtttgtttgcttcagcttaatgattctctatgatcctgggaacctgttcagttccctcagctgtactatcttcagttttcaaagagggatgctaagaagggattacatgctactctggggttaggactatgtatcttggattgccctatcttacttggcaccctatgtgaggactaaaactagaatacatttgttactataaataaatgtggcatggtatacctagggaaaaaaataaggaaacagttgcaattacatggtttatcttaagaacaaaataccatggtttgtatttctggttgcattatctgacaatcgttcttattttagaatataaatatttactttttgagacgtgtccttcctggcccatccagtttaactcagacagaagtgcattatttctgcaggtaattgctgttttctaacttgactgcaatacaacaaaggaaaagccagtacaagttagaatgtggtgccagtacaagttagaatgtggtcttggcaaccagcaatttctataaagaaattcttaagattactctttatttctatgcagtagaagaaaaatgtaaacatggcttaagagcataaaagtcatacatattacaaaattagaaaatgtttttagaaatgtttttaggtttcagggaactgtatggatcaaatctcaacttagaatctctaatccttagaatttgcctctaaagtctgtcttcatgataggtttatatgataggcttggagtacagaaatgtttccttagctgatatctttccttaatttcttaggtatgcctggactgttgcccagtgtaagatctgtgcaagccatattggatggaagtttacggccaccaaaaaagacatgtcacctcaaaaattttggggcttaacgcgatctgctctgttgcccacgatcccagacactgaagatgaaataagtccagacaaagtaatactttgcttgtaaacagatgtgatagagataaagttatctaacaaattggttatattctaagatctgctttggaaattattgcctctgatacatacctaagtaaacataacattaatacctaagtaaacataacattacttggagggttgcagtttctaagtgaaactgtatttgaaacttttaagtatactttaggaaacaagcatgaacggcagtctagaataccagaaacatctacttgggtagcttggtgccattatcctgtggaatctgatatgtctggtagcatgtcattgatgggacatgaagacatctttggaaatgatgagattatttcctgtgttaaaaaaaaaaaaaatcttaaattcctacaatgtgaaactgaaactaataatttgatcctgatgtatgggacagcgtatctgtaccagtgctctaaataacaaaagctagggtgacaagtacatgttccttttggaaagaagcaaggcaatgtatattaattattctaaaagggctttgttcctttccattttctttaacttctctgagatactgatttgtaaattttgaaaattagttaaaatatgcagttttttgagcccacgaatagttgtcatttcctttatgtgcctgttagtaaaaagtagtattgtgtatttgctcagtatctgaactataagcccatttatactgttccatacaaaagctatttttcaaaaattaatttgaaccaaaactactactatagggaaaagatgccaaaacatgtcccctcacccagactaaacttgatactgtattattttgttcaatgtaaattgaagaaaatctgtaagtaagtaaaccttaagtgtgaaactaaacatgttctttgttcaaataatgtaaaatatctactcataattttaaagttctaaaaaggctgctttgccacctacctctttgcttatattcaagggtttagtgggtccttccttccacatttgtatgataactttcgttttattggtagtcctttgctactttaaaactaatcaggttaaatgtttactcaaatgtagtaatagtatgaggccaaaatacatgccttgaaggtggagtgaaatcagttgagtgtcacactgcatatttatgtaaatagagtaaatgaaaattcaagaatacttccaatcaggatatgcccctgccttattttttctaaggtctacttttactactttaataattttgggtttgtgtgacttcactggtctggtttgttcctatagttcttacactgcactaaaacttacttactccaggaagttcctgtcagtagcatagtacctctctgtaggctgaactctaaaccagttgcaatgagttaccttgtccctctgaaaagttaaaatttcagtatgtcccataccgtttactagcaaataaaattttctgatctgtaaaaacacacatatactatactactactgaaaatggttttacacatgacaaaaccagacctgatagctaaatctgcatactttctatacagaaatagtatgtattatatgacgttgggtctaaatctgtattttggcagtacttaaatattttaagtaagtatttcaaagtattattttataatgcatctaattactgacctgtatgcagtcatttctgaggctttcttgcatcatagcccctgtgacatttcctcttagaaatattacactctacaaaattgttttatcaaggtccaaaattactatttgctcatagagtacaaagatgttatgactggctacacagaaaggaaataaattatgaaatgtcagtatagcagctgaaattatagcagctgaaataaacagtttgtattatacattttatttacctgatgaaagcatttaggactcaaatctttagagaatatataataatagccatatccttttaattaataaaataacactttaaagacaggcatattaccattgtatatgacacctaatacacattgtcagataccacataaacatatttatcttccaataccaatgtttgttttattaaaacaataattaattaataggctcaatagtgaccctcaagttaatcccatgacttccccaggctctgcatgcataaagaaatcattgtgacagaaaaatatcaaccacatactgaagcatagcttgctagaacaaatcctgtacatatgaatgccagcaactggggacacatttagtattcacattttatgcaaacttacttggtcaattatttcttttttaagcacaggtttattttggaattcagataagaactgacacatcatagacagtcattgttaaggtaaccctgttatttcaattgcaaacaaacaataaacgttttttcttcaagacagttaccactttttaagatcttagtactaccctatgcaaaaacagttttttttaaaagcctgaacaggttaagatagataatagccaactatgttttctcaggtgaaactattccaaaagaactgtacatttcagtgatataaatcagatccagaaaggtggatctctgtttagttcttgaaatatataattcacaaaataagacccttgttgttctacagaggtcccctaaactgtcttttattctggtgtagtctctaaaacctcattaagagggaggggagaaaatttagtcttaccagaaatgctctgctttttagtagccatcagttttaggtcttctttatgtaactcagaagttcatctttttccatttggtaaccactttttttccactgttctcgcaactgttgtaatagagccccaatttcttttcctgaagaaatgcccacttttctgatgtcatgcccacttacaggaaatggaggaatggaccactgctgcatttcctttagaagacagtgctctccttggtacttcagtagttcacatacacgagtagttgcatcaggttccctagactacgtgtcaaaatcaaacatttagtttcgtcacacatgaaaacatacacttacaatcttatcctaaaatttaaatactcaacataaattttttcatttaaaataagtaaaattcacagatttgtagatcttagttttaataaattaattctaaattcgtgacgatacttcatatttctgaccaagcctagtatatacttacatctataatgaagtcttgatagggtttcaatgggtctgaactatctgttgctttaattaaatctttcctatttttaactataaataagccaaggtttttctcctcttttgcgatcttcaacctcaaatccaattttgtgacatcatcttgtactttgaataatgaggccaaaagagtcactggctttggtgaaaaaccatcaacatttttactgactttgtcaaattcttctaaacttgcattagcaggtaaacctgtagggacaaaagcatttttcacctgtttttagtggggataaaaaaccactcatatcctaaaccttgccaccattttagtatccagaaatgctttgtcactaggatacattatataggttcagtctgatgttccaacttaaaggcgaaccactaatatattgttattctctcccctgtcaccttcaaaacctctaaaatgttcttgtttccattaaagctacatcaagagttccaggggtagtggtgacagtggtgtcagactcacaaggcatactctttctaatcacaaattcctgactttacactgatacaagatccaccccccattcagtaatgttactgaaatttgaaatatgcccaagcttaccgaagtgtgataaaccatataatcccactattctctgtgaaaatgaattacaacgtttactgaacaatttctgtgtacaagtcactcttctaaaagagctttacatgtattaactcactgaatccttttagctttcctattagatagaggctacattacttttaaaccgcttttttgggttagaaactaacccaagttgcaaagactagataaggggctgagcttccttcaaacctaggtctgactagagactactctacaagcaccacaagctgtctttgagctcttccctactcacgacaaaacttaccccataacccaaactttgtcttattttaaaatactccatttctccaagaattcttcaaccaaatgagtcaaacattttttccttatgaaatttgaaaccagatatttcactgccaaaaattcaaacactttataacttgctctcacctatataaggagccacatcaagatcatagataaggtgaatcaaatgatttacatggttaccaacaagaatttttttcagttccacccaaatcctttctcctgatattccagccaagccttttgcattttctgcaattgcttccaaagtctcaggatcatggtcaccaggtttgtctacaattctcccataaaacctacaagacaaaatcttcacagggtattacctctatattggcatatcacaagcaaaatctgtttttcatttttattggtactatcccatacatctgcttaatgaaaacaacatataattagttaggtctagaagggaccttagaaagcaactggtcatttctccacctcctctttcttttcccagataagaaaacccaggatcgaataaaatataagtagcctttttgaggttagcaagaactaaaacttcaaggtctccacctcacttccaaattactgactcaagacattccgaatggtcatcaaatgcaattcctgaattggcacttatactagatgaaaaaaaaaacagcattcttgtaaaggcagcaaaccaaaacaagactgcagtgccttaacagagtagtctgaattcctcaaagcttgcctgtctgtacacattagtactttcaaggaaaaccttcaaatacgactcatctagttgcgcaccctggagtatatttcgcggaatcttagaactggaagccctaacgtgcatgtgtttccctctcatgcccttaaaattctaatgaattcatcagcggtccaaagtgatgctaaataagtaaattaatgctaaatctggattagtgatacaaatacagctaagtcttaatctatgttctattatttataagacagactacaaatactcaagtttagagaaactacattgacaaaatatccatgttctgttatagaatattctgagagcaatcccaaccagtgaaaaatgaatattacttgacataaactagccaattcggatagttttttaaaaaggttagtgtgtgacatttaaacatcattgctacccacaaaactagtcatgcgtttcatatttaccaagtttatccaagatcttctttttttttttttttttttttgagatggagtctcgctctgtcgcccaggctggagtgcggtggcacgatctcggctcactgcaagctccgcctcccgggttcccgccatcctcctgcctcagcctcccgagtagctcggactacaggcgcacaccgccatgcctggctaattttttgtatttttagtagaaatggggtttcaccatgttagccagcatggtctcatctcctgacctcgtgatccacccgcctcggcctcccaaagtgcggggattacaggtgtgagccaccacacccggcccatccaagtttcgattatgtctttatgctttgattctttaaatcatataacaggtatttcttttcaccaaaatcattttgttgtgaaccatcaccgatttccatgactacctaaaaccgtaagctgtatgaaggcgaacactttcactcgttcattaccacgtttaatgcacctaacacagggattgacctgtggtaagcattcaaacatctgtgtaattaataaatcaatggaggaaatatcaatcaaaaagaaaaatggacatttaaaaagatgacttaaaattgtaggaaagatgacataaagtatatgtgcgttctgggaatgaaaatacaatatgaagtagctaagtaattttcactcataagtcatagggtgctaggtctccactggagacagacatttgggatgtcaccattttgtacactgacctgctgtgggtttcgtatgaccactgttatgctctagtcatgatattaaaactatcattttttatttttaaaaattcttacctgaagtatcttaaaattctaagataatcctcttgtattctctgtttagcatgtccaacaaatctaactttcttattttttaaatcttcataaccattaaagtagtcaaataaagtgccatcaaaacctattcattagaaaaggagggagaaaaatcactattggcaaataagaatttgaaaacacaagaaaatcagctaaacactatcacaaacagtaaaaattcagcagagtgaacagttattaaaacacatacgtattcatacatatcaactatcaaatggaagacaataaaagactgtcttttagtctgtttagctgcatttacaattgcaactaaaaagataatccaagaataaactaaacaagaaatatgcaaaacttgtatgaggtggagtggagccaacaagacaccatacaagctaattttcacaatatgggaaaataatagccaaaataaaatggaaaaaatacgtaacaggattaacagaagaaacgaggaaaatatttttaatcttggaatctttataatcttgaagatctttcaaactcagcaagaaaacagaaaacgcaacacaaaaacaacaggattttcgaagaaataattgaatgacataaaaaatgaaatatgcctgtatggcagaaactactatcacacacaaagtcataagtgacatttttggaaaaatatatgtaagtccatattttaaaaatggctaatttccataatatataaaagttctaataaaaaggccacgtaaatagaaaaataggctacctataaaggaaatatagaaatctctttaataatgaagattttcaaccttagtcataaatcctttttttgttctttgaggcggattctcactttgtcaccctggttggagtgcagtggtgcaatctcagctcactgcagcctcccaggttcaggtgattctcctgcttcagcctcccaagtagacctgccactacacacagctaatttttgtatttttagtagagacagggtttcggcaagtgggccaggctggtctcgaactcctgacatcaagtgatctgcatgcctcgtcctcccaaagtgctagggttacaagcataagccacccatgcccggccagtaaatacccatttccaagatagcgtctttcagatcggcaacgatttaaacacttgataacagtgttagcaagggtgtggttaaatgggcagtcctgttcattacagatcaggagacttcactgtagagcctttaaaactttgtgaattttgaaccatgttaatctattagccattcacaaaaatggtaataaacaaatgttctcatatgttgaatgaaaaaagtgacataaaactaattttatatatatgtacataaaacctcaagtattaattagtagagtgaccacttcatactggtttgcctgagacattcctagttttaaagttgaaaatcatacatccaaggaagtatttcaagctcaggcaaactaagacagttggttaccatggagacttaaaaaaatagaaaaaggaatttagagccgaaacacagacaccattcagctcaccaaatggggaggtcagtgatctatgagatacttcactctgtagcattacagaaaagaggcactgacaactacttatcaaaaatacctcttggctgtgtttgaacttgaatgttctctgattatcccaaaagcaacagtacattggtaagttcacacttaatgcttaactctttccaagctgttaatagttttatatgcatagtaacttttaaaagggaaccatcttgacatacatggcaaatttcgaaggctccagattcaaaaagacataaaagaaaatgataaaaagaaaatatgtaaataggcaaaaatatgatcacaaagtagcaaataatatggtatatccatcttggtgttatttctcctaatgaagagacttgtaaccgtccctggggaacctaaaggcaagatcaaaatttggaggaaaaaatcataggaatatgatcaaagcaaaaataagcgtttgggaagcaaagtaaccaaccataaatgccagaactatgaatgcttgatccaataaggcttggaaaaagccaggatagaaaactacacaaagcttagtaagcatcatactggtgtgtattttgttttgctctgaatatcatccttttaaaatacagtaaataaaaatatgaaatatggttgagttgcagggaataatgtagtggttaagaatgtgacctctggagtcaggctgcctgagttggaattctgatcctacactttacaagctgtgcaactttgggcaagttaccatcggttaaatagcagtatctgcttcgcagggttgtcaggagattaaatttacataatgtgctcagaacagtgcctgacatgttataagggttcagtaaatgtcagaaaatgatagtaccaataggaacaacttttattttataaactaggacactgaaaaagagtattagtttctctctttcagtatgcttatgagaagccagttagacaagactctatattgcactatttggagcagcttcctctatgagtaaatatgagaataaataaatacctggagctctgactacattaactgagagaaaaatgcaccaattgggctctctatggtcatatattgcctaggccttggaaacaagccaaaatcatggttctctgtgacttaaactaagttacttaatatctctcagtctcaagtttcctcttctatcaagtgggcttaacatactttatgaagtttttctgagagtttaatgaaataaagtatatcaggtacccaatgttgtacctagaacccagtaggtaccctagaaattgtatctgtcattactgtaatcagcaagagatgccaccttagcttataaacttcttgcccatctatgcatgaagcaaatcctattacttcatccttttaccactactattgctacaaactaggttatgaacagtggatgtttcatccttttttaatccaaaatcttaaacataaagggcttgtcttaactttaaagtacaacatatgatgcatcagtaatgtatcaaaacactaacctaattcgtatctagcccccatataattcccagtgctttcattaaacaaaaaagttaagctgaaataaataggtttcatcttacataccaactctgattattgatgattcctagaatacaatgctaaaaaagaatctgaggttgtgtgtaggctcagcagtaaaaagtgctgaagtcattcaccattgtttgccagggaagcagaagaaagattgaataaacatgcatgaaagatagtgcaaaggaaaaagaatgatcctgggtgtgtgtgtgtgtagatgtgtgtggagtatgtacatgtaccatgtgtgtgtgcacttctcttccctgaaatcatgtttatatgcagttaagaagttagcactgactgagtgtgtacatgtgtcaggcactgttctaagcatttacaattaactctcttaaacctcacaacagcggtacaaaggaagccaatattaattaacgtttttgttttgtggctagtgagtgacggagtcagaatttgaacccagggattttggctccagagtctattctttttttttgagatggagtctcgctctgttgcccagactggagtgcagtggcacaatctcagctcactgcaagctccgcctcccgggttcacaccattctcctgcctaacagctgggactacaggcagccgccaccacgcccggctaattttttatatttttagtagagatggggtttcaccgtgttagccaggatggtctcgatctcctgaccccatgatccgcctgcccttggcctcccaaagtgctgggattcaggcgtgacccaccgtgcccggctgagggactattctttgaagcaatctgctaaaccatctcttagaagaaattaatgcaacttctcaagttgaagaacatttccagaatgtaggttttacttgaaaagaaggcattctgatagactcacaatatggttttatctgcaaatattacctaaaaacatagaatttatagtgagatctctgcgttccgcatctttctgccagtcagttgtaaattctacctcagcatgtcttccatcagtggtgacatcaatccgtagtgtagtaatctcaaaattttcttcatgaagctgcaattaaatacatggggtttttgttgtcatttaaattaggttttcatactactgaattgaaaaaaataagtttttgtctttataaagggatggtactataagccctgacagttatagtctttttaacgtcaactaccatacctaaacattgaaacagaaagatatccacattattcaaaaacagatcaaaagactgatttttttaaaaaaaatccatcatgattaaaaaagatgagtttaacacacaaacatgtcacctctgccaagtgatgtggagaaactccacatcaaactcaaaactgttcttcaatttcaaatcaagctattatcagaaatatttttaatagctccagtttgcaaagaggtgaatgtcaatttatggaacatttgccattgagcgaaagactgataaagaataagtacagttaacagatcttgcaactcccttactgataatccccagtgaaattaaaataaaggctgggggtggtggctcatgcctgtaatcccagcactttgggaggtcaaggcaggcagatgacttgagctcaggagttcaagaccagcctgggcaagatggtaaaaccccatctctaccaaacatacaaaaaaaccagccaggtgtggtggtgcatgcctgtggtcctagctacctgggaggctgaggtgggaggatcgctagaccccgggaggcagaggctgcagtgagtcgagatcacactgtgcactccagcctaggcaacagagtgagaccctgtctcaaaagagaaagaaagaaattaaaataaagagttacctctatcttgggaagacagactacctccagctggggaagctgagtaacttcatgttagggtggcgtctgtgccaagccttgaaaaagcagcagggtttgtacatgcaggtgtggtagaaaaacttcaaatgaagagaagagatgaccaaaggcacggtggaggaagaggaatatatgtaaaagagaaagtatatctgacaggtagcatattagcatttaggagtagagaataaagtgttttatgtgccaagagttaggaatgtctttatttaggaagtgaaagccgttaacgatcaccagaagtctgttgtaggatttctctcaatttgatacatactcttctctaaatacaagctacatctatctctcactatagaattccagaactcaagaatttgaggcacaagtatctctgaaggcaaagaataaggtaaggtttgaaataggaaaactgtttgcaactcattttaagaaataatcagacccacctagaatgactcccttaatgaggcagaaaaccagggactgattctctagaaaggttcaaccaaaaataatcagaacttgttgcaccaggcacagatgctcatgggaatgaagcatcataatgaaaacaagattcaagtgaaaattaacatgaccctcatccctttccctacttggtttcaagatgctaacaatcaggttcattccctggcataatactggagtattcttctctgatttctcctaatgaaaactcctactgagacttagactggggagtcccagttggctgacacttcccatgcaaaactacaataaagccctcagatacagagcatcacccaaattcaaggaaagccaacctgaaagaaaacactcggaggaaacaaagacactgtcaaaataactatagtagatatcctaagagaaataaaagatcttccatctgaaacatgaacgggaagctttccaaagaaatatactaagaaagacctcttgaaattctacaagaccacagaagttgtcagtattatacaatgactgggagatgaagttaaggcactctcatagaaagtaagacaggagaatataaaataaagacaaaagataaaactagaaggtcagtcccagcaatccaggatccaaataataagagtttccaaaggaaaaagcatttaacaaaagggatgaaattatgaaagaaacatgagggcccactaagtgccctgcacagtaagtgaaaaatccaaaacaagttatatcatcttgaaattaaaaacattagacatgaaaagatcagaaagacttccaaaaggaaataatggcaatcaggtttttaaacaaaagagaaatctaaatggaactagacttactggcagtactggaagctagaaaacaatacctttaaatttctgagtaaaaattattccctgcctagaattctataaccgtaactatcaaaccaccatggaggtgaaataaaaacattttcagacgtgtaaggcttcctcaggttttggattattaaaatgagggcttaagccaagagagaacagcacatgggacccaggaaacaggaggcttaacaaaaaagagaggccaaggaaattcctaaaagtccatattggagcaggaagacagcaccaggtaagatgtttcccaaaaacccaattgaaacttgatataatgtgtttaaatcttttgagaggaactctatagctctggcacagagtgcaggaataaattggtagtatatggaaagcttatgtaaaagaaaaatgccattaactgcaggaaaatttaaaaacatgccaatagaagaaatgtcatcacaatatactccacaatctggctgtaaacaatacagagtcataaacgtgaaccctgaatattgacttaaccaaaaattatgatataaatatactaggaagacagaagaaggagaattatacgtgcttgttgttgagaagggtgtggtaagaaagctaaatcatcttcccttatggaaagtcaatacgtaacacatcttaaaactgggatagtaaaaactgaaaagtaaatacccgtagcatacaaaggtctttttagaaatggagaggtaacataaaaagtaaacatggctgcaagaacagaggactgcagggtttatgacgggcatagaagagactgacttttttattagacttttcgttatttgcttttaactagagaaaattaagtttttaaaaattaccaaaaaagcaatgtaattacctgtcaaacttttgactcaccctggcagtaattgttccgtgcttttctcctctgttgtttatcatccgaatcccagccgactgaaacatctccttcatttgagtaggggtagcagtggtggcaaaatctatatcctgaggctttactccatttaataaatccctcactgctcctcctgctattcttaattcgtgattctctttgacaaataattctg

(The sequence listing continues in the following parts.)
